United States Patent Application Publication US 2020/0109395 A1 - sequence listing, part 19

SEQ ID NO: 74999 - DNA, 1806 bp, Algibacter lectus
atgtttgtttgggataaagaagatttaaatcaagaacaagaagatgcaatactaaattcagaaagcattttgttaattgcttgtcccggaagtggtaaaacaaggactcttacttataaaatagcatacgaattaagtcgattagaatcgagtaaagagtttgttatagcaataacatacacaaataatgctgctgatgagataaagcacagaattgaattattgggagttaataccgagcaattatggattgggacaatccactctttttgtttagaatggattttaaaaccttatcatttatactctgataggctaaaaaatggatttcgaataatcaattcctatgaatctgaggaaatattaactgaattatgtaagccatataaaagtcaaagaatcacttactgggattgtgggctacttgcaaaaacagatgatatttatttaacttgcttagattcaagtaaacataaaaatcttaaaagtatcatatctgagtactttcagattttagagaaaaacaatcaaattgactttgaacaaattctattttttagttttaaattactagaaagtaatccaattatttcaaaaattttatgtaaactattcccttttatactaattgatgaatatcaggacactaaagaaatacagtataacattatcgcttcaattctaaaagcaaacaaaggagaatcaaaaactttaattgtaggtgacccaaatcaatccatttatgattctcttggtggttacccaatgtcaaaagaagaactagaaaagttaattggatttaatttacaacaaaatagcctatcaaaaaactataggtcatctaaaaaaatcattgagtattttgaatacttcaagacatttgaaaatgaaattagctctgaaggcacgaacaaggattatcctagtaaaataacttttaacccaacaattttagtagaaaatataatagatgaaatttctaaactaattctattcaacattaacgaagagaaaatattaccaaatgaaatttgtatagtagctcctcaatgggttcatttagctggtatcactagacaactaatgattaaaatgccagattatagttttgatggcccaggaatggctccgttctctagagatatagaaaatttctggtataaattatctagaattgttttaactgagccttctccatatatgtacattagacgtttaagatggagcagcgaacttattaacgatttagatttagcaggtgttgacgttactgaattaactagcaaaagacttttaaaaatatgtaactctataaaagtagatgaaactgatggattaactcatttggaattattctttaatgaagctagcagattattatccataaacaggattaactaccctactctaactgaacactatgattcattctttaatagttcgcgtaaaagaattgaaaaacttgtaaaagaaggtaacgagttcattggtaacattgagagctttagaaaggtttttaaacaacgtgaaggaataacagtatcaactgttcacggagttaaaggagaggagtatgatactatgattggttttgcaatcctagatggttacataccatattttagtgatggaaatggagatgaaaattcaagaaaaatgctttatgtattagcttcaagagctagaaaaaatttacatatcctttctgaaaaaggaagagcagttcataattatcacgctcctgaaggaaaaacaccaacaccacatttagtagaatatgagtatgagtatgacgttttagaataa

SEQ ID NO: 75000 - DNA, 2109 bp, Burkholderia cenocepacia
atgaaacttcataaagttgtgatccgcaattttcggcgcctcgagaatgtgatgatcgacgtcgaagaaaaggagacgctgttcgtagggcccaataacagcggcaagacttccgccaccgctatcttccgtgcctttctcggtggacgtgagttcaagatccatgacttctcggtctcgcgcgttgcagatttcgaccgctttgccgaaaccggcgacgttgataacctccccgagatcggcctcgatctctggttcgagatcgatcccaataccgtcgctttcggccgcgtcttcaccctgcttccgaaactgtcggatttcacgcaagttggctttcgcctgcagttcggcatcgccgatgccaagaaattgcgtgaagagtatttcgtggcgtatcctgccgacgataacggtcggcgcgctcgcagtctttttcagtacctcgccactgacacaaacctccaccgccacactacaacgcgctatgcctcgctcgaggcggtggctggagatggcggcgaaactgctatcgtcgcgaccccactggaaccagatgaggggaaacggctcgtgcgccaactggtgcgcgtcgagtttgtcgatgcccagcgcaacatcaacgatgatgacaatagtcgcagtaaccgtctctctgccgccttcgcttccttctaccgcaagaatctcgatcaagctgaatatgccgctgaagcgcaccgagttatcgaccagaataacgcagacctgactcggcattatgagaagcaattcgccccactgatggacctcatcagagggcttggcgtgccatcggtcaacgatcgtgaactgaagatcatatcctcgctcagtccggaaagcgctctgcgcggcaacaccgaactcctctatgtcgatcctgggcggaaacatgagttgcccgagctttataacggtcttggtttcaagaacttgatctatatggcgatccaggcccggcacttccattcgcagtggctcgctacggcggacagccggccgctctgcctgttgattttcatagaggagccggaggtccatctccacgctcaagtccaacaaagtttcatcaccaatatctggagcgtgattgaggcctccgccaaaaccgccgatcagccaacgctcatgccgcaactcgtcgtcaccacccattcctctcatattctcgatgcggtggatttcgagaaggtgcgctactttcagcgctgccatcttggtggagaagcggcacaggacggcatccgtaacgcgtccgatgttcgcagtctgcgcgcattccagcctgaggccgatgtcgtcgacggtgtgacgatctcgcccgagaatacgttgtcgttcctgaagcgctatctgcggctcacacactgtgacttgttctttgctgacgcggcaatcctggtggaaggcgccgccgaaaagctgctactgccttcgatgattgaaatttcggcggtacggctccgcacttgctacctaaccatcctcgaagtaggaggggcctatgcgcaccgctttgaagggctgctcgaatttttgcgtatcccgtatctcgtcgtgacagaccttgattccgttgaaccaacggggtacccaaccacgtgccgcgccgacgtcgcgggtgcacgaacctcgaacgcttcgctaaaaaagctctgtgggaagggcacagtcgccgagctaattgcaatgtcacccgccgacaagatccacacctccaaggatcgctgcatcgccttcgaggttggtgtgcaggttagcgaaggcggtactcaactcgagatgattccgcgtacgttcgaagaagcaatcgcatatgagaattttgagttgcttcgcactgagactctgtctatcggcaaagatatcccgtctaatctttccgaggcttacacggttatctacgagcgcattagctctaaggaattcaagaagacggagttcgcgatggacctgctcgcgaccaaatcgcgctggacggtgcccgcctatattgccgagggtctgcgctggctcgagctccgactgcgcggcgagcaggcaccccaccccagcacccacaagaggctacgccagaggcaggagtaa

SEQ ID NO: 75001 - DNA, 1848 bp, Burkholderia cenocepacia
atgagcagcaaggtagaaacgcaggccgacgtcgacgtgcgcgcctgtatcgacggacatcatagcttcgcgctagtcgccggcgccggatcaggcaaaacgacgtcgctcatcgaagctctagctcgagtacgggagcgcgagggccggcagctgcgacaaaatggtcaacgcgttgcctgcatcaccttcaccaagcgtgcggtcgaagtaattaaggcccgcctgggatttgacgagctttatctggtctcgacgctgcatagctttctatggggccaaatcggccgtttcaacgacgatattcgcgcagcgctgcgcgacgcgcggatcccggcacttattcaaaaggagcgtgacaaggacaatggtggcaatagtcgcacagcgactgatgcgcgcacaaaggtgcttcggtacgagcaggatttaaccgagctcaattcggtccggacctttgtctatgacgacgcccaatggggcgactattcggcaggccggctcgggcatgacgacatcatcgaaatcgccgcccatctattcgaacataatgcaacgtttcggcggatcatcggtcttcgattcccctatatcttcgtcgacgaagcgcaggatacctccccgggcatcatcactggcctcaatatgacttgcagtggcgaggggctcccaatcgtcggttattttggtgacccttggcagcaaatctatgacggcagcgccggggaattcgcgcctccccttggtggcaaaccgatcaccaagactgagaactttcgctgctccaagagtgtcattcgcctcctcaacgccttccgatccgatgtcgaacagtatcccgcgggcgaaaataagaatcgtgagggcagcgttctcttccggctagtccaggcggaaaaaccagaactgccacgcaaccgctactccgaggaccagatcacccgcgcgttagcccgaatggacaccgcgatagctgactggggctgggcagagcgtgacgatgtgatcaaactgtttctggccaaccagatgattgcgcgccgaatgggcttcgccgaactcaatcgcctgttcaacggtccctatgcgtctactcgcgcagaagaggcattcgaggcgggcgagcattttttgattcagccgctcaccgatatcgtctatccgctcgttgccgctcgtgccgtcaatgacaaccgcgccatcgttgatattcttcgccgcaacagccctgccttcgctgccgacgggatcaatgcagagaatacgctcaaggcgatgatcgagacatctctaagcctagttgagcagctcgaagcgctttgggcatcggcgtcaatcggcgagattttgcgattctgtgctgcgaggcagatcatccctgtttcgagcaatctgagcgagcaacttgatcgtgctccacacaatgaggactatgtcgaagaattgcatgtcctcgataagggcgaatggctcgccgatgcattgttcgcgatgaagccaaatgagattgccgcttacgcttcctttatttccaaaaattcagcctacagcacccagcacggcgttaagggagaagaatacgccaaggtgctgatcgtgtatgacgatgtcgaagccgcttggaatctctacaatttcggcaagacactaacgcccgtaacggccggcgaaccgacagatggccagcgaaacagagggcagcggcttgcttacgtgtctttctcgcgggcgcttgaagacttacgggtactgttcttcacctgcaaccccgacgcggcacggcaggaattgattgaccgaaagctggtgaccgcagaacaaatcgagattgtgcccactcaagtgtga

SEQ ID NO: 75002 - DNA, 1905 bp, Pseudomonas sp. HMP271
atgaagcttcaaacgattcgtctatcgaatttccagtcttttggagtacagcctactgagctcgggttggatgagattacctacctgattggccccaacggctcaggtaagacagctgcactccaagcgctttgccgcctgtttgctttcgacccgtccttgcgccgcatcctgcgatcagactttcacgtccccttcgatgaggagaacgtgccggaagagcgccagctttggatagaggccgatttcgtctttccggagctggcggaagatgaagacaacagcaccattgctcctcactttggccacatgcggcttgatgaggcggatggaattccacgtgttcgttttcgcctcagtgccaccatgggcccggacggtgacatagaagagaccttggtttatgtcttggacatcaatgtggatggttcgccgctcaacacagcgcaagtgccccgctctgagcgcaaccatatccatgtccactacctgccagcccgccgtgacccagctgatcacattgcctacggtgccaatgcgttgctcggacgcatgctgcgcgcggtgaactgggatgcagagcgtgatgtcatcaagggtctaactgaccaaatcagcgacagtctggcgaccaactcatcggtagatgcatttagcgcaagcttgaaagcggcttggggcgctttgcacaaaggcagtttctttaccgatccgaaaatcaccttcgtgacctctgaggtcgaagccttgttgaggcatatgtcggtttccttttcgcccgggcacgatgagcagttggtggacttctcacgtctgagtgatggccagaaatccatgctttacctgtctctcgtgctctcgtcacaggccattggtcgcgccgtactggctgaagaggacaaatcattcgatgtcgacaagttgcggccacctgtctttacgctggttgcagtcgaagagccggagaatagtctttcgcctcactacctcgggcgcatcgtcaatgcattgggtttgatgaccggcaatggcgacgcgcaagcactgattgccactcacgctccgtcaatgctgcggcgcgtagcccccgaacggatccggtacctgcgcctgacagaggggcgaacatcgcgcgttacccatatccaattgcccgacaccgcggacgaagcacacaagtttgtgcgtgaggctgtgcaagcttttccggaagtctatttttctcgccttgtggttctgggggaaggcgacagcgaagaaatcgtgctgcctcgactccttcaggccaaaggtgctcctgttgatgagtctgcagtctcgatagcgccgctgggcgggcgtcacgttaatcacttctggcgcctactgtctgccttgcagattccctatctgacgcttcttgaccttgatgtcgcgcgccatcaggccggctggggacgaatcaaatacgtgaatgatcagctgggtaaatatcggctagatcaaaagcttcccaaggattacgtgatcccaaagtgggattcgaccaaagatatggttcgggacttcgacaattaccttgaggagctcgaggatcgagatgtgtacttctcgtaccccatggacctcgatttcgcgatgctactcgcctacccggacgcctacgccgtagtgagagagacgcccgatgattcaacgatcgtggctgtcctcgggaaaagccaccacgatgcaagtcaatacagcgaggacgaacagaagttgttcggcacttatcacagcagcttcaagcttggcagcaaaccggcagcgcatattgaagcgctcgctaagctcaacgatgaagacctgctcgccaacatgcccgaatcactcggacgcttggccgatgccgtgatctccaagcttgcggagttgcctgagtga

SEQ ID NO: 75003 - DNA, 1674 bp, Pseudomonas sp. HMP271
gtgataaccgccgatacatggcagcccgcagatgggctaactcttgaacccaatgccctgcgtgcggcaaaagagcaagtgcactgcctggcgctaacggcgggccctggtgcgggtaagaccgaaatgcttgcgcagcgggcagacttcttgctgcgtacaggcacgtgccgctatcccaaacgaattctggctatctcgttcaaggttgacgccagtagcaacctgaaagagcgggtgaagcgccgctgtggctctgagctggcctcgcggtttgacagctacacctttcacgcttttgccaagcgcattatcgatcgcttccggccagtgctaacgggtgagtacgcgctggatgctgggtacaaaattgctgatcgaaaaccaggaccctcgcgcagcctcatcgaatttgccgacctggttccgatggcaatccagattcttcagaaatcagaaatggcacgtaatgccatccgccagacctacagcgatgtctttctggatgagtttcaggactgcaccaatctgcagtacgagcttctgaagctcgcctttcaaggcaccagcattcgcttgaccgccgtgggcgataccaagcaaaagataatgggctgggcgggtgccttggacggcatcttccagaccttttcagccgactttgcagcgacaccgctcaacatgtaccgcaactttcgttcaaagccgcgcctgctgcgcctacagaatgaaatcatccgggtgctcgaccctacgtccgtcatgcccgatgagcagcttgtcggcgatgagggtgaggtatttgcttggcgtttcgaagacagccgcaaggaagctgagtatctagcgggcttgattgatggctggataaagaccaaacagctatcgcctgcggaaattgcagttctcatctccaagcagctcgatctttacgccgaccatctcatggctgcactggaggcgcgcggcattcctttccgcaatgagcagcagatgcaggacatcacggtcgagcccgccgcccgcttgatcgtggactatttatcttgcctctacggcaaacgcgagccaaaagcctggattcggctaatgaatcagctagttcctttcgcggacgaggacattcagtcaaatgctcgtaaggatcttgatcgactaattaagcaacaacggaaagaggcggctattgctgacctgatcgcggagcctttttctggctggtgggagtttgttcgagccttcttgaagcaaatcagtctcgaaaccctcgtggcgctgtcgccggactatgagtcccatgaacggctcaaagaggtcgtccgaaacaccaaggcgcgcatcgaagagttgcttgagctggagcccgatttgcctaaagcccttgagcggttttcagatgaccaggcggtacgcatcctgacgatccataagagcaaaggtttggagttcgatacagtcatcatcctggccgttgaaaacgaaatcttctttggtaatcaggctgaaaaccgttgcgcttattttgttggggtctcgcgcgccaagaggcgattgattcttacctatgcagaacaccgtgagcgacccgctgacgcaaagcgctgggacattcatcgttcagcccagaaagaatattttgactacgccctgccgtttgtgaagctacagcaatga

SEQ ID NO: 75004 - DNA, 2292 bp, Pseudomonas syringae pv. tomato
atgcacatccagcatctggagattgcgaacttccgcaagctcctgtctgttcgaatcgacttagcagccgagacaaccctattagtcggagctaataacagcggcaaatcttctgccatgctggctctgcgaagatttctggtatccaaagcctccgcgtttcgccttcaggatctgacactttctcatttggtaaccatagaggcgattgggcaggcctgggaggctgcaggcgccatcccatcggccaatgactgggcagaatggttgccgacgctggatatctggatatcggcggagcaaggcgagctgcatcacatccgagatctaatacctaactttgcttggcgcggtggtttggtcgggatgcggttccggctcgagccggaggacatggaagacctctatgtggactaccgcaagcagagagaacgggtagagatactgaagaccgagattcagagactggctgccgaaggcgaggatccaccacatttacctctttggcctcaaagcctgcacgactacctcaatcgacgtctgggaaagatgttcaaggtgcgctggtatcgcctggatcccgcccagcttcaagacccagatccgagaactcgctctgccaatcggcaatcactctcggcaacttcagtggcattggagcgcaatccactaatcaatctcatccgtgtacatgagatcaatgctcagcgtgggttcggtgacagtgctgacgagggacatgacgatggcaagcaatctggtggtagaaagctttcggaacagcttcgtgcctactacaaccgtcaccttgatccaggagatagcccagatatttcggatttaggtgcgctcagagctatcgaagcagcacaagtggctttcgatacccgattaagcaccagcttcgaaccggcgctgaaggaagtcgctgggttgggatatcccaacaacagcgatccgagtattcgggtcgcgaccagactcgcgcccaccgacgggatgaatcacgaagcagccgtcctgtttgagctcgactccataggtggcgcacctggcgctcctccccttcggctgccagagacgtccaacggtctgggatatcaaaatctcatttcgatgattttccggctcatggcgtttcgagatgagtggctgaaaaaattcagaactgctgacgagcagagcgccgctggagttgagcccattcacctgatgctaattgaggagccggaagctcaccttcatgtacaagttcaacaggtgttcgtgaagcatgcctaccatgtgctctgcagagaccctttgcttgagcgtttcccaaacttgaaaagccaactgatggtgagcacgcactccagccatgtcgctcatgaagttgagtatcagaacctgcggtacttccggcgtctacctgctggcatggacggcgtacaggtgccggtttcaacggtatcaaacctctccaccgtattcggtaaaaagccccaaaccaaagatttcgtcacacggtatcttcgggcacagcacgccgatttgttttttgccgatgccgtaatccttgttgaaggcgccgccgagcgcatgatgcttccgcactttcttcgaaagcattttcctttccttgaccagtgctacatcaccattttagacatcggtggcagccatgcacatcggctgctccccctgatcgacgcattagggatcgtaacgttggtcatcaccgacctggacgctggcagcctgagatctgctcaaccagtccagcgagatgcgggtcaacagacgaacaaccctacgctacgtcattggacaaaagcaggtggcctgccccacagcgtggacgcattgctcgctttggcggatgacctgaaaacccagcagatcgaccagcttttcgcgatcagaattgcttatcaaacgccgatcaatatccacctgccactgaccggtgaacaggtcgagatgctgccaaacaccttcgaagacagcttggtacttagcaatgcctcacatttttcagccaagcaggtaaggcgaggtttgatgcgtgcgtttgctcgggccctgaacggagcagagagctcgaacaaccttgccagtcttttatttgagtctcttcgagacggtgacaaagccgagttcgctctacaggttctaggcgatccaggctttgccgaactcactatccctgaatacatccgggagggactgacttggcttcagtccaagctggagcgcaagcagcgcgaactgttagtcgttcctacagccatcacggaggtgacggcgtga

SEQ ID NO: 75005 - DNA, 1866 bp, Pseudomonas syringae pv. tomato
atagttcaaagagcagagcctgatgcggccctcgatgccgatcaaatcattcagacctgcctgaaccttgatcgaccgaccagttttttcctgtatgccggcgcaggctcagggaagacgtattcactcgtagaagcagtacgcagcttcaaggaacgagaacgcgagagactcatttttgaaggccggcagattgcgatcatcacttacaccaatgcggcgtgtgacgagatcttacgtcgcctggagcatgaccctctagttatcgtttcgaccatccatgcttttgcttggcggatgatccaaggcttcaacgatgacatccgcgagtggctacgcgtcaagctgggcgaggatatagctgcactgcagagacagctggatcgttccagaggcgaaaacaagacaacccaaaccaacagagccagccgagccagaaaaatccgccggctcgaggaactcgaacaggtaactacatttacgtacagccctacaggcgaaaacaggggacgccaagcgctgaaccacagcgaagtcattcagatggccgcagcgttcatacagcagcagccgctgcgagatgtcatgaccgacctacacccggtactcctaatcgacgaaagccaagacacttatggcccgctgatggaagcgttcttgatcgttcaacaacagatccccgataggttctgcctaggactactgggcgacaccatgcagcggatctactccgacggcaaagcaaatctggaacgggctattccagaacactgggcgaaaccggagaaaaagatcaatcggcgatgcccgacgagggtgatcgatttgatcaacactatccgagccagcgctgacgatcattggcagatccctaaagagggagccgttgaaggcgcagtacgcatgttctgcacccgccaagtggctggccgaggctttgagctggaggaggaaatcgctcaccgcatggccgcatttactcaagacgcgcagtgggcagtgggtcagtcagggagaaagacactcattcttgagcacaagatggccggacgccgtatgggattcgagggagtctttacccccctccacgccgctgagcacctccgaaccggattgttagacggcagccttcctatcttgaaactcttcatggacgacgtgatgcccatttcggcgtcggcgcagcaggatagcttcagcctaatggaggccgtccggatgcgctcgcctctccttgagccgcgtcacatgaaggaagctcccgaccagcttgctttgatggaacaagtcagtaatgccacccaggagctcctcgctctattcgaggagaatgatcccctcatcgctgatgtggttcacgtgatcttgagcaccggccttttgaacgttcccgaccgcctgctggccgcgcaactgctcggagtcacagatgaagaaccgcccgaatcaatcgaccgagaaacgctcgaaatccacgcgtatcaggtggtgctgggacgccgtttctctgagatggctgccttcgccggttacacccagggcctgtcaccctttgacacccaccaaggcgtcaagggcttggagtttccaagggtcatggtgatattgaatgacgaggaggctgggggttttctattcagctacgaaaagcttctcggggtacaaccgccctcagcgaacgacctaaaaaatcagcgcgagggtaatgacgactcactggcacgcacccgccgattgctgtacgtaacatgcagtcgtgccgagcagagtctcgcaatcgtggtgtatacgcctcagcctgaagtggcaaagcaacgcgtgattgacgctggatggttgaaagctgacgagatcgagatcatctag

SEQ ID NO: 75006 - DNA, 2355 bp, Burkholderia thailandensis E254; identical to SEQ ID NO: 71708

SEQ ID NO: 75007 - DNA, 1920 bp, Burkholderia thailandensis E254; identical to SEQ ID NO: 71709

SEQ ID NO: 75008 - DNA, 2055 bp, Lactobacillus helveticus; identical to SEQ ID NO: 73866

SEQ ID NO: 75009 - DNA, 1767 bp, Lactobacillus helveticus
atggattataaaagagtatcatctcatgagaacataaatattaatcaaaatttcttggtatcagctggccccggctcagggaaaacagaattcttagtaaaccatattcatcacataattaaagagtctggaaaaataaacacattaagaaaggtattggcgattacttatacgaatgttgcagccgataatctttcaaggcgtattggatatacatctggtcttacgcaagtttcaacaatacacagctttctatcagaatttatacttttaccatactcatggttattagaaggcaaatattctttaccaaagaagctcacaattacccctcatcaattagcgagtttttctgattttaaagagctttgccaaaaatataaatgccagtatatgacatattatgacaatattcgggatcgtatttcttcaagtatatattttaagaagctgaatgatcattacagtcttactattgatcagaaagatacacgagttccaaataaaagatatcctattaaaaatgatcctaaattttttatggaatataaacaatcatgttggaaaaacggcatcatcaattacgatgatgttttgttgttatcattaatcattttagaaaacaatccatttgttgctaaactgatttctaatagtttcccatttatctttattgacgaatttcaagacacttcaataatccaagctgaaatcattagtattttagctgataatggaagcaaagtaggagttattggcgatgagaatcaatcaatttatggatttgcgcattcaagtctggaaacctttagaaaattcagtctaccgaaactaaacaaatattgcattaatataaatcaccggagcagcgacccgataattaaacttttaaatggaattacagaaaattctgggaaggatcctcaaattttacagaacataccaggtcctaagccaactatagtggttggagaccctagattagttgttaattggtttttaaaaaatcacccccaaaactcagcatgttccaagatgatcattagttacagtaacgactatattgaacaaataaaaccgaattacagtgccccttctaaaaaaattaaggataatatcaataagatgcgcactgatgatagaggaagattcatctatagtattataaaatcacttaagttagcttctgagggtcaaataaacgccagtatttcatctttcttccgttcttacgaaaaaacaaatgctgacgaaaaatatgtcatatcaaagttttattatgcttacaataaaattaataattacttgaatcgtgatattagtacatggttcaacgagattcttcttgataagaatattcatgaagcaaattctgataacatttcgaaaataatgaagaagattacaggaagaaataaatgctttttagggttgaaagtcaaatatttattgtctgatgttcccttagaaggtactaactccgaatttaggactattcatcaatccaagggtgatgaagcagatgcagtgctcattatgatagatgacagtggcaaaaaaagagaaagtaatttttcgtttttactaaaaccaagccttagtggaagtaatgaggatgacagggtttattatgttgcaatgagtcgcgcaagacatgaactgtttttttctattccgtcgttaaacaaaaatataagaaagcagattgaagccactggtttagttaaaattcaggatattcttgatatattaaattccgaagtctaa

SEQ ID NO: 75010 - DNA, 2055 bp, Lactobacillus helveticus; identical to SEQ ID NO: 73866

SEQ ID NO: 75011 - DNA, 1767 bp, Lactobacillus helveticus; identical to SEQ ID NO: 75009

SEQ ID NO: 75012 - DNA, 2397 bp, Pantoea ananatis
atgaaaattgaatatattgatatccagaactacagaaagcttaaaacttgcagaattcgtctgactgaggaagaaacactgctcgtcggggcaaataacagcggcaagacgtcagcaatggatgcgcttattttctttctggatcaaagaggaagaacggctgcgagcatcgcatcgggtaaatctccatcttcacgaaaattaggcgcagccgatttcaccctatcaaattggcatcagcttaatcaatttggtcaagcatgggtgaacgccgaagaggttggcgaaaaaatcagtgactggcagcccttatgcccaacgctggatgtctggttaaaagtcgagaaaaatgaagtccatcgggtacggcacctaataccaacattaaaatgggatggcggactgttaggcatccggatgatttatcaacccaaagatcttgatgccctaaaagcagactttattgcccacttcaaggccgctgagcagcttaaaatcacggcagaaaaaaacgccgaaaaagctctaggtggttcagcatctgagctcagtgatttcaaattttcagtctggccgggatcgttgcgtgaataccttgaaagagaggtgtctaaagcttttgagataaaatcttacatcctagatcccgcaaaacttatcacggaccaaggaagtaaattcctgccccaggttcttgtcgaggggcaaattccactggatttttatcctttcaatggactgttcaaagtcgatatcattgatgctacccgtggattttcagatccctatgtggcaaccggctctcagcatggtacctctaatctggctagccagattaaccagtactacaaccggcatttaaaccctaccgactttccttgtgacgaagatttggatgctctcgaagccatcgcctatgctcaacactcctttgatggaagactcaacaaggtgtttaacaaacccttgaaagagatagagacgctggggtatccggggttcaacgatccccatatcagattatcgagcagggttaatccgatcgataatttggaccacgaagcggccattctctttgagatccagaaaaccagccacgccgcaggggtgccgctgatgagtctgtcagagaaatataacgggcttggttacaagaatctgatatccatggtctttacaatgatgagcttcagggatcaatggatgcgcgtcggtaaagccagcctaagaaagccagaggaggatgcctttgttgagcctcttcacctcattcttattgaagagccggaagctcacctgcatgcccaggttcagcaggtgtttatcaaaaaagcttattcggtgctacgcaatcatgatgatttgcggacatccaagaggttctcgagccaactggtggtcagcacacattcaagctaccttgcgcatgaagtgggctttgaaaagctcaggtacttcaaacgtaaacccgctacaggtccgcatgacgtgccgactgcggacgttattgatctgtcctgtacttttggcagcggtaaaatccgctcggatgatgtcttacaaacggctcagttcgtggctcgctatctcaaaaccacacactgcgatctcttttttgcgaacgggattattctagtcgagggggcggcagaacgtatcctgatgccgcattttatccgtaataatcccaacgctaatacaagcctggacaacagctacatttcgattctggaggtaggaggagcccatgctcaccggctgagggcattgattgacatactcgggattcccacccttgtcgttactgatacggatgcccaaaagcctcccctcaaactaccggcagatgatcaaaaagttagctcaggaaataaacccaaagccatcaggcctgaatttggcaagggatacattacaggcagccataccatcaaaatttggctcgatgttgagggagggctggatacggtccttagaatgccggagcatgagaaaattcgtggtaaggtcaggattgcatttcaatatggtattcccattaaatttggaaaagaggaggaggccgaggctttcccgtacacatttgaagacgctattgcattgacgaatcctgagttgttcaaaaaagtagaaaaacctactgggatgatgaaaaaaatgcaggatgctcttaacctcgatacgcttgaacagtgctgtgaaaaactctatttggcactcaaagatgacaaagcggagatggcactcgatttattgtactgtgctgaccccgccgaactcgccgcgcctaaatatattcaagaggggctggactggcttaaaaaagagctggaagtggcgagtagagaccttacgccggaagttccggaagtcactgacgtttgggagggggaataa

SEQ ID NO: 75013 - DNA, 1869 bp, Pantoea ananatis
atggagacaccatccacgaacgaacctgtggtagaagagcttttcagttatcttgatctggagaatcccagaagttttctgctttttgccggtgcgggatctggaaaaacccgtacgttggtcagtgtgctggagaaaatgaaacaaaggtattcttcggaactgtctagatgcggaaaaaaaataggcattattacttttacaaatgcagcctgcgaggaagtacaaagacggttattttttgatgccaatttcatggtttcaaccatacacagtttttgctgggacttgatcaacccatttacatcagacataaagctatggcttaaaaatgaactcgagaagagtattgatcaactcacccgcgacattgaaaaaagcagaaaacctgatggtattacggcgcaaagaaacaggcggagtttagccagcaaaacgaaacggctgcaatacctcgataaaattcaaaaattcagctattcccctacaagcaacaggcctgaaaaaggggcgttaaatcatagtgaagtgataaatgtcaccgcttatctcctccaaaatgaagctctgctcagagagattttatttagcagattcccagtacttttgattgatgaaagccaagacacgaataaatatcttatcgaatcgttaattatgacgcagcaggagcatcccaccaaattctgcattgggttgttcggcgatatgatgcagcagatattcagcgggggaaaatccgacttagcctctcctctaccccctggatgggcgtcaccagagataacaattaatcaccgttcaccagtgagaattgtcactttgatcaactccatcaggcaattcaatgatacacatattcaggagccgcgccctgacgcccagcctggaaccgcacgcttgtttgtggttgacatgaacacccacaaggaaagagccgatattgagcgtcaggtcgctgaatatatggctgaacaggcggctgatactgaatggaataacaaaaaatcagtcatggtactgacgcttgagcaccatatggctgccagacgcggtgagttcgaaaacttctttctgccccttctagaggttgaaaaattgggtgatgcagcaatcaatggggatagtcaagagataacattcttatcctcacagctatggccacttattgacgcaattcgcagtgatgatgattttaaaattgctactatcatgcgtaagtactcgcctgttttttcgagttcgcgcctcgaatatgctgacgatccactattgctcttccgggaagcacaatgccaaatagacaagataaaagtgcttcttggcgagaacttggctttccccattctagaagtgtgcaaactgattcatgaaggggaattgctgatcctacctgaggctttcctgcttcacctggcgctggtgccacataaggatgatgaatccacggaggaagtggacatcaacaaagagcatgaagcctggagccgatctctgagcgcatccacccgtgaactggaaaattacattagctatatttcatccacatcttcctacgacactcatcagggagtgaagggactgcagtttcctcgagtcatggctattctggatgatgaagaggcccgtggattcatgttcagttacgataagctactgggcgtcacaccgcactctaaaacggatcaggaaaacgaaagtgcggggggggactcttcgcctaaaagatcgcgccgccttttttatgttatctgcagcagggcacaggagagcctcgctgtcgtcgcgtatactaaagcgcccgatttagttgaacggaccgtaattgcgtcaggttggttcgtaaaggaagaaattatgcatatgtga

SEQ ID NO: 75014 - DNA, 2184 bp, Listeriaceae bacterium FSL A5-0209
atgtatttatcaaatttaaaaataaaaaactttagaaattacaaatcaggaaatttcaattttaaaaagggaacaaatactattattggtgaaaacgatgcaggtaagtctaatgctttaacagccttaagaattttattagatgatagttattattatggtagtaaaaacctaaaagaaagtgatttttcgtattacttgggagaaaattggcgtggtgaatggataataatctccgcaacatttggcggtataacagaagaagatatggataatgagatatgttcaactttatcaatagctgagatagaaaaaattgatgagacagagaatatcggtgaagtaagtagactattgacaaaagatattgatggcataggtagtttaacattatttattagacccaataagagtatcagaaaaaaattacatgataataaaggtacagcagagttcgaaaaaattcggggaaatataaggctagtcgattatgaattttattatacatcaaaatctgatttcgattttttatcagacgaccattattatagcctagttggaaatttaaatgaatcgctagctatggatccttctgatgatgacagtgctatattaggtacaaaaattgatatgattgatatttatcaacatatttcagttgtctatattgatgcactacgagatgttttaagagagatgaaaacatcaaaaaaccccatccgtagaattatagaagctattgagtcaagtattgaagtgaatcgtatagaagatgttaaaggaaaaattaaagccttaaatgatgaaattattagtatacctcagattaatgatattggaaacattttgaattctgaactgaaagatattcttggtagcgtttattcgcctgatttaagcttgtcttcaaatatgtcagatgaaataagttcactttcaaaatttctttcaatgagatcaaaagatgacgatgaattagaattattagggctaggtcatctaaatatgatttatctagcattaaaaattgtagagttcgagagctgtagatctcgtgaattgttaaatattatgttgatcgaagaaccagaagctcatattcatagacatatacaaaaaactttatttgaggggctaagtgttaaagaaggctatactcaacttattatgacaacgcattctgttcatcttgcagagtcgtctgaaatatctagaatgaacataataaaatcatatgacaaagaatctattgtgatgagtccatcaagtggactagatttatttgctagtgaaaagttggagaagaatatgaatcttgaaaagaatatagaacggtatttagatgtgaaaagaaatgggttacttttctcaaaaggggtagtcctagtagagggggatgccgaagaaatcttaatacctaatcttgtgaaaaaagcttttggaatttctcttgatgaaattggaattggattgataaatattgggggtacagcatttgaatacatagctagtttgtttgatgcggagcgagttatgagatattgtgctattattactgatttagatcagaaggccattccagaagagagtcccttgtacaaaaaaagggctgaggaaataggagcaaagcgaaaaagaaaattaaatagattgttcgaggaaaacaattgggtggatatgttttatgctgatacaacttttgaacttgaatttttggaggataatgaaaaatatattattccaatcatagaagggaatttttcaaaaacgactactgttcaggaatatcttaatgcattagacggagatgatataaaaaatcgcaatttagcaatgctaaaattagctaataagcttggaaaaggctggtttgcgattgaaatcagtaatactattgatgaatcagtgagcattcccaattatattctagatgctttagcttttgcatcacaagaatcgatgtctatagcaatttatataaaactaataaaacatgaggcactatacatcggtaaagaggatgagtttattaaagatatagaagttgcacaaaataatgaagatgcattgaaaaatatagttaaaaaatatctagaaaaatatgattatgaggcgtcttattttataaatgcttgtgaagactacttaactttattagatgaaggagtgtcatgtgatggatga

SEQ ID NO: 75015 - DNA, 1815 bp, Listeriaceae bacterium FSL A5-0209
gtgatggatgatgctacagaattcctgcacgatctaaatgaagaacaaaaaaaaattgtcgaaagtttagataacctatatattacagcctgcccaggaagtggaaaaacaagagtactaacacgaaaaatcgcctatcaaagtgtagtaaataaaaattctactaaaaaaatagttgctattacttatactaatcgtgcagcggaggagatcaaagataggctagactttctaggaattgattctccaagtgtttgggtaggaacaattcatcagttttgtttggaatttattatttatccatttggaatgaatctttcgagattatcaaagggttttaatattgtagatggatatactcaaagtgaatatgtggaagaaattttatcaaagcttaatattgaaataaaaggtcacgaaaaaaacaatatcaatttatcgttaaccacagaagggggtatattagaaaaacggttcccaaaagtaacttcaatgtatcatcaaaaattattggataataaagaaattgattttgacttaatattattgatggcgcatcaaattttaaaagagtcaaaaataacttgtaaaaatattgcacgagtactaagaacaatttatgtggatgagtttcaagatacaagagatatacaatataatattattggtctattaacatttgctaacaaatctattcaagctctttttgttggagatgtagatcaggctatttatggagcgcttaatggggttgtaaagacagttgatgaacttgctgaactaacaggtcttccctttaaggttgaaaaattatctggttgttatcgttccacacaaagaatggttgatttttattctgaattccaacaaaactcttataagataagtagtcgtggagaaaacagaaaatatatcggtaaaatttctcatataacggatgttcataaagatgatgtatcaaaaaaaattgctgatattattttatatcatttgaatcaaggtgttccagagaatgaaatatgtattgtcgcaccgcagcattatatacttttttctataggtgataaattaaaggaattattaccagactctaaatttgatgctttaacagtatccccaattaaggtgaatgatcatagtatgttttttaaattatctaggttgtatttcacggactctggaaataaaaatagactacgaaaaagaattagttcagagattttaaaaatattaataaacgaatttaatgtcaatttgccagaggactttatctcaactgatttattgaaagaaattaatgctagtaaaagactatgtcaaactaataatggtctagaatattttaaagaaacaactgtatccttattttgcaaacttaacataacttcaccactttatccagaaatttttgcagcatttgagagctttattaaagaaacaaaagagcgaatggaaagaaataaactagcatcagatatagaaaacttcagaaaagtatattattctagaagcggaattactttaacaactgcacataaagttaagggagaagaatataatacaatgatagctattaatattttagatggtaaaattccacattggaatgaaatttttggttctcctgacaaagggttaggttcagcaacaaagttattatatgtaatttgttccagagcgaaggagaatttatatctgatttcagaaaggggatataaaacgaataagggtatcgagtatgaaccaacatttttaatgaagaaatatcaattttcatatgacatattatctcattcgtcaaaagttattgagtag

SEQ ID NO: 75016 - DNA, 2172 bp, Listeria booriae
atgtatttatcaaatttaaaaataaaaaactttagaaattataagtctggaaatttcaattttaaaaagggaacaaacactatcattggtgaaaatgatgcaggtaaatcaaatgctataacagccttaagagttttattagatgatagttattattatggtagtaaaaacttaaaggaaagtgatttttcgaattgtttgggagagaattggcgtggtgaatggataataatctccgcaacatttggtggtataacggaagaagatatggataatgaggtatgttcaactttatcaatagctgagatagaagaaattgatgaggcagagaatatcggtgaagtaagtagactattgacgaatgatattgatggcgtaggtagtttaacattatttattagaccaaataagagtatcagaaaaaaattatatgatagtaaagataccatagagtttgaaaaaatacggggaaatataaggttagtagattatgaattctattatacatcaaaatctgattttgattttttatcagacgacaattattatagcttagttggaaatttaaatgaatcgctagctatgaatccttctgatgacaacagtgctaaattaggcataaaaattgatatgattgatgtttaccaacatatttcagttgtctatattgatgctctacgagatgttttaagagaaatgaaaacatcaaaaaaccccatccgtagaattatagaagctattgagtcaaatattgaagcgaatcatatagaaggcgttaaaagaaaaattaaagccttgaatgatgaaattattgctatacctcagattaatgatattggaaacagtttgaattctgagctgaaagatattcttggcagtgtttattcgcctgatttaagtttgtcttcaaatatgtcagatgaaataagttcactttcaaaatttctttcaatgagatcaaaagatgatgatgaattagaattgctagggttaggccatctaaatatgatttatctggcattaaaaattgtggagttcgagagctgtagatctcgtgaattgttaaatattatgctgattgaagaaccagaagcacatattcataggcatatacaaaaaactttatttgatgggctaagtgttaaagaaggctatactcaacttattatgacaactcattctgttcaccttgcagagtcatctgaaatatctagaatgaacataataaaatcatttaacaaggaatctattgtgatgagtccatcaagtggactagatttatttgctagtgagaaattgcagaagaacatgaaacttgcaaagaatatagaaaggtatttagatgtgaagagaaatgggctacttttctcgaaaggggtagttctcgtagagggtgacgctgaagaaatcttaatacccaatcttgtaaaaaaagtttttggaatttctcttgatgaaattggaattggattgataaatattgggagtacagcatttgaatacatagctagtttgtttgacgctgagcgggttatgagatattgtgctattattactgatttagatcagcaggcaataccgaaggggagttacttgtacaaagaaacagccgaaaaaagtggaacagatcgtaaagaaaaattaaataggttgttcgaggataacaattgggtggatatgttttatgctgacacaacttttgaacttgaatttttggatgataatgaaaaatatattacaccaatcatagaagggaatttttcaaataagactactattcagaaatatcttaatgcattagacggagatgatatagaaaaccgcaatttagcaatgctaaaattagctaataagcttggaaaaggatggtttgcaattgaaatcagtaatactattgatgaattagttagcattccaaattatattctagatgcgttagcttttgcatcgcaagaatcgatgtcgatagcaacttatataaaattaataaaacatgaggcactatatatcggtaaagaagatgagtttattaaagacatagaagttgcacaaaataacgaagatgcattaagaattatagttgaaaaatatctagaaaaatatgattatgaggtgacttattttataaatgcttgtgaaggctatttaactttattaggcgaaggagtgtaa

SEQ ID NO: 75017 - DNA, 1791 bp, Listeria booriae
atggatgatgctatagaattcctacatgatttaaataaagagcagaaaaaaattgtcagaagtttagataacctatatattacagcttgcccaggaagtggaaaaacaagagtattaacacggaagattgcctatcaaagtgtagtaaataaaaactctactaaaaaaatagttgctattacttatactaatcgtgcagcggaggaaatcaaagataggttagactttctagggattgattctccaagtgtttgggtaggaacaattcatcagttttgtttggaatttgttatctatccatttggaatgaatcttacaagattatcaaggggttttaatattgtagatagttatacacagaatgaatatgtagaagaaattttatcacaacttaacattgaaatacaaggttatgaaaaaaataatatcaatttatcgctaacaacagaatggggtgtattagaaaaacggttccctgaagtcacttcaatgtatcaccaaaaattattagataataaagaaattgattttgacttaatattattaacagcatatcaaattttaaaagagtcaaaaataacttgtagaaatattgcacgagtattaagaacaatttatatagatgaatttcaagatacaagagatgtacaatataacattattggtctattaacatctgctaaccaatctattcaaaccctttttgttggagatgtagatcaggctatttatggagggcttagcggggttgtaaagactgtcgatgaacttgctgaaataacaggtctttcttttaaagttgagaaattatctggttgctatcgttctacacaaagaatggttgatttttattctgaattccaacaaagctcttataaaataaatagtcgtggtgaaaatagaaaatatatcggtaaaatttctcatataaaggatattcataaggatgatgtatcaaaaaaaatagctgatattatttcatatcatttgaatcaaggtgttccagagaatgaaatatgtattgttgcaccacagcactatatacttttttctataggtgataaattaaaggagttattaccagactctaaatttgatgctataacgatatcaccgattaaggtgaatgatcatagtatattttttaaattatctaggctgtatttcacagactctggaaataaaaatatactacgaaaaagaataggttcagagattttaaaaatattaataaacgaatttaacatcaatttgcaagaagaccttattccaactgatttattaaaagaaattaattccagtaagaggctatgtcaaactagcaatggtctcgaatattttaaagaaaccacattatccttattttgcaagcttgatataactttaacactttatccaaaaatttttgtggcatttgagagatttattaatgaaacaaaggaacgaatggaaagaaataatctgtcatacgatatagaaaacttcagaaaagtatattatgatagaaatggaataaccttaacaactgcacataaagttaaaggcgaagaatataatacaatgatagctattaatattttagatggtaaaattccacattggagtgaaatttatgacacacctgacaaaggggaaggttctgcaacaaagttactatatgtaatttgctccagagcaaaggaaaatttatatctgatttcagaaagaggatataaaacgaatacgggttatgaatataaaccaacatttttaataaagagatatcaattcccatatgacaggttatcctaa

SEQ ID NO: 75018 - DNA, 2097 bp, Flavobacterium psychrophilum; identical to SEQ ID NO: 71912

SEQ ID NO: 75019 - DNA, 1902 bp, Flavobacterium psychrophilum; identical to SEQ ID NO: 71913

SEQ ID NO: 75020 - DNA, 1812 bp, Porphyromonas sp. COT-239 OH1446
atgtatataaagcaatttaaaataaaaaaatttagagtatttgatgaagtttccttactctttaataaaggcattaacatcattattggagaaaacaattccggaaaaacagctatcattgatgctcttaggatctgtcttggctatggaaaaccagatgtaaatatctatattcaagaatccgatcttcatctcaacccttctgaccctaacaaatgcaacacagagatacaatttgaccttatttttgagatcgagtcagaaattgagagatgctgtttttatgactttatttcacaagattttgaaaatccagagttccaaaccatccaatttcatcttaaatactcattagaagaaaatgggagaaggcgtttttttaaaagaagcgtatggggtggcgataatgaaggacaacaaattccttatgaagcattacaggagatattttacacttatttagggcctcttcgtgatgcagtaagtggcttaaaacctcattcatataacaataagacagctcagttatttaataaattgacgaaatacagaaaaggagatgacactataaatctaagtgatgaaataaaaaagtctttagcagaaaagctttacagtgtttttgaaagtgatgaatatgactggaaacacatattgtgtgagggaaaaagtaaggtcaacgatcatcttaacggaacaggcatccttgataaatctcctcaaatagagatgaattatgttggaagaaaattttctgatgttgtgcgaggaatagaaattagaagacctatatacacagaaccagtagagcctcgtcttcaaaaatattttgagatatatcaaaatggattaggtgaaaataatctaatcttttcctccgttgttcttggtgatctaatgaaccggtgtgaagattctgaattagaaatttacaatgctctactcttggaagaaccggaagctcatcttcatccacaatatcaaaatacattttttgagtatttgagcacactcacaaatagagggttgcagatattcattacatcacattctccaacaattaccgcgaaatcagacatagacaatgtaaaagtactacagagacagggaagctatgtcaaagcattttgctttaacattcttagtgaagcagattatacaaatagtaatagaaaatatttgaggaaatttctggataccaccaaatctcaaatgttctttgctaatggaactatattggttgaaggcattgcagaagcaatcttattaccaatattatcacgcaaatttctaaaacctcgtaagattgatttggaaaagaatggagttgaaattgtaaatattggaggcgtagcatttgaacatttcgcaaagttgtataatcatgatgatgaaaacaaacgactcttttcgaaatgtgctattataacagactctgatccaactgcagataaagcaatgtcggacagagctgttatagctcaaggcttaaagaaaaaccatttagaagttacattagctacgaacacttttgaacatgatttatttgagacttcagatataaacagaagcataatgcgcactgtttataggagcatgcatccagacacacaagatctacaaggagattttaatgtagaagttctgatgcaaaaattaaaatcgaataaagataaagctgaatttgcgctacagttgaatgacagattgatgagagaagatagctttgatgttcctccttacataaaagcagctatagagtttgtagttccaacacgagaaatctcccaagaaatggcaatagaggtataa

SEQ ID NO: 75021 - DNA, 1761 bp, Porphyromonas sp. COT-239 OH1446
atgtttgaaaggttatcacccactcaaagagaaattgtagattgtccggatcgcagaatcgtagttaaagcttgtccaggaagtgggaagacgttctctgtaacagcacgtcttgcaaggttattatgcaataatcaattaaataagcatcaaggcattgctgcaatttctttcacacatactgcatgcgatgaaataaaaaacggaatacagaaattcggagtttcaaatgtcacttatccccatttcattggaactatagatagttttatcaacaactatattttctttccatatggtcatttatttatggggtgcaataagagaccagaggttataggtaccgaatacaacccttggtttaattacgatgcaacgataagaaattatgataggacaaaaataattgaccccaactattattttgacaaagtttcctttggtttaagtgacaatctccttcggctagcaccttaccatgtatttaattttagaaaatcagattgggataatccatataaaaaagacgggaatctaaaaaaggtaatatcagatctgattgaaatgaaagtaattcattttagatcggggaaagcaaatcaagcagacgccaactatatagcgtacaaaattctaacgaaatatcctgttatagcaaaaaacattgcacaaaaatttccgatactgattgttgatgaagctcaagatacaactgccattcaaatggtattgattgatatattagacagagccaatgtcaattcaattcttttggtgggagatcccgatcaggccatatttgaatggaatacggccgaaccgtcattatttatggcaaaatatgatagccctgcttggacatctttagaactgactgaaaaccgacgaagctcaagcaatatttgtcgagtgaataatcggttcttcaacagtaatatggtatctgtatctgaagaagatattgactatccagctataccttccatagtcggtcattcaacccaatcagactctataaatcagataaaaaatgattttgtaaatgaatgtcagaaattaggcattagtgaagatcattatgctattacatataggggaagaaaatttggagaaatacattttgggttaatggatgaatccagaactgatcagaatgagaaaccatgggttcatggatattattatgtgagagatttggttcatggaaaatatctcataaacaaaggtgcacacaaaaaaggattctccttaatagaacgtggataccacaaaatgcaagaaggtcaatcctacatacctattgagtttataaggaataagattaaaaacttaggattcagaaattatcgagatataatattccagtttatacgcaaattgcctgatacgaattgtacattatctcaatggattgcgcaggcaagaaataacggcttaaatttttctataaatacaaataaaggggatagtaatatatcaaatctttttcatgaggacggtattactacaacagacatccccaaatatttgagaacaattcattctgtcaaagggatgacattagaaggaatgttggtttttcttgtgaagaaagatgtatttaattatgcaacccttttacctcaagcatataatgcaacaccagaaggactggaacagatgagaattgtatatgtcgcttgtacacgccccaagaagttattatggatagcagttcctgctgaggatgtcggcgtttggactaagaaacttttagagtaa

SEQ ID NO: 75022 - DNA, 2187 bp, Porphyromonas sp. COT-290 OH860
atgaagatacaatcagttcatattagaaattttcgcaaactaaagaattgccatatagacttcggtgaaaaagaaacggtattcgtcggagctaataatagtggaaagacttctgctataagtgcaattgtttggtttctaaacaacaacgaaaagttcactctcagggaatttactgctaccaactgggtaaagatcaataatcttggagatcaatggttgactaaagactcagtagatgctgaattgctagacgcacataaatgggacaatattgttccatcaatggatatttggattaacgttgaagatggagaggaatacaaggtgtaccacttaatcccatcgcttaacacatggaatggaaggaaagttggtgttcgaggtcaatatgttcccaaagacgttgagatgctatatattgcctacagagatgctaaaaagaaagctcaagaattacaatctaccgaagaatggaagaaagcatcttcgccagaattgttcccaaagaatcttagtgagttcttaggcaaagggtcaaacctaagagactattttgatgtaaaatactatattattgattcagaaatagaaccaaaagatgatcatgaggttcagcctactccagataatgcacttgataaaaatccattggaaggactaataagggtggatgccattttggcttcaagagatttctcagatccaaatggtcattcggatagcgagatcgacactttatcaagacaatttcaaaggtattattcaaattcaaatccagaagaagaaattttactaccaggtgatttagagcttgtcagcggaattgcaaaagcaaatgaaacttacaatgcgaaattaaccaagacctttgaaacaccagttgcagaattgaggaatatcaactatccagggtttcagaaccccgaaattaagatatgcagtaggattcagatagaggaggcgattaagcatgactctgcggtgcagtttgcgctccaaggattgggtgaattagccttgcctgagaaatataatggattaggttaccgaaatctgatttccatttatttgaaattgatggatttcagagagaagtggttaaagacatcaagtgagaggaagaatatagaacctatccacttggtgtttgtggaagaacctgaagcacatcttcatgcacaagcacagcaagtatttgtaaagaaagcgtttgaagctctatgtaataacaaaattatcaaggacgagccatggcttaatactcagctagtactaagcacgcactctaatcatattgttaacgaacttgatttgagttgtatgcgttactttagacgagtgatggataatgcaggagataagatacctatttcagatgttataaatttgtcaaacacctttggctctagtgacgaaactaagcggtttgtaacaagatatatccgcttaacacattgtgatatgttttttgctgatgcagtgatattggttgaaggacctgcagaaaaaatccttgtcccaagtttccttgctaaagctggacttgattcgttttatatttctgtcgttgaagtaaatggtcgtcatgctcatagttttcgtagtttgataaacaaaataggaattcctactttgatagtgaccgatatagatgctacagaagttgttgaagaaaatgggaaagtaaagcataaagctgtaattacgacccgaggaaaaggatataagacaggcaatccatcaatacggagctggttaccagataagggcctgatcgatgaccttatcacacttgaagggaatagtaagactatagataatgtcagaatcgcctttcagactccaatcaaaataaattggactaaagaaaaggacgaatacacagaaatatgcccctatacgtttgaagacgctttgatcttttccaacttagaactgttcaggcaagatggactaaagaagatgggtactattactacgatcgccaacttgttacagcaaaatcattctgctgaggatttacagaagtcaatctttgataaactggaaagtaaaggaggcttccaaaaagcagattttgcaaactccctcttatataaagaggatttctgtgaaatgaatgctccggcctatattcaagaaggtttggaatggttgaaaaaatgtttggactcaaaagagtag

SEQ ID NO: 75023 - DNA, 1845 bp, Porphyromonas sp. COT-290 OH860
attatgtcaaataataatattgattcacatgtcgacgataccctagagaaatgtgttctagcaacacctcgcaagagtttttttctctttgctggtgctggttctgggaagacgtactctttggtacttctattaaagaaaatacgtgacagaattggtgcagatttgttgttacaaggtaagaatgtggctgtaattacgtttacgaatgcagctacagatgagattataaatcgtttggggcatagctcggtttttcatatatccactatacatagttttgtgtgggatgttatcaagtggtatccaaaagacataagagaactatattgtcagtatattgagaaagatatacaagagctgagcagaaaaattgaggcagcaaagaataagaatacaaaaacatattccactaatgttgctaagtgtgaatatctaaaggaaaagctggaaaaatcacgtacgatagaaaagtttgtctataatcccaatggtagtaatctagagtataatgcgcttaagcatgcagaggtcataaaaatctcggcacaaatgattttgaatagtaggatgttgcaacaaatcatcgcacaacgatacccaattttgctgatagatgagagccaagatacaaagaaagaacttgtggatgctttttttgaaattcaaaagaatttcggtgatgtgtttacgcttggacttcttggagaccaaaaacaacgaatctatactgatgggaaagataatatggtgagtattattcccccagagtgggagcaaccagtcaaaaagatgaactatcgttgtgctaagcgaattgtaaagctggcgaacacaatcggcaaagacatagacactcatgcagaacagacttcacgtgaaaatgctattgaaggattcactcgactatttgttgttcaacaatgcgatggaataaataagaataaggttgaacaaacggttatgaaatcaatgtgtaaccttactaaagatgcaaaatggtttgagtcaaatgctgatgtcaaaatactgaccttggaacacatgatggcagcaaagcgattgggttttgagcagttttttggaccattagccaaagtgaccaagtaccagatgactttgctgcagggtactgtgtcagaattggaattcttcacaaaaatggtgctacctattgcggactcgatcaaaacggatggtcggattgccttagatatattgaaggcttattcaccattattaagcaagcaaaatatagagaatccatacaaactctacttacgttgtagagaagaagctggtaaagtctctaataaagtcaatgatgatcaatctatccgtgaggttgctaaagccgtctggaactctcaattactaacagttcctgaggttataagacaagccagtgagctcacacctgatgatattaatgatgaactggaagaggagttgcaggcatgggctaaggttatgaatttaccaataagtatggttaggagatatgatgattatgtgaatcaacgtacatgctttgatacacatcaaggtgtgaaaggtctggagtttgatagagttatggttattattgatgattctgaagcaaaaggcttcatgtttagctatgataagttattcggtgtaaaagaattaaccagaacagatatggagcatattgaagcgggggaagagtcatcggttaacaggacacaacgcctgttttatgtaacatgtacacgtgcaaaagaatcacttgcaattgttatgtatacaaatgatcctaataaagttaaaaatcaagtcataagcaaagattggttcacagagcaagaaatagagttgctttag

SEQ ID NO: 75024 - DNA, 2190 bp, Staphylococcus aureus subsp. aureus; identical to SEQ ID NO: 71904

SEQ ID NO: 75025 - DNA, 1794 bp, Staphylococcus aureus subsp. aureus; identical to SEQ ID NO: 71697

SEQ ID NO: 75026 - DNA, 1749 bp, Alcaligenes faecalis
atgcatttagcacagttgacgatttcgaacttcagaaagctacaaaaagcagttctggagttccaacccggcctaaacgtcttggttggtgcaaataacgttggaaagaccgctgtcgtcgacgctctccgcgcactactagcgggacatgacgaaccctatccccgcctcgacgttgacgacgtccaccggcctcatggagggacaccggcgggagacatcacttttcagtacgtgtttcgtgatcttgacgaagacgatgaggctgactttctcccagcgctaaaaatcgacgccgcaggcaaggccgaggcacacatctccattcggtacgcggaggccgataaggtcggtcggctacgcgccaaacgctggtgtggggatcatgaagatgtgggtctgaccacagacatgatggaaaatctgcgcggggtgtacttaccgccgctgcgcgatgcatcccaaggtctgaaacccagtcgcagcagccaactcgcccgactgttccatctgctatccgacgacaccggacgcaacgacatcaacgaagcactgaagaagctcgatgaagagctgaaaaagcatacgccgataatcaacacccatactgcaatcaagggtcgacacgacaccatgctcggcccccaacttgcccaacttctggagttggggttgagcggaagcgatttccaacgattggcttctcgtctatcactgttggttgatgccttcgaaatcgaacaaaacggccttggcttcaacaatctgattttcatggcggttgtgctgagcgaactggcaaagaacccggaatcaagctatcgaggcctcatcgtcgaggagcccgaagcccatttacatcctcaacttcaagccgtcctgctgagctatttggagacgctgaaggccacccatggcgagaagccggttcagctcttcgttacgagtcattcgcctaatttcgcgagcatcgctaatatcagcagcctgacctgcctagtggacaccggtgaagcagttgaaactttcttcccccgcgacatagcttttgagaaaggaaagcgagaaaaactggagcgctaccttgacgtgacacgcgcggagattttctttgcccgtagagtcatttttgttgaaggcgccgccgaactgatgttggtcagcgtactggccgaaaaatccggatacaaactgcgcgagcatggcgtcagcttgattagcgttgagggcctgaacttcgattccttccttccgctgtttggtgaacaggcattgaagatccccgtttccgttatcaccgatgcagaccctatggatacgcccgctgacggagacgagccgcaagccctatatccgagcctcggcgccgttgtcaacgtatccgacaacacggccaaaatgaaggcaaacgaagatgccctcgtgaaggttttccatggcgtgaagaccttggagtacgacctggcgctgcatgaagccaatcgctctgccatgctgaaggcgctcaaggagcttcatccacagatcggaaagaccgttgaggcttccgtcaatgcggcaagcggcgatgccgaaaaggcgcgtattttgttcagcggcatgtttgaacgcaagcagaacaatgtccagaaaggccgattcggccaagctctggcgcaagtgttggccgacggcgagaagtgtgtcgtacccgaatacatacagaatgccatcaagcatgcttgccaaaaggcacccacacacccatga

SEQ ID NO: 75027 - DNA, 1740 bp, Alcaligenes faecalis
atgacaaaaccttcccttgagcagtcggcgatcatcaacgcaccattagccccaatgtcggttatcgcgtgcgctggaagcggaaagacacataccgctgtacgtcggctggcggagatgcgccggctgcttggtagccatcgtggccgagtggcgctactgtccttctccaatatcgctgtggacacgttccgacagagctatcagtccttggccctggaagtgtcggtcggtcccggcggccaccgcgttgacattgatacgctggacggtttcatcacacgccatgtgcttcatcctcatgcctaccggaccatgcaggcaacacaggcggcctttcttgccaccggaggcgagtcgttcctgagcggtttcactttcaagccaggaaactaccctgtcggcatcacatccatgcaggtcgggtggcgtaactcaggcatctacttctactacgtgaataacgaccaagtggtggaactgaaccacgattacgcctctgcgatcgtccatcggctggggaaggcgggtgcctatacgcacaatcttggtcgttactggtgttatcgcacactcaaggaacagccggtgattcttcgcgccttggcgagccggtatccgcatatcctgattgacgaggcgcaagacattggcacgctccatcaggccattcttgaacaattaatcaatgcaggcgtgcaggtatcgctcatcggcgaccccaatcaaggcatctacgagtttgcaggagccaatggaaggtttttgtcgcaatacggggcgcgtactggcgtcactgagttgaaattgacccgcaactatcggtccgtaccgccgattctcaaactggcgaataagctgtcagcccgtagcgatgatccagatcgcatcgccccggaaactgaacatggcgcgttcttcatctcctataagacggctgaacgcgacaacctggtacacgcattccaagccgccgtcatcgcggcggggctgatggccgaacgttccgccgtgctttgtcgtggccgtgaccttgccaataagttggccggtaacgattctcccgtaggacagggaactgtgaaaggctttgtccaagccaccatcgcccgtgacaagaagcaggactacgtcgaggctttcaagggcgttgccgtttgcattgctggccttctcgtcgatttgcccaaggggtgggtggccaccgtcacacagcccgcgcgctatcccgaggcccaacctctgcgtcgtctcatttggcgcttcacgcgaaaccaggacgcgggactaccttctgcttccttgctggcggacacagaatggcatccactgttgctcaccaggataaaggcattgctgactacgttggagaaggaccacggcttgaagcctgttaacaacataggcatgaaactcgccaagacgaaattgcccaatgcacctcttgccgctgccgcagacctggcggcatccaatgacgccagaattcgtgtggatacagttcaccaggtgaaaggcgaaagcttggacgctgttctctacatagcaaccaaagaacatgtcacggccatgctggatggagtgacctcagaggtaggacgcataggatacgtcgcggtgacgcgcgccagggacctcttgtggctgggcgttccagccaattcgctatctgaattacgacctaaattagttgcgagcggtttccaagagattggcaagctccctgttctcaccacctaa

SEQ ID NO: 75028 - DNA, 1905 bp, Morganella morganii
atgaagcttgaaataattaggctatcaggatttcaatcttttggtcaggagccaacagaattgaatttggaagacattacttatttgattggtccaaatggatcaggaaaaactgcggtgcttcaggcattatgccgtctttttgcgtttgatcctggattacgtagagttcaacgttcagacttctatattccatttgatgaggaagaaactcctcgtgaacgccagttatggatagaagctgactttatatttcccgaacttgcaagagatgaggataatagtactgtagcgcctcattttggtcatatgcgattagatgagctagacggtgtaccacgtgtacgttttcgtctctcggcaacaatgggattggatggagatatcgatgaaagcttagtttatgttctggatataaatgaagatggctctcctgataatacatctaaggttccacgggcagaacgtaataacatccaagttcactatttacccgctcgacgagatccagctgatcatattacttatggtacaaacgctttactagggcgtttacttcgtgccgtacgctgggatgctgaacgtaatacaattaaggaattaaccgatcaaatcagcggtagccttgcagcaaactcttccgtaaatgcatttagtgaaactttaaaaacgacttgggcttcgttacataaaggaacatttttcgctgatccaaaagtaacatttgttgcatcggaaattgaggctttattgcggcatttatcgatttctttcactcctagtcacgatgggtcacttgttgacttctcacggttgagcgatggacaaaagtcaatgctttatctttctcttgtattatcgtctcaagcaatcggcagagctgtacttgcggaagatgatatatcttttgatcctgataaattacgtccccctgtctttacattgatagctcttgaggagccagaaaatagtctctcccctcactatttaggtcgtattgtaagtgttttgaatgagatgacaaaaaatgaagatgctcaagcacttatagctacgcatgctcctactatgttgcgtcgagtttctcctgagttaatacgttatttacggctaacggaatcacgcaaaacacggatcacttgcatcgagttaccagcaaaaactgatgatgcgcacaagtttgtacgagaggccgttcaggcatttcctgagatctatttctctcgtctggtagtgttgggtgaaggtgatagtgaagagattgtattacctcgtttgtttcaggctaaaggagcgcctattgatgaatcagcaattacaattgcgccgttgggaggtagacatgtaaatcatttttggcgattactttcagcgttacaaatcccttattttacattgctcgatcttgatataggccgctatgccgcaggatggggacgtataaaatatgtcaatgaccaattttctctacatgaaccacataaaaaactacccgatggttacggtattccaatatggaatagcacaaagcataaaattaggaactataaccattatttagaaaagctcgaagaacgtggtgtttttttttcttacccaatggatttggatttttcaatgctgcaggcttaccctgaagcttatgatgttgaagacaaggaacctgatgactcgacaattaaggctgtacttggacaaaaccattacgattcatgtcaatatagagaagatgaattagaattatttagtacctatcagcaacgctttaaacttggtagtaaaccagccgcacatattgaggcgttagctcagttaacggatactgaactacttgcaagaatgccagcatcattaagtcgattagctgatgcagttattgtcaaattggcggagttacctgaatga

SEQ ID NO: 75029 - DNA, 1668 bp, Morganella morganii
atgattactgttgaagaatggcaaccagcagatgagttgattcttgagccaaatgcgttacgtgcagcaaaagaacatgagtattgtctggcattgaccgccggaccaggtgccggtaagacagaaatgctagcacaacgagctgactttcttttgcgtacaggaacatgccgataccctaagagaattctagcgatttcttttaaggttgatgcctgcaaaaacttgaaagagcgagtagaacgacgatgtggcttcgatcttgcgtcgcgttttgatagctatacctttcatgcatttgctaaacgtattattgatcgttttagacctgtacttgtaaatgagtataccttggattttggttattctattgttgataaaaaaaatggtccttctcgaacagaaatagagtttggtgatttagttccgtttgctattcaaatactgcaaagctcagaaattgcccgtaatgcaattcgacaaacttacagtgatatttttttggatgagtttcaagattgcactaatttgcaatatgaattggtcaaacttgctttccaaggaactaggctccgtctcaccgcagtaggtgatacaaaacaaaaaattatggcatgggctggagcactggatggtattttccaaacatttgttaatgattttaatgcagtgccacttaacatgtatcgcaatttccgttctaaacccagattattacgtgttcagaatgaaattattcgtacgttagatcctgcttctgttatgtctgatgaacaattaaggggagatgagggggaagtttatgttcatagttttgaagatagtcggcaagaagctatttatttagttgatttgattgataagtggatacatatagaacaaataccgccagcggaaatatctgttttggtttctaaacaattagatctttatgctaaccaccttatggttgagttgggaaatcgtggtattccatatcgtaatgagcaacaaatgcaggatattacggtggaacctgtagcacgcttgatcgtggactatttgtcttgtctttatagcgaacgtgaacctaaggcttggattcgattgatgaatcagcttattccttttgctgatgaaggaattcaatctagtgcacgtaaggatcttgatctgctgattagaaaacaaagaaaaattgtatttaatgcaaggagtacagagctgccattttcagactggtggcaattagcgatagattttttaaagaacactagcatcgaaactttggtggctttatcccctgaatacgaaaatcgtaagcgtttaaaggaagttattcgagaaacttctattcggattcaagacttactaaggttggaaccagatttgcttaaagcattgggacgctttactgatgatcaagctgtaagaattctgactattcataaaagcaagggattagagtttgattccgttataatcatggcggttgaaaatgagattttttttggcagtaaaaatgaaaatcgttgtgcattttttgtcggtgtttctagagctaaacgaaggttagtattaacccatgcacaacaacgagagcgcccattagatgctaaacgatgggatgtaaagagaagtgcccaagaagaatatttcaactacgtaaaaccatttgtaaatggttag

SEQ ID NO: 75030 - DNA, 1794 bp, Acinetobacter baumannii AB5075; identical to SEQ ID NO: 71916

SEQ ID NO: 75031 - DNA, 1782 bp, Acinetobacter baumannii AB5075; identical to SEQ ID NO: 71827

SEQ ID NO: 75032 - DNA, 1845 bp, Pontibacillus yanchengensis Y32
atgaggttaaaaaccgtgacaattaataattacagaacatttgaagatgctacttttgaattctcaaattatggtgttgtgataggcgctaataattcaggtaaaactagcgtattctccttactcgataagattttaaatccctttaagtctctttattatagtgaatttgaggtaagtgattttagagttttagatgagccgttagtagttaacatgacttttgattttttaagtgaagtgcaaatgagtgagtttaagttccatcttaatagggttgaaatggaagattttcagagtgaagaagagaaacttcaaatatatttaaaatatgaatgtatatatgaatcatctactgaaagcttctcaaaaaaattatacataatatctggagatgaacagtttaatatgagcgaaaaacaaaggaagttatttccttttatttatagaggtgctcaaagagacaaccgaactgaattaagaatggggagaaatacatttcttagtcgtctgttagatactgtagagattgatggtaatgctaaagaatctattcaagagttgatggggcaagcctctgatatactctcagaacaacttaaaaatatttctaatttaattgagcaaaattcaaagcatgttatagactatcctataaaacctagcgaagatgaagaaaaacaaaacatacggtttaaccttcttaacttagaatcagaaaaactcttaaataatttagagatttatattttagaggcatttaaatccgactttgagtctcttactaagcaagggttaggttatcagaatgctatagtcttagctatttttaaaagttttgcaacatctgctattaaaggagacttaattttagcgctagaggaacctgaactgtttcttcctccacatgcccaaagggctttagctagagattttaaggagctttctagtgaaaatcaaattcttatagctacacattctccatcatttatgttgagtactaaccccaaagatatagtcattttaagaaggttaaatagcggcatgacaagtgtttctcaatttaataaaaatgcttccaaaaaagatatagaatggtttagcaaaagaatcaatgctataaatggtgaggcttttttttcaaatgtagtattactagtagaaggggaaactgaagaaggagcaattaatgagttgtcatacaaattagatgcaaaaaactccgaatattctttcgataaatatggaataacgattataaattgtggaggtaaatcaaaaataaaagattttaatcgtctcgttaaatatttttcgttaccaacggtagcgttaatagattttgaccctgatggaactgatccaaatttagatagagatgaaggggaggtaaactatttatctagtgtcgtggataacttaaaacaattaccaagagatccagaatggggagactttgaaggtgttctatcaaaagaagctccaataaacaacttattacagataatagaagatttagagatgaaaaaggtattttgtggacaattaataaagataagtaaagaattagagatagaacaggatatagatttcataaaagatgtttcagcaaatgaagaagatattcaattagatgaccttattcgaattaaagagcatattaaaagtattgatcacaagtatataaaagactggtatagggcgggaataagagatacattaaaaagacaaaaatctgttataacgggcgatataatagccgctaacctgagtggaaatgaaatccctaatgattttgctggtgtaataatgagttgtgttgaactgtctagagaccggttctaa

SEQ ID NO: 75033 - DNA, 1830 bp, Pontibacillus yanchengensis Y32
atgaatgaaaatataattgaagaaataattctagataataaatcttcagccttagttttagctggacctggagcaggtaaaacaaggttgataataagaaagctagaaatactagcccaacaagattattttaactcttccggaaaaaaagccttagttttaacatttaataaaaaggcttcaatagaattacaatctcgtattgaaaaggcaaatattccggatagtagttttattgaagtttttacttatcatggtttaggatataagattttaagaacatacggttatttaatagatatatcctatccactgaagttatttccaattgatgaaaggaaagcattaataaaagaattagaaagtacatatcaagccttctcattcgatctcttttatcaaaaatatgcatcaattgctaatgaaaaagatagagaaaggttcgtgggaaaacacgctcaggaatatgctgatgctttatgttcttataacagcttcaaagaggaaaaaggccttatagattactctgatttaataagtaagtgtatcgaattacttcagaattccaattggctgagaagggtgtttcagggtgcatacccagctatattagtagatgaattccaggatactgaccagcttcaattcaaaatgttaatgatacttggattatattctaatattttgtcagttgctgatgaggaccaaattatttatgaatttagaggggcagaagaaaagaatattaatgactttattgatgtatttaaagcttcaaaatatcacctttcatataaccataggtctaccaataatattgtacaagtagcaaattctttaattagtaataacacaaacagattgtcaagaattccaatgcacacaaataacccagatgggtcgaaaattggtatatatatgtgtagcagtattgatgaagaagtactaagaataaaaaatttaattatctattggaataaagaaaataaagggaactgtgcaatactatttagagaaaaggttaatctttctaaaattataatatctcgagtttctaaagaattagatgaagttggtgttcagacttatgagttaaagcctgacatgattttaaaagatcctgtcgtacaatggtttatagtagccttaaggtttaaagaatatttaacattaagtttattatctgaatttgtgctttttttgccaggtattgggaggaggactcaagaaaaaatctatgattatataagaaaacacgatgatattttatacgatgatgtagatttagcactattttttagtaaaaaacagttatatatagttgatggaatattaaatgaattatttaaatcccatcatatcttagatgtttttgatttagcttataataaggtatctgaaaaagaaaaactaaaaaataaagaaaaattttatgggaatatacgccgtgtcatagaacaagaaacaaatgggtctgccaaagagttggttaaaaattatagatatattttagatgtaaataacctcttaaaactttctaaaaatgaagtgtttataggaactatacatcaagttaagggattagaatttgagaatgttgtgattagtggtgtgtcaaatggaatatttcctaaaattaaacaaggtgtagaaaatacaatccaagaagagcgccgtttattttatgtcggaataactcgtgctatgtttaacctttgtattacagcgtcaagagaatggtttaatcctttggagaaaaggattgaaagattagaagtatctccatttttgagggaacttcctagagaatatcttgtttttaatcaataa

SEQ ID NO: 75034 - DNA, 1737 bp, Pontibacillus chungwhensis BH030062
ttgaaactaatatgggttgaaatttggaattatagaaacttagatggaatagaggttgcgttgcatccagatatgaattttattgtaggggagaataatttagggaaatcaaattttctagcgatgttaaacactatttccgcttcaagatactttcgtgagcgtgacttcaaaaatccagacaattcaattgaaataaatttacaattacaacttgatgatgaagaaataggattatttgatgattatttttctcctcacgatgaacagattaatataatcaatataactttaaaacaagatagtccagaagaaatatttaagtttttacataaggaaactgaagaggaaatatctcataaaactttaaggaagttaaatttcataaactattcatcatttaggaatcctcaaaacgagttaaattttgataggggaacaggtggaggaaagttcttaaaataccttgttgaacgttatttaaaagaaaattcaacagatggaaagaatcagtttatcgatgagaacgattttactgatttattaaagtacttaaataaaagtataggaaaaattgaaacaataaataacttttctattgctgctcatttggataatgaggttgaaaaggttctatctaaactaatagttttaaagggtaacggggatcactatataaatgatatgggttatggtgtgcaatttttaaatattatacccttagtaattattgataacatatataacataatagaaaaatctcgtaggtcaggtgaaaatgttttagaacaagatcggaacgaacattatcttccggttataataggtatagatgaaccggaaatacatttacacccattcatgcaacgaagcttaataaaatacttatccgaaataacaaagggtgaagatcaaaattttaatagtatattaaaagatttatttgatgtagatagagttaaaggacagctaattttcgttactcactctccattttcaatacaaaataattataaacatattgtgaggttttttcaggatgaaagtggagagctgagtgtgaaaagtggatctcaaataacttttaaacctgatatagaaaagcacctaaataagaatatggaaataattaaagaagcattttatgctaaaagtgtattggtagtagagggggaaacagaagaaggagcatttcctattttcgctcaaaagttgggatatgatttcgataagttaggggtcagtatagtaagagctggtagtgtaaatagtgtacctcctttaatgaatttatttaataaatttggtgttaatgctgtaggaataattgataaagatgatgggaatatggaacgtaaagcttttcaaaatgttgaaaacttgtttgaaactaattttgttgattttgaagaggagttatcacacagttttcaacctgaagattatgctagtttcttagtagaaaatattcctgaaaagaaaggctttcttattggtactgcaaagaagttaaatatccaatttaaccctgcgaacccaaacttgcatgaagaattcaaagctattaaagaacaagacaaaatacgattgaaatctgaattgcaatccggtatacattcacagttgtcaaatattaagagcattattgttggtaaggaattggggaaacatactacagtgattccacaaatctatattgaaacgataaggtgtttggtggggggatctgatgattga

SEQ ID NO: 75035 - DNA, 1785 bp, Pontibacillus chungwhensis BH030062
atgattgaacatactgacataaaagataaaattacagaaatacatggtgatgataaatcacaattagatgtaatattttcggacggtaaaaaaataatggtagaagcacctgctggttatggtaaaacacagacgcttattagtaaaattgcatatgacattgtggccaagaaaataaagaattataaaaaaatattagtgatcacatttagtgtgaatgcagcacataaagttaaaaaggacataaagtcaaagttacccgtattgctacaagacgctttaaagccaaaacctaaggagattgatggaaaagtggtggtttctaattaccatggcttttgtcgtggaatattaaagaaatacggatatttacttcatcagaatttgaaagaagttgattcctttaaaattttcaacacaaaagaagaaataggattaactaaagaagaattaaaggtaatcagtaaatttgaacacgatgtaagaattattaattatgcaggaattgaacaaaataagcataaatacttaaaaatattaattaaaaaattattagacaataaatatattacatatgatgggataatattattaactgaactgttacttaaaaattaccccagtgttttaaagttttatcaaagtatatttcaatcaattgttatagatgagtttcaagatactaacgttttaagctgggaattaatgaatttaattattagtgataagtctaatgttcaattttatggtgattctcttcaaaaaatttatgggtttattggggctatccctaaccttttagatgatgccgctgaaaaatttgatatggaatatcatcatttaaagtataattatcgatttaaagataataaggaaatgttgttattagataataatattagggagattgcgaaaaatcctataaatccaaatatggaaagtgaaagtgaggtcaagttaaacctttttgactctcaatatgatgaagcaaaaggcatagtacaattagttaattctttagaccttaatcaagccaacgaaaaagtagctatattatataggcaaagaggtagaaatttagatattgttcttaaagaatttgaggataagggagttccgtattttaatggtttatatttacaagatgaagatcctgtttataaagactttcatcaacaatgtttgaatagatttattgagttttttaagaatagagattcagtatctaagaaaaaccttatggaattctatttagattttaaatccataataaaaattaattcaaaatctcaacctttgttaaggttactaaaagtttttatagaacaagttattaaagaagcaatttggaaacatctaaattcagaagatagaaagaatttcataatcaattttcttatgggtaaaggattgaagaactacattgaatacgttaaagaaagtgtaatcatttctacggttttcggagcaaaagggttggaatgggaatacgttattattccagacttagagaaggattcaattcctaattatatggggatgtgtaaagggtgttcctttaaacaaaattgtaggcttattatagacgaagacaacgaaaagagctttatagatgaattaggagttttttatgtggctcttactagggctagaatacaaacgtatttcacagccagtgaaataaatggatatggatacagaactaatataacttgttttctaaaactgcagggtattagcatgaatattaacaaagatgttaagtcaatctttaaagaagcgtag

SEQ ID NO: 75036 - DNA, 2070 bp, Gallibacterium anatis
atgattcttaagaagatggaggtgaataacttcagacttctaaaaaattttcaattagaatttaaggaagagttgtcattagttataggtaaaaataatagtggcaaaacctctgttcttattattttagataagatgttaaactcatatagaataatgtgggaagatattaatttagaaaggcagaaggaattatatcaggaaataattaaatttaatattatagagctaaagacggatagaccattagaggctataagtcttaaattattcattgagtatagtgataaagactcatatacaaatattcagaaatttatgatggatttaaagccagagaataacatcatagtattggaatttgtctcgttgatatcagcaaaaaaagtcgtagaattacgaaataatatagatgagaataagattaatgactttacgttattttctaaatttctcagcaaaaatttttcaaaattctttgaggtaaaaaaatactcgagaggatttgatgttacacagcataaaatagaagaagttagatcagaagaaattgagagcagtgatattcagaaattaattaaagtagtaggagttagggctgatcgagctgtttctaatgatgatcgtaatcatgttttatcaaagctaacgggcaaatattttgattcttataaatcagtcaaaagcaaaagtgaggtgatatttacacagttagaaaaaaaattggaagaggcagataatgaattgtataaaatttataatggaagtaaggctgaaaatgggaaggttgttgatggagtttttagcgagattataaaggttataaaacaatatggaggggcaggacaagggattgacattgcgatagagtcttctatttcagagaaaaatctattatcagataatacaaatttcagttacagacaagggaatgaaagttctcttcctgagacatacaatggattggggcatttaaatttgattggtattttgtttgaaattgaaacaaaaatacaagaaatatttgaacaacctgccgatataaatctcttgtacattgaggaacctgaggcacatactcatcctcaactgcaatatatatttataagaaatattaaaaaccatattgagtcacacaagaagaagctatcaggtatgggaaaacagttacaagttttgattacatctcactcttcgcacatagtttcggcttgtaattttgatgacgttatatatttaaatagagaaaagaatgaggtcatagcaaaaaactttaattctttaaaagatgagtatagtggtgatagtcaaaaaggatttaaatttgtaaagcaatatttgactcttaatagaagtgaactttttttcactgataaggttgtttgtgtagaaggggatactgaacggattttgatgccaatgatgatgtataaagttgataagaataacacactagcaaatagtgaacttcctttattatcacaaaatatttcgataattgaagttggtgcttattcgcatatttttattcctttatttgaatttttagatattcacgttttgataattacagatatagatgcggcaaagaaaggagagaatggaagatatgttaaatcacatcctcaagatgcagatcatactagtaatgcagcaataagaaatttttttcaaggtactaatcttgatgaattggatagtccatttaaggcacttgtcaacaaaagtgcggaggataaaattaaaaagaagctaaggatagcttatcaaatacctgaaaaagatggtgagtaccaagcaagtagttttgaggatgcatttatagcattaaataaagacttcattataaaaaataagaagaatctttgtgagtatggggcgttaaagagttttgaagatgaaagcatgaaaagtgattattataattttgcattaaataatatagaaaagaaatctgcgtttgcttcaagcttgttatattttgataatgagtacgatgagatggaggatgaaaaatggaaagttccatattatattgaggaggggttattatggttacgacaggcttag

SEQ ID NO: 75037 - DNA, 1911 bp, Gallibacterium anatis
atggttacgacaggcttagaaccagaagttctagaagctcttcaatgtataaagacgaataaaaattttattttagaaggaggagctggtagtggaaaaacctattctctaatttctttaataaatgtattgatgaaagagtctcccaacgtcaatattatttgtattacatatacgaataatgcagttgcagaaatcttgtcgcgcatagaaaatgacagacttttggtatcaacaattcacaagtttatatggtctcttataagtaaatatcagagagagataaaagagattttagtggagttaattaatgataaaaatgataaaaaggaaaaaatttttaaaaagcctaaggacttttctggaactctaatttctatagattactttaaaaatctttatgtagattatgatgaatattattctataacttcagaaaatgattgtaggattagcattagtcacgatcatattttaatgattgcagagaaaatgtttgaacgatataaaaaaatatcagacattttgaaagatcttgcagattgcattttcattgatgaatatcaagatacaagtcctttagttgctaaaattttgctaacgcaccttagccagagttgtaagaagaatgtaattggtttttttggtgattcaatgcaatctatatacgatgatgcagttggtgatttgagtcaatatgacttagttaaaataataaaaaaacaaaatcgaagaaatccaaagtccataattgaattagctaataaatttaggaatgatattcaacagataccgtcagaagaagtaaatgcccctaatatggagagtggagttattagggaggggactattaagtttttatatggcaaagaattgcatatcattaacataagaggaaagagtctatttaagtcttgggatttttctgatggttcacaaacaaaagagttacggctgacacacaaatataatgctgagatgtcggaatttaaagacttatatgatttatatcatgatgacctgatcattaaacttataaaacaaataaatgacaaagtagacagtgaaaatttagataaagatgagactttaggtaatttggtagctaggatagaaccaacatttaaaaagcaaaaattgctagatttagtagatgatagtagggtttataagtcattgtacaatgacttgaaagatatgccatggaaggaagtttttaagaaatgtagaattgctgaacaatctcttatgtcgtataagttaaatggactaagtaggaaatatgaggccaattcttaccgagataggattttgcgaagattggatatacttagtgagcttattgaactctacgagtcgaataaaattaatgattttttgcggataacaaaattttctattggtagtacgaatgacaaaattcatcttaaagaaacaatggattatcttgtaaatgaagaggataaaacaataggggatgttttattgtttgcagagggaaaagggttacttaagaacgacgaattgtatagtagttatattctaaataaaggatattatttgtggaaaagaatacaggaaattccattcaaacaatatagaaaaagtattgcttacttgaaagagttttctccgatttgtactcaacatagtgttaaaggaagtgaatacgataatgtacttctcatattagaatctaattggagtaagtatgattttaacaccttatttgggaaaggttcttcttcaacaaaagtccaacagagaacaaagaaattattctatgtgtgtattacgagagcaaaaaagaatttagttatatatatgcctaccgatgatttagaaatagtaagcaaagctaagaatatttttggtgaggaacatgtcattgatgtatctttgttggaatga

SEQ ID NO: 75038 - DNA, 2124 bp, Vibrio tubiashii ATCC 19109; identical to SEQ ID NO: 72626

SEQ ID NO: 75039 - DNA, 2220 bp, Vibrio tubiashii ATCC 19109; identical to SEQ ID NO: 72447

SEQ ID NO: 75040 - DNA, 2070 bp, Gallibacterium anatis 7990
atgattcttaagaagatggaggtgaataacttcagacttctaaaaaattttcaattagaatttaaggaagagttgtcattagttataggtaaaaataatagtggcaaaacctctgttcttattattttagataagatgttaaactcatatagaataatgtgggaagatattaatttagaaaggcagaaggaattatatcaggaaataattaaatttaatattatagagctaaagacggatagaccattagaggctataagtcttaaattattcattgagtatagtgataaagactcatatgcaaatattcagaaatttatgatggatttaaagccagagaataacatcatagtattggaatttgtctcgttgatatcagcaaaaaaagtcgtagaattacgaaataatatagatgagaataagattaatgactttacgttattttctaaatttctcagcaaaaatttttcaaaattctttgaggtaaaaaaatactcgagaggatttgatgttacacagcataaaatagaagaagttagatcagaagaaattgagagcagtgatattcagaaattaattaaagtagtaggagttagggctgatcgagctgtttctaatgatgatcgtaatcatgttttatcaaagctaacgggcaaatattttgattcttataaatcagtcaaaagcaaaagtgaggtgatatttacacagttagaaaaaaaattggaagaggcagataatgaattgtataaaatttataatggaagtaaggctgaaaatgggaaggttgttgatggagtttttagcgagattataaaggttataaaacaatatggaggggcaggacaagggattgacattgcgatagagtcttctatttcagagaaaaatctattatcagataatacaaatttcagttacagacaagggaatgaaagttctcttcctgagacatacaatggattggggcatttaaatttgattggtattttgtttgaaattgaaacaaaaatacaagaaatatttgaacaacctgccgatataaatctcttgtacattgaggaacctgaggcacatactcatcctcaactgcaatatatatttataagaaatattaaaaaccatattgagtcacacaagaagaagctatcaggtatgggaaaacagttacaagttttgattacatctcactcttcgcacatagtttcggcttgtaattttgatgacgttatatatttaaatagagaaaagaatgaggtcatagcaaaaaactttaattctttaaaagatgagtatagtggtgatagtcaaaaaggatttaaatttgtaaagcaatatttgactcttaatagaagtgaactttttttcactgataaggttgtttgtgtagaaggggatactgaacggattttgatgccaatgatgatgtataaagttgataagaataacacactagcaaatagtgaacttcctttattatcacaaaatatttcgataattgaagttggtgcttattcgcatatttttattcctttatttgaatttttagatattcacgttttgataattacagatatagatgcggcaaagaaaggagagaatggaagatatgttaaatcacatcctcaagatgcagatcatactagtaatgcagcaataagaaatttttttcaaggtactaatcttgatgaattggatagtccatttaaggcacttgtcaacaaaagtgcggaggataaaattaaaaagaagctaaggatagcttatcaaatacctgaaaaagatggtgagtaccaagcaagtagttttgaggatgcatttatagcattaaataaagacttcattataaaaaataagaagaatctttgtgagtatggggcgttaaagagttttgaagatgaaagcatgaaaagtgattattataattttgcattaaataatatagaaaagaaatctgcgtttgcttcaagcttgttatattttgataatgagtacgatgagatggaggatgaaaaatggaaagttccatattatattgaggaggggttattatggttacgacaggcttag

SEQ ID NO: 75041 - DNA, 1911 bp, Gallibacterium anatis 7990; identical to SEQ ID NO: 75037

SEQ ID NO: 75042 - DNA, 480 bp, Streptococcus phocae subsp. salmonis
ttgagtacaaatggtactctgcaatattttataaaaaaagagctaaatgataaagaagcaaaatatgataaaattaacccgaagataattgaaatgattagtgatagagatgagttagtggttaattataaaaatatttcaatgtattcccaaggaaaaataaacggctactatgctacgagttttgaggaaacgattattttaaccaatgctgtagatgatgatgaaaaaaagtacaagaaatctttaattaaacttctgcaacatgttcatccaaaaatgaggtattttaaagatatcgatgaaaattccgagattgccgagagatcgtatatgtatcaagtaaaactatctgacgggaaatcaaagttttctacaggattagtgtatttatcaataactgatagtgcctttgagctcaaacttcctaaatacatacaatcaggtttgcaggctatttgcaagtatttcaaggagtaa

SEQ ID NO: 75043 - DNA, 617 bp, Streptococcus phocae subsp. salmonis
atgacatataaaattagtccagaaaacaaacaattagagttagatattcagcaaggtattaatgaatgttttgataactttaagagcttttgttttgatgctggagctggagctggaaaaacctatgcacttcaaaaatcaattgagcatgttttgaagacaaagggagaaaatttaaagctaagtaaccaaaaaatcttgtgtatcacatacactaatgctgcaaaagatgagattcttgatcgacttggaagaaattcggcgatagtagtttctactattcatgaatttctttggggatttatttctattcaacaaggattgctaactattgagcatacgaaaaaaatccaagtggaacttgattgtattgaacgaaagataaatgataatcctctttcgggaagtgtagagcacagtgagtttcaaaatgttgtctgtaatgatgattttataaaggttttctataattattatagtatttctgctagagattttagagatgtaatgaaaaatcatgatacctactttgaaccttatctcagtaatattgctaattttaaaaatttagttaaagacattaataaaaagagtagattatcaaagacattgaaaga

SEQ ID NO: 75044 - DNA, 1929 bp, Lysinibacillus manganicus DSM 26584
gtgtatatttcaaagttaagtgtaaagaactatagaaatttcggtgaagggaaattttctattccgttgaaaccatttactgcaattattggtgaaaataatattggaaaatcaaaccttattgattgcattggtttggtcttgagtcaagatattactatgtttaaaaaaaggtttttagatgtcgatgacatcaattctaaaacaaaagaaatctttaaaaattcagttgtaaatcttatagaggaagaaaccattgatgaatcaaaaataaaatttcctgatgtaagggtagaattaattttggatgagttagacgaggaccaacttgctgtagtaggcgattggttctatgagaagacctttactaaggctaaacttacttattggtttaaaccaagggcaggttttaaaagacaagaatgggttgaaagacaagttgtgaatttgagggaactgttgagcgagggaaaggttaaaaaggaagaattgtatcatcatgttgaatttcctattgatcaatacgaatatataatttttggtggaaataacccaacaaataaatgtgatccatacttcttaaaaatgttaaaactagaagttctagacgctttacgtgatgcaaaaaaggaactagttgcaaatggagaatataaattattatatcgtattttaaatagaaattatgaaaatgattttgttgaaattcaatcattgcttggcgatttaaatcagaaattaaaggaaaacaaaaagttagaaactataaaaaaggaactaactacatatttagacagagtttctttatccaacccatcggaattaaacagtattgactttaacttttcatccccagaagtgaatgaaatattaaagaaattgagtattgtgtatggtgagaatcctgtttcaatcgaaagaaatggattaggtaaaaataatttattatttatttctttagtactttcacatttagcatcgcagactgatgaaaaaactaaattagcatttagagtaattgggatagaagaacctgaagcacacttacatccacatttacaaacacatctggcaaaaaatttaagtaaggttattaatcttaagggcgaaggggttgaaaaggaaggagaaaaagaagaagaagaaaagaaggatacacagattatcataacttctcattcaactaatataactacctcaattgatttagataaccttgttatcctatatagggataaggatcaaataaaatatcattatatccttgacggcttttcagataaaaaagaaggtcaagaccatattaaatatttaaaaaaatatttagatgcaactaattcatcaatgttttatgcaaggagacttatccttgttgagggcatatccgaacaaatattagttccactgttctttgaattatattctaaaaaaacattagagagtattggttccaatataatcaatgttaatggagttgcctttaggcattttcttgaaataatcaaaaatggatactttattaagtgtggtgtgctaactgataaagatgcaggaaagaagacagaaaaaagggctgaaaaattaaaagagcactataagataaatagcgatgtaattgctgttgaaatcaacgatgatacttttgagaaggaaattattaaatataacctaaaggacaagggaagagagttgttattaaaagtgtttaaacaacttcatccaattaagtatacagaattagagaaaagttgggaaaaacagatagacgttaagacttacttcgaaaatattgaaaatgataagtctgattttgcatttgctttacatgaagaattattaaaagatagtacaggctttataattcctaaatatatagtttctatcttcaaatttatactgggggaagaaaatgaagagcaaactaaataa

SEQ ID NO: 75045 - DNA, 1596 bp, Lysinibacillus manganicus DSM 26584
atgaagagcaaactaaataattcgttgattattgctgctgcaggatcaggtaaaaccacagaattaatcaagcaaataattcaaaaggtaaacaaattacctaatgataaatatttggcagttataacctatacgaatactgccacaaatgagattttagaaaggttacaaaaaaaggtatcaatccaaccaaatatttttgtaggaacaatacatagtttccttataaagttcctaataaaaccctatgggaaggttttgggattagtaccaaatgaattaattattacagattatgatattaaggttaataaatcttcaaagaacccatttattgaaaaaaacatgatagttaatcgactttctgagaaaggagttcttacctacgactatatagttactctttcgaaaaaaatattggagaatgatgaagccaaaaagcgtttttgcaatcgtattaggtacctatttgtagatgaatttcaggactcaacaaatactcagtttgagatttttgataccctaagaaaggggaaaaattctgaagtaatactggttggtgacccagaacaacgcataatgaattttaggaataagccccgaaaaagaaaagattcctcaggggctaagaaagttcctttgcacccaatagattccctgcaaaataagaaaacttattctattagtaagttgaattgcaattatagatcgagtgaaacaattgttaattttattaatcactttcattctagtattcagcaagaatggtcaaataaggagattacatctaagaatccagttatgttcattcaatcaactaaattaaagtcgattataaacgattttaataatttatgtataaatagtaattattgtaaaacagtgcctaaaacaaggttttttctagcgtatgaaaataaggtttataaaaattatagaaaagtggactttaaccataaatcgaaagaaaatttgccgttgttcactagtatctttgagtatttatcggccttttataatataaaaaaagatcagttactctttgcattaggattggaagaaattgaactaagaaagaaatgtcttttattactttttgaaattaattataatatagattttgattttgaagactttgtaagtttcgtagagactacatttaatcgcaagagggaagaaacaggcgaggaagttaagttcaatataaaagatagaacaaaaagattagtagaagaactctcaaattcaatgtccgataattatgaggatatggctaaagaattaaaagaataccaagattcttttcttacaatccataaatcaaaaggactacaggctgatgcagtactagttgtagcaaaaaatgaaaaagaactattaatgtggctcgaggacgataaagaaaataggcttctagatcagcaagataattgtagattaggatatgtagcattcagtaggccgaaagagttcctatgtattgcatgtcttacacctgttggtaaggagacagtagaaaaacttaacacatttaatgtgaatctctttttacaattggaagaacaagaacaactctctcttaagaatatgaattag

SEQ ID NO: 75046 - DNA, 1905 bp, Pseudomonas coronafaciens
gtgaatcttgtccgtgttcgcgtccgtaacttcagaggcatcgcttacggcgaggtccacctcaacgggcacactgcctttatcggtgacaacaatgccggcaagtccacattgctggaagcggtggacctggtacttggcccggagcgcctaagtcgccgccctgtaattgacgagcacgatttttatgccggtacctatgtagacccggccaaaaacgaggttgtcccgatccagattgaggttgttgtcgctggtctttctgatgagcagcagcggcattttcgcgatcacatcgaatggtgggatacccaggccaaaacattgttagtggccccccccgaaggaacagacgctccccatgttggcgcggcaatgcgtgtatttttcaacggctggtatgacgtagaagaggacgacttcgccggagatacctattacgccattcccgaaatgccggacgcctcctacttgcgcttctctgcgcccgacaagcggaaatgcggttttctttacctgcgtacgctgcgaaccggcgctcgtgctctcagccttgagcggggctccttgttggacgtgatcctccggctgaaggagacacgactcacaatgtgggaagacctgctcgaccaattgagagcactgccggttggggagaccgaggacatcggcgagttgcttgtcgcagttcaagatgcagtgcggcactacgtaccatccgactgggtagagcaaccccacatgcgagtttcggacctcacccgcgacatgctccgtcggaccctaactgtcttcatgggtactggagcgaagagacgggacggctccatctactccgccccatatcagcaccaaggcactggcacgataaatacgcttgtattggctctgctgtccatcatcgccgagctcaagcaaagcgtgatcttcgcgatggaagaaccggagattgcgcttccaccgcatactcagaaacgaatcatcagttcgctacgccataagtcggcacaggccattttcacctcccactcaccgttcgtgctggaggagttcgagcctgcccaagtagtggttctcaagcgcacggccggtgttatgaccggaatccctgccacatacccaccagcagtcaaacccaaagcttatcgcaccgaatttagaactcgattctgcgaagccctactggcccgctacgtacttgtgcttgaagggcgtacagagttcgacgccctgcctgccgctgcccgcaggcttggcgagctagaacccacgctgttcaaatcgctggagaaccttggggttgccattgtcgatgctcgcggcgataccaacgtcgctcctctgggtgggtttttccggtcacttggcaaggtcgtgttcgcggtgttcgacaagcaatctccagaggcgcttgcaaccatcaaggcttcggtccatcacccttacgagtctacgagcacaggcttcgaagatctggtactgcagggtgcatctgaggcagcacttcgcggctatgctgctgttgtggttgctgccggcgattggccgcagcatctcgcggcattgacgccaacagtcgctatgccgttggccaatcttcgggcgggtttatctagctatttcagctgggctaagggtggcggtgacgctggcgacttgctcgcttcttgtccaaccgccaacgacatgcctgaatacgtgagagccacgttggcggctatcaagaatgtcatcgaaccaccaccaccaccaccaccaccacctcttcctccactgctgcctgcgctccctcctcaagtcgtcgtagcccctctacctgagatgtccatagctgcagccgaaccggtgccattggcgacggcctatggcaagtttcaaccttccccaccccagccactcccatga

SEQ ID NO: 75047 - DNA, 1650 bp, Pseudomonas coronafaciens
ctgggcggccccggctcaggcaaaacccacgttgcgttggtgaaagctcgtgatgagattcgctcaggaatactcaagccaagtcagaaaatacttttcttgagcttcgccaggcctacggtagctcgtattatcgaaaaggcctctgagctgatttcgcgtgaagacctgaagcaactggaggtcagcacataccacggcttcgcatggagcattctccggagccatgcatatttgttgaatggaaggtcgagcctaaagcttatgccgcctcccgaagcagcagcgcatttgacagatattgataaaacccaacacgaagctgagaagcggcgtcttttcgagcaagaggggcgtctgcatttcgatttgttcgccagcttggtcagcgaactgtttagccggagcgatcggcttggcgctatcttctctgacacttatcccataatcattttcgacgagtttcaagatacgaacagtgatgaatgggcgctggtcaggcagctagggatacgcagtcgcctcattgcgctggccgaccccgaacagaggatctatgagtttcgaggtgctgaacctaagcgcgtaggtgattttctagaagttttcggcgctgcccaatttgattttgctggtgagaaccatcgcagcagcggcactgatattgcgacctatggaaatgaccttctcactggtgcgaacaagggcaagacatatcagcaggtcaaaatcgtgcgttacaactttatgtatggaaaaaacctgcacttcagcgccaaggccgcagtgtgctcagcgctgggtcgactcaagaatataccgaacaagtcgattgcgatcctagtgccatctaggcggctaatgcttgaactttccgactacctctcttcctccgcagacggtctgccagagctacatcacgacgttgcaatggatgctgagccgcctgctctagccgctggcgttatcgccattcttctggtggggggcgcaccttgcgatgtggcgagccgcttaattggtgctcttcacacgcacattcgtggtcgtcgagggggcaggcctaccccacaggccgagctcgatctggccggtgctctcaccggcttcattgcctcaggaaagatccgcggtaccaagcgccagcagatcgtaagtgaagttcaacgaatctcagagttgcggcgacatctgcaattatcaggggatccgtcacaggattggttacagctaagcagtttgttggcatcgtccactgcggaagccttgaggcaagtggcaatggatgctcgctatctacgacttcttcatcgtggctcggtactgcgggcaaacttgggagccttgtggcgtgctcagggtgggtacaacggcgctgaggaggcggtccgcagtgccttgttgcaggagcattttgctgcagctcaaaaggactggcgcggcatccacctcatgacaattcataagtctaaggggaaggagttcgacgaggtcatcgtatatgacggcctctatcagcgcatcgccaaagccccgcaagatcctaaaaacaacgctcaagaccttttagctctgcgggtgggtgtaactcgggccatacgtcggaccaccattgtgacgccgaaacgcgattcctgcccattcctgtga

SEQ ID NO: 75048 - DNA, 2250 bp, Burkholderia pseudomallei MSHR5609
atgaaaataaagacgataaaaataaagaacttccgcttgctgcataatatttctctgcagcttgaagacgagaccacagtcgttgtcggacgtaacaactgcgggaagacctcgctcaccgacatcatccgcaaatttctatcggaacggagcacgttcgagatcgcggacttttcgagcgcttgctacgacaaattctgcgcggcgcaccgtgcacacctaaaaggagccggcgacgaagaggttcgcgcactcgtaccgtcaatcgaactgcggctacacgtgagcttcgacccgacagttcctgagttcggcccgctccgcgaattcgtcatagataccgacgacaactgcacggaggccgtaattgtgtgctcgcggagcctcgccgatggccggattgcggatttgttcgagggacacgaggaagccgtcctgcacggggccgacgaatcgcactccgctggcgatcgcctcgcgctcttccgcagcttggccgaccgtgtgcctacgctcttcacgacgcgaatatgggccgaggaccctcaggaccctacgaacacgcgtgacgtgacgcccaaagcggtcacaaacctgctgtcgctcggctttgtgaatgcgcagcgtgcactcgatagcacgggtggccgtgatacagacgtgctggcaaaggtgctggagggtctattccaaagtgcctccgtctcgacggcggacggctcccaaaagaacatagcggacggcctcaaaaaagccgttgaggaaatccagtccgggatggacacggatttcaagaatgagctcgcgaagctcatgcccgcgattgagcaattcgggtacccgggcctagataatgtgccgctacagccggagacgaagctcgaggtcggcaaacttctgtccaacttcacgaaggtacagtacgccggttacagcggcgtgcagctgcccgagtcctacaacggactcgggtatcgcaaccttctctatatcctactcaagatcgttggcttcttccgcgagtatcgggcgcatgtgaacgcgcccggcctgcagctcatcgtgatcgaagaacccgaagctcatctgcatcctcagatgcaggaggtcttcatccggcagttgccggagatcgttaaaaagctctgcgccttggagggtgaaaacgtctcgtggccggtacaattcgtcgtctcgacgcactctccccatgtcgcaaatgaagctcgctttgacacgatccgctatttcgccgtgacgtcgacggatctaccggttggggtgcgctgcactcaggtcaaggacctcagcagcgatcttgccggattgaaaggcccgacctctgacttcctgcaccagtacctcacgctaacgcgctgcgatctcttcttcgcggataaggcgatcctgattgaagggacgacggagcgactgatgttgccccaagtgatacgcgccctcgacgatgccgatccgtccctgaagcttcgcagccagtacattacgatcatggaagtcggcggagcctatgcacagctcttcatcccgctcctcaaattcctgggcctgcgcagtctaatcatcactgatctcgacgctgtcaaacgcaacgccaagaagaaactcgaagcttgcctcgtccatgagggtgagaccacgagcaattcctgtatcaagcactggttcagctcggccgaagctgcggccccggagcccaatgcacctgccgataaaccggccacaatgcctgtaaccacgccgcaggctgcttcgacagtccccgtcccggcgacggcaggggtaactgatgacgacgacgaggaagaagttgcggatggagcgacgttgttccctctgtcaaccgcattggcggcagacaacgctgccaagactcgcgggagtctgcgcctcgcatatcaggtcccggaagcggcggacgggccgtgtggccggacgttcgaagacgcgttcattctcgcgaaccagaccttcttcggcattaccggcgcgacgaatgacgcgctcgcgaaagccgcgcagaacaaggccgcgaagcaaaagaagtccaagttcgcattgacctacgcgattgagaaaaccgactgggtcacgccgcgatacattgaagagagcgttcgctggctcgccgcgagcaacaccgccgtcgctgatcctggcgtggcgctcgctgccgaggcccaggccgccaatgcgctcgtcgacaagccaacctccggtgacgcaacgtga

SEQ ID NO: 75049 - DNA, 1740 bp, Burkholderia pseudomallei MSHR5609
gtgaatgagaacacccgatccaacccagctgaagccgccgctgccactgcatgggaagcgctgaaagattgcctcgacggcggatcaagctttgtgtttgaggcgggcgctggcgccggtaagacctactcgctgattgctgcgcttcgctaccttctgcaaggtaggacacgggagcttcaacgcaggcaccagcaagtcgcgtgcgtcacctacacgaatgtagcgcgggatatgatcatcgcgcagactgatggtaatccagcgatctactgcgacacgacccacgcgttcgcgtggatgctcgtcagcccgtttcagaaacggcttcgcgagcttgtccgcacgctgccaggctgggccgatcgtgtcgaagaactcgacgccgcgaacatcactgccgttggatacgcactcggtcgccgctccatcgaagatggcacggcgaacctgcaccacgacgacatctttccggtgtttatcgagctcatgaggtccgcgaagttccgcaacgcagcggcgtcgcgtttcccaatcatcctcgtggacgagtaccaggacacgaacgccaagctcgtcgaatgtctcaaggaccagttcatcggcaaaccctacgcaccgcaattcggcttcttcggtgaccactggcaaaaaatctatggcgatggctgtggttcgatcacacacgacgcgctgaagcgcatctacaagaaggcgaacttccgtagtgcgaagccaatcgtcgatagcttgaatttgatccgcccggacctcgcccaggcggtcaaagaccctgcagcgccgggcgaggttcacgtcttccacaccaacggatggggcggaaagcggcttacggcgaaccactggcaaggcgatctccctgcgaccgaagccgcgcaagcgctcaggaatgtccgcgccgagttggaaagcgttggctgggattttgccggcgacacgaaggtcctgatgctaacccaccgggcacttgcgacggagatgggttacggctcgatgcggaccgtcttcgcgttcaacgattccttcacgcgtaaagccaacgaggtcatcgcgtacttccacgagcatcttgaaccggcggcgcgggcctacctgtccaaacgcttcggcaagatgttcgaagcatttgatgccgagcgtccagtgatgaattcgccggcagacaagggcaggtggacgaacgccatgagacggctctgcgaacttcgtgacacaggcacggttggcgacgtgatcgcacatctgtcctctacgggcctgccgatactctcagacgcagtcgtgcgccaggagagagcgcttgcggacgcgcttgcaggcggtgagccgctgacgggacgcgtcaaggaactccatgcacttcacgcggtgtcgtaccaagagatcatcgcgctctgcaaatatctcgatggtcactcgccttttgaaaccaagcatggggtaaagggcgaccagttcgaaaatgttctagtggtgttcgggcgcggctggaacgagtacgatttcaatctctatcttaagatggccgggaatcctgacctaatcggtacgcaaacggcggactacgagcgttaccgcaacctgttctatgtcgcagtctcgcggccgaagaggcgcttggcgctgctcttcacacatcggcttgagcctagcgcaatggcaacgctatcgaaatggttcacggggtacccgatccgggatatcggcccggcgctatga

SEQ ID NO: 75050 - DNA, 1905 bp, Burkholderia pseudomallei MSHR4378
atgaaactacagagcatccgactgtccggttttctgtcgttcggaccggaaccaactgaactgacgctcaatgacattacgtacttgattgggcccaacggctcgggcaagacggcagcacttcaggctctatgccgcctgttcgccttcgatccgtcattgagacggattcagcgctcagactttcatgttccatacgacgaggacgctgttccagacgaaagacaactttggctcgaagctgattttgtctttccggaactggaggcagacggcgagagtgcgacggtggcgccgcatttcagccacatgcgcttggacaccgctgatggcttaccgcgagtgcgatatcggttgagcgccacaatgggcgtggatggcgatatcgaggaaacgttggtctatgtgctggaccttaatagtgacgggtcgcctatgacgaccgcacaggttccacgagtcgaaagaaatcacgtgcaggttcactatctacccgcgcgccgtgatccagccgaacacattgcttacggtacgaatgcattgcttgggcgcatgttgagagccgttaattgggaagacgagcgcgaggaagtcaaaggcttcacggaccagatcagtgggagtctcgccgcaaaccgctcggttgctgctttgagcgagagcctgaaggcgacctggagtacgttgcacaaaggcagcttctttgcagatccgcacatcaccttcgtcgcatctgagattgaagcccttctgcgccacttgtccgtttccttctcaccgggacatgacgaagaactcgtcgatttctcgagactgagcgatggtcagaagtccatgctctacttgtcgctggtgctctcagcacagtccatagggcgtgccgtccttgccggcgaggacgattcattcgacccagacaagctgcgtccacccgtatttacgatcgttgccctcgaggaacccgaaaacagcctgtcaccccactacctaggacgcatcgtgaatgccttggtggctatgacgggcaacgaggacgcccaggccctcatcgccacgcatgcgccttccatgctgaggcgtgtcgacccgaagcacattcgctacttgcggctcacggatgaacgtacgacgaagatcacgcgcattcggatgcccaagaagacggacgaggcacacaagttcgttcgggaggcggtacaggcataccctgaaatctacttctcccgcctggtcgtcctcggagagggtgatagcgaagaaattgttttgcctcgaatcctgcgcgccaagggcatcccggtagacgagtccgcagttaccattgcgccgctcggtgggcggcatgtcaaccacttctggcgcctgctttccgcgctcgagattccgcatctcacattgctcgacttggatgtcgcccggtatcaaggtggttgggggcgaatcaagtacgtcaatgatcaattgggcgaatatgcgcccagcaagacgcttcctccggatcacagcgttcctgattggaactcggcagaacacaaggttcgtgactacgacaactacttggacaagttggaaagccgggatgtcttcttctcttacccgatggacctcgatttcgcgatgcttctttcctatccgggtaagtatggcgttgaatcgaaaccaccgagtgagaccaccattaaggcggtgctgggcgacagctatcacgatgcgaagcaatatactgccgatgaactcggcctgttcggcacctatcacaagcgcttcaagcttggcagcaagccggcagcccacatcgaagcattggcccaactgactgataagcaactcctcgaagacatgcctgagtctctgagtcgcttggcggacgcagtgatcgctaagctggaggagttgccggagtga

SEQ ID NO: 75051 - DNA, 1542 bp, Burkholderia pseudomallei MSHR4378
atgttagcgcagcgcgccgattttctgttgcgtacagggacctgcccctatcccaaacggatactggctatctcgtttaaagttgacgccagcaaaaacctgaaggagcgcgtgaagcgccggtgcggtccagatatggccgcgcggttcgacagctacaccttccatgccttcgcgaagcggataattgatcggtttcgtccggtactaaccgggcaagatgccctggatgccgattacaggattggtgacagacgggtcgcgcgacgccagatcgaatttacggatctggtgcctctggctacgcagattttgagaatctcggccgttgcccgtcgtgctgtgcgtctgacctacagcgatgtcttcttggacgagtttcaggactgcactaaccatcagtacgagttggtgaagattgcctttcgaggaacggctatccgtcttacggcggtgggagacacgaagcagaagattatgggatgggcgggcgctttagacggtatcttccagacctttgcaacagacttcgatgcggtgccgctcaacatgtaccgcaacttccgttcggagccccgcctgttgcgcatgcagaacgagatcatccgcgtgatggacccatcgtctgttatgcccaacgaacaacttggaggcgaggaggggctcatcttcgcgtggcgttttccagacagccagcaggaagcagagtttgtgactaacgcaatcgatggctggatcaatcatgacaagctcgcaccgtcggaaatcgcaattctggtcgcccgacaacccgacctgtatgccgatcatctgatggccgcaatggagcggcgaaacatcccattccgaaatgagcaacagatccaggacatttcggtagaaccggccgcaagactcattgttgactatctatcttgtctgtacgggcagcgcgcacccaaggcttggattcgcctaatggaccagttggttcctttcggtgatgaagacgtccaggccaacatgcggcgaaacacccagcgcttcatagcggagcagcggaaaaaggctgttctcgtcgaattgttgggcgagcccgcaacggattggtgggagtcggtacgtgaattcttgcgccatgtggggatcgagaccttgtcagcactttcgccggactacgagtccgcggctcgattgaaggaggtcatcgctgacaccaaggctcggatcgaagaactgctgaatatcgagcctgacttgccgaaggcactagagcgtttttccgacgatcaggcagtacgaatcctcaccatacacaagagcaaagggcttgaattcgattcggttgtcattctcggtgtcgaaaaccagactttttggggtaacccagatgcagagcgatgtgcgttttttgttgcggtttcgcgggctaagaggcgtcttatcttgaccgtttgtgattgtcggcaaacgcctccgtccaatccctatcggtggcaggaaaatagaacaactcataacgaattcatggcttacgccacgccattcctcagcccccaatga

SEQ ID NO: 75052 - DNA, 1632 bp, Burkholderia pseudomallei MSHR5596
atgcctactgctagcggtagcgcgacaacgggaagggccgaggatctgtccaagcgactgagccgcttctacaaacggaatcttgatcagcggcagcaggaccacaaggcgcttcgggcgttgttcgactccgaggttgggctgaacgagcacctcgccgatgtattcaagggaacactagaccggctctcgaagcttggctatccgggcttgcacaacccacgccttgaaatcaagtcagctctcaatccggcggcgatcatgagcagccaggatacgcacgtccactatgtgctcggcgacggtgacgacgccttgcgtcttccggatacatataacggcctaggcttcaaaaatctcatctacatggttgttgaaatcctcgaccttcatgctcgttgggttgcggacaaggagcagcgcgcgccgcttcatcttatttttatcgaggagccggaagcccatctacacgctcagctgcaacaggttttcattcggaacgtgctggagctcgtcaaagccagcgcggaggacgggagcgcatttcaaagccagttggtggtaacgacacattccccacacatcctctatgaacgaggctttaagccaatccggtatttccgccgacaagctcttgatgacggccagtccaccaaggttcttaatctctcagctttctacgaccagaatccggatgaacgcgaattccttcagcgatacctaaagctgacccattgcgatctcttcttcgcggacgccgccatactggtcgagggtaatgtcgagcggttgttgttgcccgtgatgattgagaaagaagcggactcgctgcgttcggtctgcctgtcgattcttgaggtagggggagcgtacggacaccggttcaagtcgctgattgaattccttggcctgatcgcactggtgattacagatctggacagtgtaaccgtcaccgcagccgcaactgccgctggtgcggccgacgaggttgccgatgaggaggaagacgatgggaccgaatttgaggttccgaacgacacccccggccagccagctgtgaagaagtccggttccgcttgcctaccatctattcccggagcgctcacatcgaatcagacgttgatccagtggctccccgcgaaacaaaccgtcgccgatctgcttgtcgcgacagaagaagagaaattcaaacaggcaaacgatggcaaaggctaccgggtacgtgtggcttatcaggtgccgatcgacgtgacgtggaacggttcgacagtgaacctttgtgggcgcacgcttgaagaggccttcggcctcgaaaatgcagagtggtgccaagccgccgcccagcgccatctcggcctgaagctgaaaagcgcgcccactacgcctgagagcttggctgaggggctccacaagcgcgtcggcggaaagtcgtttgacaagacaaaatttgcgctcggcgtcttgaccgagcttccgtcgaactggacagtgccgctttatatcaagcagggccttcactggttgtctagcgtcgtgggcctggagataccctctccgcttccggacacgaccgaacccgccgctgccgcggcggccgatcccgaaccagcacctgccggagcatcagcatga

SEQ ID NO: 75053 - DNA, 1947 bp, Burkholderia pseudomallei MSHR5596
atgacgagccgcgccaatcgacgggatacgaatgcggatctcgaactctatcaatgcctgaatgcaatgcctccgcgcagcttcatgatgattgcgggcgcggggtcaggcaagacgacatcgctgatcaaaggtctcaccgagatcctcaacagccatggcgaacgactgaatctccgccgacagaaagtcgcctgcatcacttacaccgagatcgctgcgggcgaaatctggacggatatcggaaacaatccccttgtgcacgtctctacgattcatagcttcctctggtcactggttcgttcgtttcaatctgacatacagcaatgggttgcgagtcggatcgacgaacgcattgccaacctgcgtgcgacagcggcgggattcggaccaagggtccagcagcgcacgcgcgacaaaaaccaaagcgacatagagcgcgcgcaagatcagcgagcgcgtattggtcgcgtcaggtcgttcacatacggcacggggagcgactatttaaatggcgtgctcggacacgacgacattatcaagatggtgccggagattatcatcgagcgtccgctgatgcggagcctgcttgcgcagcagtacccgtttctgttcgtagacgaaagccaggacacaatggataacgttgtggaggcctttaaagcggtcgatcaggatctcggcgaccggttctgtctcgggttcttcggagatccgatgcagcaaatctatgcaaccgggatcggggccattccgctcgcgcagaactgggtaagcataaccaaacccgagaattttcgttgcccttcaaacatcctcaacgttgcaaatgcgatccgccgggatggcgacggcctgatgcaaacccgaggccggatggcgggcccaccgggtgcagagataagcatgcccggcagcgcccatctgttcattttaccggtcgatgagctgcgcgaccaacgccttgcgcaagtacgtgcctggagtgccgctcacaacgacgatccactctggaatccggatggccgtgacgattccgtaaaggtcctcgtgatcgtgcaccggatggccgcgaagcggctcgggttcggagacttgtacgcggcactgaatgacaatgcacccgactcgttcaaatacggtttccttgacggaacagcttggcctgtgcgcccgttcaagaactttgttgtgccactcgcaagcgcgattgtgaatgaggacgagtttgaggtgatgaaagttctccgaatgcaatcgcagttactgcggaaggagaaccttagcggcgtcaatgttgcagagaggctgaccgcgttgcgcgccttcacgcaacagctcgaggcaatgatggaaccgagttccgatgcaacgaacggcgacgtacttcggttggtccgcgatctgcaagtcatcgaacttgatccaaggacactctcatatctggagattcaggatgctcctcaagcgggggcagaggccggcgcagacaatgtgcgggaggatgacgacggtgaagagctgacaaaggaaatctctgcaatggaagcctttctgtcatgtccggcgtcgcagttctggggatactataaatacatcaatgacgaatctccgttctcaacgcagcaaggcattaagggcgccgaattcgagcgtgtgcttgtcattctcgacgatgacgaaggcacgcatgcccagttttcgtatgaaaaataccgtggaatcaaaccgctttcggcccgcgatcaggccaatctccgtgcgaacaaagaaaccgcggtcgagagaacgcgtcgtcttttctacgtctgttgcacgcgcgctttgaaagacctaatcgtcgtgctctttacagacgcgattgaaacggcgaagcatcaagttgtagcgctcggtctgttccctgaagaagcgatccatcttgaggcggaactgaacgggcactag

SEQ ID NO: 75054 - DNA, 1743 bp, Acinetobacter sp. HR7
atgaatcttaataaaatatatttattaagatttggaggggatatggaaattgagtcattgcgtattaagggattccgaaattttaaagatgcatttataagatttaatggagatactctggttataggtgcaaatgatgttgggaaaagtaatatgctgcatgctttgcgcatattactagataagagcttgtcagaagatgatatagagccatcagaacttgactttcatttaatgcctaaaaaggtttgtaataatattgaaataacgatcagttttaaatcagtatttgaagatgcggttatatctgtgttaaaaggatatgttgatgataaaggccgtacatttttaagatacacagctaatcgtaacgatctaacatatcggatttttataggtcattcacttcaagatctagaagagattaatagtcgattttatttaaagtatgtcaatcttaagtatattcaatcacaaagagacctacatcgatttattcaaaaggaaaagcgtcaactcttaaagttagctcaacagaacctaactgaaaatcaaaaagaagaagataaattagtattagaggagatatgtgaagatttaaaagaggtaaatgaaaaaatatcgcaattgttttatatagaaaaggctacagaagaagtaaatgaagaattaaaaaaattatcttatcaccattctgattattctgttaagttggattctggtgctattcaagtcacagattttattaatagccttaaactaggagcctctacacatggtaataatgtattattaggaggtgatggtagaaataaccaaattttgttagctctatggaaagcgaaaagtattgctgaacatgatacaaatcatgaagtggtattttatgttattgaagagccggaagctcatttacatcctcaccaacaacgaaagttggctaaatatctcattgatgaattacctggacaagctattatctcctcgcactccccccagatagcatcttattttttaccagattcaattataagattattaataaaatctaactcaactgttgcagctagtaatggttgtgcgcagtgtataaaagatggttgggaagaaatggggtataggattagtatcctaccagctgaggcttttttttcaaatggagtctatttagtagaaggaccctccgaaatgcttttttataatgatttagctaaagcaattggaattgacttagatcatttaaacatatctttattatctgtagacggggttgctttcgaggtatatacacaaattttaaatgcactggaaattccatgggtaatgagaacagataatgatgtttctaagattaaaggtaaggaattatggcaatatacaggaattaatcgttgtttaagagctattggtgcaagcgggtggcatcatagtagagttgaaattacttcggaacatgtacctaaggatagacgatgggaatcattcagtaaaatgataaacgagaaaggtatctttatttcaaatattgatttggaaacagatttagttaattcacttactaaagaagttctagctagtttaaataagagcaataaaatagaagcaattgattacttacaaaaaaagaaagccattcgtatgcgtaagttattaaaaggtattagaaatgatttaggaaaattgaaaaaagatgcacttgcacaaccattaatttacttgaaagaattacttgaaaaaaaataa

SEQ ID NO: 75055 - DNA, 891 bp, Acinetobacter sp. HR7
atgatgagtacctcttatacatctcagcagattgaagctattaaatattctggaaatttagtaattgctgcatgtcctggtagtggaaagactactgttgtaaaagaaaaagtacggaatataacccttactttgaaagatcatcagggagtaatagccatttcatttacgaaaaaggctagttttgagctaaaaagaaagtgtaaagcagaaggtcataatacaaaacaaagtttttttggaactattgataaattttgtttagaagaaataattttcccatttttgtctcagttgtggaaaggaaggcccagagaaagtactattattgataagttaaataataaacaaaaaggtttttttagagaagtatataaataccccactgttaacgatattattttagataatggttttaagttgctctacaagcaaggctatctttggatagaggcacttcctgcattagcactttatattttaaataagtcagagtcagcagttagatatataaaggcaaaatttactcacatttttctggatgaatatcaagatacatctaaagctcaacatcatttatttatgaaattagtagagcttggtttgataggtacagctgttggtgatgtaaatcaatctatttataattttagaggaagcagttcagattatctgagagaattattgtctagtaaattttttaaaaaaatatatgttgatactaatcatagatgtcatatatccattaataattatgcatcaagattattagacccttatttctcaatagaagatcatcaagaagaatgtagagtatatagacttaaattaacgggggattatagtgaaatttctaaggatatctctgaaatggctttgttgcataaataa

SEQ ID NO: 75056 - DNA, 2295 bp, Xanthomonas axonopodis pv. phaseoli
atgcgcattcagcacgtagagatatctaacttccgaaagctgctttctgtgcgaattgacttcgctaatgagaccacgctgcttgtaggtgcaaacaacagcggcaaatcatctgccatgctggcactccggagatttttggtttcgaagggatctgcttttcggctccaggatctgactctttgtcatttcgcaaagcttgacgagattggtaaggagtgggagaacccaccagcaaactttgaaattcctacagccaaggactgggccgactggctccctagtctggatatctgggtgtcggcagatcaaggagagttccacttcatccgcgatctcattcccagctttgcgtggcgcggggggcttgtgggaatgcgtttcctgcttgaaccagatgatatgaatatgctgtacacggactatcgcaaggagcgcgcgagggttgcagagcttgaggatgctttagggaaggaggagccgcttggtagcccgctgacgctatggccacagagcctccatgattacttgaaccgtaggctgggagataaattcaaggttcgttggtatcgcctagatccgcaacaacttaagaagcctcacaagtcgactcgaatggctcaaatgcagcaattgagtcctacctccctgcctctggaaagcaatcccctcagtggattaattcgagtacacgagatcaatgcacagcggggattcggcgaccattcggacgacaatcaaggcgataacactagacccagcggtgcccgaaaactctcggaacaactcagatcctattactcccgacacctagatccaggtgacagcccagctatctcagatctcgaagcgttgcgggcgatagaagcagcccagtcggcattcgataccaggctaagtagcagcttcgaatctgctattaaagaggtcgagggattgggctaccctggccgcaatgacccacgcatcaaagtcgcaagtcgcctagcagcaaccgacggcatgaaccatgaagctgccgtcctttttgagttggattcaattcagggcgccccgggagcccctcctcttcatttacctgagaccgctaacgggttgggatatcaaaacctgatatccatgattttccggctgatgggttttagggatgagtggctaagaaaaaccagggccgccagcgcggaggtaatagaccgcgtcgagcccatccacctcgtgctcattgaagagcctgaagcccaccttcatgttcaagtgcagcaagtgttcgtacggcacgcctaccaagttctatgccgagacgctttgcttgaacgctacccaaatctgaagactcagcttttggtgagtacgcactccagccatgtaactcatgaagtggagtaccagaatcttaggtatttcaggcgactcccagcagggatgtatggcatcggcgtaccggtgtcgacggtgtctaacctctctaacgtgttcggcgatggaacaaagacgaaggagttcgtaaccaggtacctacgggcacagcacgcagacatattcttcgccgacgccgtcatcttggtagagggctcagcagagcgaatgatgctgccgcatttcttgcggaataagtttccattccttgaccgctgctacatcacaacccttgatatcggtggcagtcacgcacaccgactaaggcctttaattgacgcgcttggcatcctcactctggttattacagacctcgatgcagggttgaataaagcggcaaaaccggtgcaaagaaacgcagatcagattacgaacaatccgacattgcggagctggatgaaactgatgcatctgggcagtacagtggatgagctgcttgagctgccagcgaatcaaaaagagcaccagatcgacgacctgtactcggtgcgcatcgcctatcaaactcctatttccacccacctgcccgctactggtaaaccaatacaaaccctaccaaatacctttgaagacagctttgtgcttagcaacgccggtcactttgcggaaaaaacaaacggcactggtatgatgaaggccttcgtaaaagttttgaatgaagcgcaaacatcggaagccgtcggagaaggttttttcaacgaattacgcgaaggaaagaaagcagagtttgtgttgctcgttttgggcgacaagaacttccccaaccttgaaatccctgaatacatcagtgaaggcctcaactggcttgagtcgaaattgcgaagcaagcaaatagagctgctggtaattccacccgagtgcgcggaggtgacgccatga

SEQ ID NO: 75057 - DNA, 1848 bp, Xanthomonas axonopodis pv. phaseoli
atgagcgaggcagttatcgcagatgccgacgacactatgcaggcttgcctgaatctggcagacccgaagagtttttttctatacgcaggtgctggctcaggaaaaacccactcactcgtcgaagctatccgcgaactcaaaggtcgcgagcgagaacgcctgacattcgagggcagacgcattgcggtgatcacctacacaaactcagcctgtgatgagattcttcggaggctagagtttgatccactcgtggaagtctcaaccattcacgcgttcgcctggcgcctaatccaaggattcgacaatgagatcagagaatggctaaggatcaaacttccccaggacattgagaagatcgagggcgagctagcacgttcgagaggcgacaataaaacatctcgagcaaacagacggaagctacaaagcaagagacgcagacttgagaatctcgacgagattacgaagtttatctacagccccattggcgacaacagagagcggcaagcactcaatcacgatgagatcatcaagttaactgcagcattcgttcctgaacgccctttgctggatgttctagtagaccgctacccagtcgtattgatcgacgaaagtcaggacacccacgctccagtaatggaggcttttctgaaggtccagcaattggcgaagactcgcttctgcttggggctactcggcgacaccatgcaacagatttacggccatggagtaacgcgccttgacaaagcgataccggatgactggttgaaacctgaaaaggtcgttaatcgccgctgtcctcgtagggttgtagaccttatcaacgtgattcgaagcactgcagacactcatcagcagacccccaagcccgatgccattgaaggtgtggtgcgcatgtactgcattagtcaaagccaagaacaggcaccaaatcttgaggaaggcatcgctcagtcgatggctgcaatcactgacgacggcgaatgggctaccggttctgcgggccgaaaaaccttgatcctcgaacataagatggctggacggcggatggggttcgaaaagctgttcacacccctatacggggttgagcaccttcaaacaggcttgctggatggaacattgcccgcacttcgcgttttcagcgaaggcgttcttcccattcttaccgcaaaggacgatcacttccttgtgcttgaagccgtacgctctcgctctccgttgctcagcaaggatgcaatgcaatcaacaggggatcaatcggcccacatgcaacgtgtagaggacgcgacgcatgccctgctctctcttttcgaaaaaaacgatccaacactgagcgaggtcgcaacgcttctgttgcaaacccaactgcttgatgtgcctgataatctggttggggctatggtgctgggagcccctagtgaggctccagatcctgaagatacgaacgcgatgaccaactacgcctaccagctattccttgagcgtccattttcggagcttgcagcctttgcgagttatgcggatggcctttcaccctacggtacacatcaaggggtaaaggggctggagtttccacgagtcatggtcgtcatcaacgatgaggaggcaggcggcttcttattcagctacgacaaattgctgggtgtaaaagaaccaacaaagactgaccgggacaacgagcgtgacggcaaggacaacgcactagcacgtactcgtaggctgctttacgttacatgtagtcgggctgaaaagagcctggcgattgtcgtatacacaccccagcctgcactcgccaagcgaaacgttgttgctgctggctggcttcaggagagcgaggtcgaaatcctttga

SEQ ID NO: 75058 - DNA, 1881 bp, Xanthomonas axonopodis pv. phaseoli
gtgcatcttgtgcgtgttcgcgtccggaacttcagaggcatcgcctacggtgaggtccatctcaatggacacactgcttttattggtgacaacaacgccggcaagtccacattgctggaggcggtggatctggtacttggcccggagcgcctgagtcgccgtcctgtaattgatgagcacgatttctatgcaggtacgtatgtagatccggccaagaacgaggtcgtcccgatccagatcgaggttgttgtcgctggactctccgatgagcagctgcggcatttccgcgaccatatcgagtggtgggattcacaggccaagacattgcttgtaggggctcccccagagggaacagacgcgccccatgttggcgcagcaatacgcgtctttttcaacggctggtatgacgtagaagaggacgacttcgctggggataccttttacgccactcccgaaatgccggatggctcctacctgcggttctctgcgcccgacaaacgaaagtgcggttttctttatcttcgcaccctacgtaccggcgcccgcgcactcagcctagagcgaggctctttgttggacgtaatccttcggctgaaggagacacgactgacaatgtgggaagacttgctcgaccaactgagggcattgccagttggagagaccgaggatatcggcgagttacttgtcgcagtccaggatgcagtacggcactacgtaccatccgactgggcagagcaaccccacatgcgggtttcggacctcacccgcgacatgctccgtcgaaccctgactgtcttcatgggcactggcgcgaaaaggccggacggctccgtctattccgccccatatcagcaccaaggcactggcacgattaacacgctggtattggctctgctgtctatcatcgccgaactcaagcaaagcgtgatcttcgcgatggaagagccagagatcgcgcttccgccacacacccagaaacgaattatcaattcgctacgccagaagtcggcacaggccatcttcacctcccactcaccctacgtgctggaggagttcgatcctgtccaggtggtggttctcaagcgcacggccggtgttatgaccggagttcctgcaacatacccaccagcagtcaagcccaaggcttatcgcacagagtttaaagcccggttctgcgaagctctacttgcccgctacgtacttgtgcttgagggccgtacggagttcgacgcattgcctgccgccgcccgccggcttgccgagctggatcccacgcgtttcaaatctctcgaaaaccttggagtggctatcgtcgatgctcgcggcgagaccaatgtcgctcctctgggtgcatttttccggtctctcggcaagatcgtgttcgcggtgttcgacaagcaatcacatgaggcgctcgcaaccatcactgcctcggtcgatcatgcctatgagtccgcgaataagggcttcgaaaaccttgtgttgtatggcgtgtctgaggtcgcactccgcagctatgctgctgttgtagttgctggcggcgattggccgcagcatctcgcggcatggacgccaacgcccgcaacgccgttggccgatctgcaggcggctctgtcgagctatttcagctgggccaagggtggtggcgacgccggcgacttgctcgcctcctgcccaaccgccagtgacatgcctgaatacgtgagaaccacgctggcagccatcaagaacgtcattgagccacctccgctgcctgcgctgcctccactacctccccagctagccggcgtgccccctctcccaggggcggcagccgagtcgccgccattggcacccgcctatgggaagttccaaccgtcgccgccccagcctctggcatga

SEQ ID NO: 75059 - DNA, 1656 bp, Xanthomonas axonopodis pv. phaseoli
ctggcgctaggtggccctggtgccggcaaaacacacgtcgcgctggtcaaagctcgcaatgagattcgctcaggaatactcaagccaggccagaaggtcctcttcttgagcttcgccagaccgaccgtagcgcgcgtcatcgaaaaggcttctgagctgatctcgcgcgaggatctgaagcaactagaggtcagcacgtaccacggtttcgcatggagcattctccgaagccatgcctatctattgaatggcagaccgaacctgcagcttctgccaccgcccgaagcagcagcgcatttggcagatatcgataaggcccagcacgaaaatgagaagcgacgccttttcgaacaggagggccgcctgcatttcgacttgttcgcaagcttggccagcgaactgctgacccgcagtgatcggttaagcgccatcttctccgacacctatcccatcatcatcctcgacgagtttcaggatacaaatagtgatgaatgggcgctgatccagcagcttggaaagcgcagtcgcctcattgcactggccgaccccgaacagcggatctatgagtttcgaggtgctgatcccaggcgggtgggagactttctggagaacttcggcgccgcccatttcgatttcgcgggtgaaaatcatcgcagcagcggtaccgatatcacgtcctatggaaatgacctgctcactggcgcaaacaagggcaaagtctaccagcaggtcaaaatcacgcgttacgacttcatgtatggcaagagcctgcacttcaccgccaaggccgcggtgttctcggcgttggatcgcctcaaaaaagtacctgacaaatcgatcgcgatcctggtgccatccaggcggctgatgctcgagttttctgactacctttcttctgcagctgatggtctaccagcactaaatcacgacgtcgcaatggatgctgaaccgccggctctagccgctggcgttatcgccacgttactggcgggaggtaccgctggcgatgtggcgagccgcatgctcggcgcacttcactcacacattcgcgggcggcgcgggggcaggcctaccccacagaccgagcttgacctggcgggtgcgcttagcgggttcatctcctcgggaaagatccgcggctccaagcgcctgttgattgtcagcgaagttcagcgcatctcagaattgcggcggcaactgcaattaacgggcgaccctgcggaagactggttacacctgcgcggcctgttggcatcgtccactgcggaagccttgaagcaagtagcaacagatgctcgctacctacgactgctgcaccgaggctcagtattgcgaaccaatttgggtgcgttgtggcgcgcccagggagagtacatgggggctgaagaggcagtccgaagtgccttgatgcaggagcatttcgctgcagctcagaaggactggcgtggcatccatctgatgacgatacataagtctaaagggaaggagttcgatgaggtcatcatctacgatggcctttaccagcgcgttgccaaagccccgcaggatccaaaaatctgcgcccaggatcttttagtactgcgggtgggcgtgactcgggcgatacgtcggaccacaattgtgactccgaagcgcgatccctgccctttactgtga

SEQ ID NO: 75060 - DNA, 1686 bp, Burkholderia pseudomallei MSHR983
atgacgcacgacaaaggtcgcggcagccgagagatactgtccagtttgatcaaggtcgatttcctgcatgcacagcggcatctgtcggactctggtggcggagctcgatccgaagatttgtcgcggtgcttgagtcgcttctatgaaagaaacctcgagaaacacgaggaagactatgacgcccaacgcgcactctatcagtcggaggcactgctcaacgaccatctcgaacgtgttttcggcccgacactcgagcggctctcgcatctcggctatccaggcctcaacaatcccaagctgttgatcaagaccgcactgaatcctgcaactattttgagcagccatgatggtgctcgggtgcattacgccgttggaccagaagtaggcatagacacgcagacgacactgccggatcgctacaacggcctggggttcaagaaccttatctatatggtggtagagcttctagacgcgcatgccagatggctagatatagaagagaaccgtccgcctttgcatctgatcttcatcgaagaacccgaagcacatctgcacgctcagttgcagcaggtattcattcggaaggttctggacattctcgatattcccgatgaagatgcaccgcactgcaccactcagattgttgtttcgacacattccccgcacgtgctcttcgagcgcggcttccaaccgattcgctatttccgccgcgttcgcgaggccggagttcagcgatcggaagttctcagtatggcttcgttctatgaaacagctaacgacccgaacgatcctactgaccgtacccgggatttcctcgagcgctatctaagactcacgcattgcgatctatttttcgccgatgctgccattctggtagaaggtaacgttgaacgcttgctgatgccgcagatgattgcgaaggttgcgcccggccttctgtccacctacgtgagcattctagaagtcggaggagcattcggccatcgattcaaaggtcttatcgagttcctggggctcactaccctgatcgtcaccgacatcgatagtgttatggcgcctgcggcagccgatccagtagcccccgacgatgaggatgatcccgatgccgatcccgaccttgaagaagcagccgaagatcgagccgcagttcgaggcggacgcaaagcatgcatggccaatgagcccggagcattgacgtcaaatcaaacgctaatccaatggcttcccgggcgcagcaccatcgccgatttgctcaacgcgactgtcgaacagcgcattcaagcccgcactgttgctagcgatgcgttgatccgcgtctcatatcagacatcggttaacgcaagttggcgtgggacgacagctgccatggtcggtcgaacattggaggaagccttcgcgctcgagaatctggcctggtgtcaggatgcggcacgcgccgaaatccgcctgcgcgttcgaggctgcaacaaattgtcccttgaacagatcgcacaaagtctgcatcgcaaaatcaagagcgcgaatttccgcaagaccgactttgcattggcgcttctctcacaggacccatccgcgtggacggtgccagcctacatctctgaaggtcttctctggctcgagcatgaggtggttccccatcctcccgaaatcgcggctcctccgatcaacgcaggagcagtagcatga

SEQ ID NO: 75061 - DNA, 1887 bp, Burkholderia pseudomallei MSHR983
atgacactccgtgctagccaacctgatacaccggcagatctggaactgagagcgtgtctggatgaacgtcctcaacgaagctttgtcatggtcgcaggagctggatcaggaaagacgacgtcgctcgtcaaagccctcactcatcttgcgcagacacggcgacgcgaactcaagatgcgcggtcagcggattgcctgtattacgtacaccgaggttgcgaccaaggaaattagcggagatgtcggagatgacgggttgttccatgtctcgacctttatgtggtcggttgtacgcccgttccaaatcgatctcaagacgtgggtgatctcgcgcattcacgaacagatcgctgaggcgcgagaacactacaacagaccgcgcacacgccccgccactcggcaacgtttggagagagaaattgctcgccatgagcgccacctagaagaggtagcacaccgaacgcacttttcgtatggggcgggacgcgacttcgcgcgaggtgtcttgggccatccagacgtcattgcggttgcggtggaattaatcgagcaaagccaattactacgcgacctcatcgccagtcattatccggttctctttgtcgacgagagccaagatacccgtgcggatgttgtggccgcatttcgcctcatcgccgaaactactcctcttgagttttgcctaggcttctttggtgacccaatgcagaagatctatgccgatggcgctggcgcgatagatgcccctgctacgtggagccaaatcaccaagccggagaacttccggtgcccgcaacaagtactcaggatagtgaatggaatccgcagagccggtgatggattggagcagacgcgcggcaggatgacgcgcgttgacgatgttttgatcccagtcgccgggactgcgagattgttcctactgctggcagatgagcgtcggtcggcgaagctatcaagggttcgcgaatggctccgacggacgaacaatgatgagctctgggttagcgaggatcgcgccgcagacgttcgaacattggttgtcgttcatcgtatggccgcgtcgcgcctaaactttcccaacttgtatgcggccttgaacgacaactctccgcagaatttcaaagagggtttgaaagatggcagtgcgtggccactccgtccattcttgacatacctactaccgctagcaatggctgtccgagatcgccgcgactttgacgcaatgacgttgttgcgttcacagtgtttgctgttgagctcggtgggtctggctggcaatggtgcgcccgaagtactaagaaatctacgagcggccaccgagggccttgcaacgctcatgcactcaaacgacgcgacgctcaggaccgtgctgattttcgcatccaacacggggttgctgcagcttgacgaggcctggtccaagtatcttgatgacgatgctgaggcccttgctgccgatgacgatcccgaagtgccgtccattatcgccttcctgaactgccaagttagcgagctgagaggatatcgccactacctcgaggacctttccccatttgccactcagcaaggtgtcaagggcgctgaattcgaacgtgtccttgtgttgatcgacgacgacgaaggaagaggccagcgcctcttctcgtacgaaaaatatttcaacattgctccgctttcggagaccgatcaagagaacatcgatgcaggcgacgacaatgtgatcgatcgaacccggcgcctcttttatgtctgctgctcacgcgcgaaacgggatctggcggttgtaatgttcgttggcgatctcgcggccgcccgagggaagatagaggaaagcgggatttttatgccggacgacatcgttgatgaagccgccctggaactcgactga

SEQ ID NO: 75062 - DNA, 2250 bp, Burkholderia pseudomallei MSHR4304
atgaaaataaagacgataaaaataaagaacttccgcttgctgcataatatttctctgcagcttgaagacgagaccacagtcgttgtcggacgtaacaactgcgggaagacctcgctcaccgacatcatccgcaaatttctatcggaacggagcacgttcgagatcgcggacttttcgagcgcttgctacgacaaattctgcgcggcgcaccgtgcacacctaaaaggagccggcgacgaagaggttcgcgcactcgtaccgtcaatcgaactgcggctacacgtgagcttcgacccgacagttcctgagttcggcccgctccgcgaattcgtcatagataccgacgacaactgcacggaggccgtaattgtgtgctcgcggagcctcgccgatggccggattgcggatttgttcgagggacacgaggaagccgtcctgcacggggccgacgaatcgcactccgctggcgatcgcctcgcgctcttccgcagcttggccgaccgtgtgcctacgctcttcacgacgcgaatatgggccgaggaccctcaggaccctacgaacacgcgtgacgtgacgcccaaagcggtcacaaacctgctgtcgctcggctttgtgaatgcgcagcgtgcactcgatagcacgggtggccgtgatacagacgtgctggcaaaggtgctggagggtctattccaaagtgcctccgtctcgacggcggacggctcccaaaagaacatagcggacggcctcaaaaaagccgttgaggaaatccagtccgggatggacacggatttcaagaatgagctcgcgaagctcatgcccgcgattgagcaattcgggtacccgggcctagataatgtgccgctacagccggagacgaagctcgaggtcggcaaacttctgtccaacttcacgaaggtacagtacgccggttacagcggcgtgcagctgcccgagtcctacaacggactcgggtatcgcaaccttctctatatcctactcaagatcgttggcttcttccgcgagtatcgggcgcatgtgaacgcgcccggcctgcagctcatcgtgatcgaagaacccgaagctcatctgcatcctcagatgcaggaggtcttcatccggcagttgccggagatcgttaaaaagctctgcgccttggagggtgaaaacgtctcgtggccggtacaattcgtcgtctcgacgcactctccccatgtcgcaaatgaagctcgctttgacacgatccgctatttcgccgtgacgtcgacggatctaccggttggggtgcgctgcactcaggtcaaggacctcagcagcgatcttgccggattgaaaggcccgacctctgacttcctgcaccagtacctcacgctaacgcgctgcgatctcttcttcgcggataaggcgatcctgattgaagggacgacggagcgactgatgttgccccaagtgatacgcgccctcgacgatgccgatccgtccctgaagcttcgcagccagtacattacgatcatggaagtcggcggagcctacgcacagctcttcatcccgctcctcaaattcctgggcctgcgcagtctaatcatcactgatctcgacgctgtcaaacgcaacgccaagaagaaactcgaagcttgcctcgtccatgagggtgagaccacgagcaattcctgtatcaagcactggttcagctcggccgaagctgcggccccggagcccaatgcacctgccgataaaccggccacaatgcctgtaaccacgccgcaggctgcttcgccagtccccgtcccggcgacggcaggggtaactgatgacgacgacgaggaagaagttgaggatggagcgacgttgttccctctgtcaaccgcattggcggcagacaacgctgccaagactcgcgggagtctgcgcctcgcatatcaggtcccggaagcggcggacgggccgtgtggccggacgttcgaagacgcgttcattctcgcgaaccagaccttcttcggcattaccggcgcgacgaatgacgcgctcgcgaaagccgcgcagaacaaggccgcgaagcaaaagaagtccaagttcgcattgacctacgcgattgagaaaaccgactgggtcacgccgcgatacattgaagagagcgttcgctggctcgccgcgagcaacaccgccgtcgctgatcctggcgtggcgctcgctgccgaggcccaggccgccaatgcgctcgtcgacaagccaacctccggtgacgcaacgtga

SEQ ID NO: 75063 - DNA, 1506 bp, Burkholderia pseudomallei MSHR4304
atgatcatcgcgcagactgatggtaatccagcgatctactgcgacacgacccacgcgttcgcgtggatgctcgtcagcccgtttcagaaacggcttcgcgagcttgtccgcacgctgccaggctgggccgatcgtgtcgaagaactcgacgccgcgaacatcactgccgttggatacgcactcggtcgccgctccatcgaagatggcacggcgaacctgcaccacgacgacatctttccggtgtttatcgagctcatgaggtccgcgaagttccgcaacgcagcggcgtcgcgtttcccaatcatcctcgtggacgagtaccaggacacgaacgccaagctcgtcgaatgtctcaaggaccagttcatcggcaaaccctacgcaccgcaattcggcttcttcggtgaccactggcaaaaaatctatggcgatggctgtggttcgatcacacacgacgcgctgaagcgcatctacaagaaggcgaacttccgtagtgcgaagccaatcgtcgatagcttgaatttgatccgcccggacctcgcccaggcggtcaaagaccctgcagcgccgggcgaggttcacgtcttccacaccaacggatggggcggaaagcggcttacggcgaaccactggcaaggcgatctccctgcgaccgaagccgcgcaagcgctcaggaatgtccgcgccgagttggaaagcgttggctgggattttgccggcgacacgaaggtcctgatgctaacccaccgggcacttgcgacggagatgggttacggctcgatgcggaccgtcttcgcgttcaacgattccttcacgcgtaaagccaacgaggtcatcgcgtacttccacgagcatcttgaaccggcggcgcgggcctacctgtccaaacgcttcggcaagatgttcgaagcatttgatgccgagcgtccagtgatgaattcgccggcagacaagggcaggtggacgaacgccatgagacggctctgcgaacttcgtgacacaggcacggttggcgacgtgatcgcacatctgtcctctacgggcctgccgatactctcagacgcagtcgtgcgccaggagagagcgcttgcggacgcgcttgcaggcggtgagccgctgacgggacgcgtcaaggaactccatgcacttcacgcggtgtcgtaccaagagatcatcgcgctctgcaaatatctcgatggtcactcgccttttgaaaccaagcatggggtaaagggcgaccagttcgaaaatgttctagtggtattcgggcgcggctggaacgagtacgatttcaatctctatcttaagatggccgggaatcctgacctaatcggtacgcaaacggcggactacgagcgttaccgcaacctgttctatgtcgcagtctcgcggccgaagaggcgcttggcgctgctcttcacacatcggcttgagcctagcgcaatggcaacgctatcgaaatggttcacggggtacccgatccgggatatcggcccggcgctatga

SEQ ID NO: 75064 - DNA, 1947 bp, Burkholderia pseudomallei MSHR4300
gtgaaacttgtccgcctgcgcttgttcaacttccgatcgttcggttcagatctcgccgagatcgaactggacgacatgacatttttgctcggtcccaacgggacaggcaagactgctgttctccaggcgcttgcccgcatgttcagcctagatccaagtcaacgcaaggtcagtcgatccgatttccatattcccgtggatgaagcccccgaggacgcgccggatgagcggaaactttggatcgaggcggactttgagttcccggaattaaatgaggatgatgctggagaggaggagttgcctgctgttccgggtaactttgcccacatgcaattgttagctgaagatgggcccgttcaagtgcgctttcgtctcaaagcaacgatcgaccaggacggagacattgaggaaagcttcacgtacgtcaccaaagtcggtgacgatggaagcccgctcgaagaaagccgggtctcaaagcaggatcggaatgcaattcaggtgcactaccttccagcccggcgcgaccctgcagaccatatctcctactctgccaacgcgcttctcgggcgcgctctgcgatcggcagactggagtacggagcgggagcagatcagcgtattgacgggacaaatcagcgagtcgctgaccggaaacgctgcaatcgaaggcatcgccgaagcgctgacaggccaatggagcgatctgcacaagggtgcatactactccagcccatccgtctcgttcgcgcgcaacgaaatcgagaacctcctccggcatctaagcgttggtttctcgccggggcacggcgaatcggttgttgacttctccagactcagcgacgggcagcaatctcttctctacgtgtctctcgtgcttgcgatgcatagcatcggcagcaaggttctaagcggcgagcttggaacggctttcgatatcgacaagctgcggcccgccgtattcaccttgattgcaatcgaggaacccgagaacagcctatcgccccactaccttgggcgcgtcgtcagggcactgacagcattcgccggggatcaggatgctcaggcactcgtggcgacgcattcgcctgcgctcctgcggcgtgtgtccccggactctgtacgatacttgcgccttaacgagaatcggaaaacgattgtcaaacgcatagagcttcccgaagacgagtccgcgcaaaagtttgtccgcgaaggtgtgcaggcttttcctgagctctacttttcccgtctggtcgtgctcggcgagggagacagcgaggagatcgtcctgcctcggttactggcagcccgaggcatcctcgccgatgacgcgtccgtctccgtcgtgcctctaggcggacggcacgtcaatcatttctggcgtctgctacatggactggggattccacacgtcaccctgctggacctagatctcgcacggtatcaaggcggatgggggcgcatccggtatgcagcgaatcaactcctgaaatacgcagatgtctcagacaacgatctgacgcaggaggagatcgacggcatccccaaatggaatgacgagcaaggcatccttattgacgacgatgggtggatcgaacggctggagaacttcggggtcttcttctcagcaccgcttgatctcgacttcctgatgatgacgacgtacccggatgcgtacctcatcgaagccggtgatctgcagaagccggatgaggagacgatcaagtccgtacttgggaaaaagcatgatgtactgggcggtcaatactcggaggaggagcagagctacttcgacgcctaccacgcaaaattcaagctcggtagcaaacccacttggcacattcgagcgatgtcgagcatggatgaccaagagttagtggatgaaatgcccgaagtgctcgaacggatgtttgatcgcgtcgaatccgcgcttgaggacctgcccgaatga

SEQ ID NO: 75065 - DNA, 1662 bp, Burkholderia pseudomallei MSHR4300
atgatccgcgttgatagatggtcgccgtcggatggcctctcgcttgaaccgaacgcacttacggcggcgaaggagaccggtcgaagtctagccctgacagccggacccggcgcaggaaaaaccgaaatgcttgcgcagcgcgcagacttccttctccgcacggcaacctgtcggtacccgaaacgtatcttggcgatatcattcaaggtcgatgcaagccaaaacttgaaggcacgagtaagaaagcgttgcgggccggaattggcggcacggctcgacagccacacgtttcacgcgttcgcaaagcgaattatcgaccgattcagacccgtcctgacggggagagatgctctcgattcagactattctatcggtccagtgagagtccaaagacgggtcatcacgttcggcgatatggtcccgcttgcagtcacgatagtggaatcaagccagcttgcgcgcaacgcaatcaggcagacatacagtcatgtgtttctcgacgagtttcaggattgtaccgacgtgcaatacagattgatcaaggcatgcttccatggtactcaagcgaaactgacagctgtcggcgataccaagcagcgcatcatgggctgggccggtgcgcttgagggcatatttcaaacctacgcgcacgactttgccgcactgcctctcaacctttatcagaactttcgctcaaagccgaggctccgtcgcatgcagaacgcgatggtgcgtgtaatggaccccccggcagcactcaacgacgaggacattgcaggggaagaaggagagattgagatccttcgctttgacgatgatgatcgtgaggcaatctacttggctgacgcgtgtagagactggatcgacgaggagggcattgacccctccgaaatagccgtgctcgtcagtaagcaacagaatctgtattgtcaaaaattgcgtactgcgctggaagctcgtggagttccctttcgcgaggaagattcgacacaagacctggcatccgatccagtggcctgtctgatcgtcgacttcctgctcgtcgcgagcggaagccgtcaacccgcaccatatggcagattgctcgatcttgtggtgttcagccatggttttgatgaggaacgcgagtaccaagcgcgttcaagatgggatcgctttgttgctgatgtaggtcaaagaattgcggatggacgaacaaatcttgcggaagaagacgaacttgccggcattgtcgacgaactcattcgcatcgtcgggcgcgacgcagtagttgcactatcgcccgattacgcccacggagatcgattgcagcaacagattgaggcaaccatcaaccgggcgcaccatctgctcaggggcggcgacaacgtagcaacggcgcttgcgtcgttctctggtgaccgggctgtgaggatcatgtctattcacaagagcaagggcctagaatttgacactgtggttgtgctaggcgtcgagcgtgagacgttctggggcaacgaggtggcggagcgctcagcctacttcgtcggtatctcaagagcgaaacgccgactgttcctgactgtttgcgaacgaagggagcgccccgatggggcgagcaactggaggaccggtagaaccgaacacaacgagtttgttgggtacgccgaaccctatctgtag

SEQ ID NO: 75066 - DNA, 1809 bp, Burkholderia pseudomallei MSHR4300
atgttcagcctagatccaagtcaacgcaaggtcagtcgatccgatttccatattcccgtggatgaagcccccgaggacgcgccggatgagcggaaactttggatcgaggcggactttgagttcccggaattaaatgaggatgatgctggagaggaggagttgcctgctgttccgggtaactttgcccacatgcaattgttagctgaagatgggcccgttcaagtgcgctttcgtctcaaagcaacgatcgaccaggacggagacattgaggaaagcttcacgtacgtcaccaaagtcggtgacgatggaagcccgctcgaagaaagccgggtctcaaagcaggatcggaatgcaattcaggtgcactaccttccagcccggcgcgaccctgcagaccatatctcctactctgccaacgcgcttctcgggcgcgctctgcgatcggcagactggagtacggagcgggagcagatcagcgtattgacgggacaaatcagcgagtcgctgaccggaaacgctgcaatcgaaggcatcgccgaagcgctgacaggccaatggagcgatctgcacaagggtgcatactactccagcccatccgtctcgttcgcgcgcaacgaaatcgagaacctcctccggcatctaagcgttggtttctcgccggggcacggcgaatcggttgttgacttctccagactcagcgacgggcagcaatctcttctctacgtgtctctcgtgcttgcgatgcatagcatcggcagcaaggttctaagcggcgagcttggaacggctttcgatatcgacaagctgcggcccgccgtattcaccttgattgcaatcgaggaacccgagaacagcctatcgccccactaccttgggcgcgtcgtcagggcactgacagcattcgccggggatcaggatgctcaggcactcgtggcgacgcattcgcctgcgctcctgcggcgtgtgtccccggactctgtacgatacttgcgccttaacgagaatcggaaaacgattgtcaaacgcatagagcttcccgaagacgagtccgcgcaaaagtttgtccgcgaaggtgtgcaggcttttcctgagctctacttttcccgtctggtcgtgctcggcgagggagacagcgaggagatcgtcctgcctcggttactggcagcccgaggcatcctcgccgatgacgcgtccgtctccgtcgtgcctctaggcggacggcacgtcaatcatttctggcgtctgctacatggactggggattccacacgtcaccctgctggacctagatctcgcacggtatcaaggcggatggggccgcatccggtatgcagcgaatcaactcctgaaatacgcagatgtctcagacaacgatctgacgcaggaggagatcgacggcatccccaaatggaatgacgagcaaggcatccttattgacgacgatgggtggatcgaacggctggagaacttcggggtcttcttctcagcaccgcttgatctcgacttcctgatgatgacgacgtacccggatgcgtacctcatcgaagccggtgatctgcagaagccggatgaggagacgatcaagtccgtacttgggaaaaagcatgatgtactgggcggtcaatactcggaggaggagcagagctacttcgacgcctaccacgcaaaattcaagctcggtagcaaacccacttggcacattcgagcgatgtcgagcatggatgaccaagagttagtggatgaaatgcccgaagtgctcgaacggatgtttgatcgcgtcgaatccgcgcttgaggacctgcccgaatga

SEQ ID NO: 75067 - DNA, 1662 bp, Burkholderia pseudomallei MSHR4300
atgatccgcgttgatagatggtcgccgtcagatggcctctcgcttgaaccgaacgcacttacggcggcgaaggagaccggtcgaagtctagccctgacagccggacccggcgcaggaaaaaccgaaatgcttgcgcagcgcgcagacttccttctccgcacggcaacctgtcggtacccgaaacgtatcttggcgatatcattcaaggtcgatgcaagccaaaacttgaaggcacgagtaagaaagcgttgcgggccggaattggcggcacggctcgacagccacacgtttcacgcgttcgcaaagcgaattatcgaccgattcagacccgtcctgacggggagagatgctctcgattcagactattctatcggtccagtgagagtccaaagacgggtcatcacgttcggcgatatggtcccgcttgcagtcacgatagtggaatcaagccagcttgcgcgcaacgcaatcaggcagacatacagtcatgtgtttctcgacgagtttcaggattgtaccgacgtgcaatacagattgatcaaggcatgcttccatggtactcaagcgaaactgacagctgtcggcgataccaagcagcgcatcatgggctgggccggtgcgcttgagggcatatttcaaacctacgcgcacgactttgccgcactgcctctcaacctttatcagaactttcgctcaaagccgaggctccgtcgcatgcagaacgcgatggtgcgtgtaatggaccccccggcagcactcaacgacgaggacattgcaggggaagaaggagagattgagatccttcgctttgacgatgatgatcgtgaggcaatctacttggctgacgcgtgtagagactggatcgacgaggagggcattgacccctccgaaatagccgtgctcgtcagtaagcaacagaatctgtattgtcaaaaattgcgtactgcgctggaagctcgtggagttccctttcgcgtggaagattcgacacaagacctggcatccgatccagtggcctgtctgatcgtcgacttcctgctcgtcgcgagcggaagccgtcaacccgcaccatatggcagattgctcgatcttgtggtgttcagccatggttttgatgaggaacgcgagtaccaagcgcgttcaagatgggatcgctttgttgctgatgtaggtcaaagaattgcggatggacgaacaaatcttgcggaagaagacgaacttgccggcattgtcgacgaactcattcgcatcgtcgggcgcgacgcagtagttgcactatcgcccgattacgcccacggagatcgattgcagcaacagattgaggcaaccatcaaccgggcgcaccatctgctcaggggcggcgacaacgtagcaacggcgcttgcgtcgttctctggtgaccgggctgtgaggatcatgtctattcacaagagcaagggcctagaatttgacactgtggttgtgctaggcgtcgagcgtgagacgttctggggcaacgaggtggcggagcgctcagcctacttcgtcggtatctcaagagcgaaacgccgactgttcctgactgtttgcgaacgaagggagcgccccgatggggcgagcaactggaggaccggtagaaccgaacacaacgagtttgttgggtacgccgaaccctatctgtag

SEQ ID NO: 75068 - DNA, 2250 bp, Burkholderia pseudomallei MSHR4308; identical to SEQ ID NO: 75062

SEQ ID NO: 75069 - DNA, 1740 bp, Burkholderia pseudomallei MSHR4308
gtgaatgagaacacccgatccaacccagctgaagccgccgctgccactgcatgggaagcgctgaaagattgcctcgacggcggatcaagctttgtgtttgaggcgggcgctggcgccggtaagacctactcgctgattgctgcgcttcgctaccttctgcaaggtaggacacgggagcttcaacgcaggcaccagcaagtcgcgtgcgtcacctacacgaatgtagcgcgggatatgatcatcgcgcagactgatggtaatccagcgatctactgcgacacgacccacgcgttcgcgtggatgctcgtcagcccgtttcagaaacggcttcgcgagcttgtccgcacgctgccaggctgggccgatcgtgtcgaagaactcgacgccgcgaacatcactgccgttggatacgcactcggtcgccgctccatcgaagatggcacggcgaacctgcaccacgacgacatctttccggtgtttatcgagctcatgaggtccgcgaagttccgcaacgcagcggcgtcgcgtttcccaatcatcctcgtggacgagtaccaggacacgaacgccaagctcgtcgaatgtctcaaggaccagttcatcggcaaaccctacgcaccgcaattcggcttcttcggtgaccactggcaaaaaatctatggcgatggctgtggttcgatcacacacgacgcgctgaagcgcatctacaagaaggcgaacttccgtagtgcgaagccaatcgtcgatagcttgaatttgatccgcccggacctcgcccaggcggtcaaagaccctgcagcgccgggcgaggttcacgtcttccacaccaacggatggggcggaaagcggcttacggcgaaccactggcaaggcgatctccctgcgaccgaagccgcgcaagcgctcaggaatgtccgcgccgagttggaaagcgttggctgggattttgccggcgacacgaaggtcctgatgctaacccaccgggcacttgcgacggagatgggttacggctcgatgcggaccgtcttcgcgttcaacgattccttcacgcgtaaagccaacgaggtcatcgcgtacttccacgagcatcttgaaccggcggcgcgggcctacctgtccaaacgcttcggcaagatgttcgaagcatttgatgccgagcgtccagtgatgaattcgccggcagacaagggcaggtggacgaacgccatgagacggctctgcgaacttcgtgacacaggcacggttggcgacgtgatcgcacatctgtcctctacgggcctgccgatactctcagacgcagtcgtgcgccaggagagagcgcttgcggacgcgcttgcaggcggtgagccgctgacgggacgcgtcaaggaactccatgcacttcacgcggtgtcgtaccaagagatcatcgcgctctgcaaatatctcgatggtcactcgccttttgaaaccaagcatggggtaaagggcgaccagttcgaaaatgttctagtggtattcgggcgcggctggaacgagtacgatttcaatctctatcttaagatggccgggaatcctgacctaatcggtacgcaaacggcggactacgagcgttaccgcaacctgttctatgtcgcagtctcgcggccgaagaggcgcttggcgctgctcttcacacatcggcttgagcctagcgcaatggcaacgctatcgaaatggttcacggggtacccgatccgggatatcggcccggcgctatga

SEQ ID NO: 75070 - DNA, 1905 bp, Burkholderia pseudomallei MSHR1357; identical to SEQ ID NO: 75050

SEQ ID NO: 75071 - DNA, 1668 bp, Burkholderia pseudomallei MSHR1357
gtgatcgcagcggatacttggcgtccagcagatggcttgacgctcgagcccaacgccttgcgcgcggcgaaggaagcgaaacgttgccttgcgctgacggcagggccgggggcgggcaagacagaaatgttagcgcagcgcgccgattttctgttgcgtacagggacctgcccctatcccaaacggatactggctatctcgtttaaagttgacgccagcaaaaacctgaaggagcgcgtgaagcgccggtgcggtccagatatggccgcgcggttcgacagctacaccttccatgccttcgcgaagcggataattgatcggtttcgtccggtactaaccgggcaagatgccctggatgccgattacaggattggtgacagacgggtcgcgcgacgccagatcgaatttacggatctggtgcctctggctacgcagattttgagaatctcggccgttgcccgtcgtgctgtgcgtctgacctacagcgatgtcttcttggacgagtttcaggactgcactaaccatcagtacgagttggtgaagattgcctttcgaggaacggctatccgtcttacggcggtgggagacacgaagcagaagattatgggatgggcgggcgctttagacggtatcttccagacctttgcaacagacttcgatgcggtgccgctcaacatgtaccgcaacttccgttcggagccccgcctgttgcgcatgcagaacgagatcatccgcgtgatggacccatcgtctgttatgcccaacgaacaacttggaggcgaggaggggctcatcttcgcgtggcgttttccagacagccagcaggaagcagagtttgtgactaacgcaatcgatggctggatcaatcatgacaagctcgcaccgtcggaaatcgcaattctggtcgcccgacaacccgacctgtatgccgatcatctgatggccgcaatggagcggcgaaacatcccattccgaaatgagcaacagatccaggacatttcggtagaaccggccgcaagactcattgttgactatctatcttgtctgtacgggcagcgcgcacccaaggcttggattcgcctaatggaccagttggttcctttcggtgatgaagacgtccaggccaacatgcggcgaaacacccagcgcttcatagcggagcagcggaaaaaggctgttctcgtcgaattgttgggcgagcccgcaacggattggtgggagtcggtacgtgaattcttgcgccatgtggggatcgagaccttgtcagcactttcgccggactacgagtccgcggctcgattgaaggaggtcatcgctgacaccaaggctcggatcgaagaactgctgaatatcgagcctgacttgccgaaggcactagagcgtttttccgacgatcaggcagtacgaatcctcaccatacacaagagcaaagggcttgaattcgattcggttgtcattctcggtgtcgaaaaccagactttttggggtaacccagatgcagagcgatgtgcgttttttgttgcggtttcgcgggctaagaggcgtcttatcttgaccgtttgtgattgtcggcaaacgcctccgtccaatccctatcggtggcaggaaaatagaacaactcataacgaattcatggcttacgccacgccattcctcagcccccaatga

SEQ ID NO: 75072 - DNA, 2250 bp, Burkholderia pseudomallei MSHR3016
atgaaaataaagacgataaaaataaagaacttccgcttgctgcataatatttctctgcagcttgaagacgagaccacagtcgttgtcggacgtaacaactgcgggaagacctcgctcaccgacatcatccgcaaatttctatcggaacggagcacgttcgagatcgcggacttttcgagcgcttgctacgacaaattctgcgcggcgcaccgtgcacacctaaaaggagctggcgacgaagaggttcgcgcactcgtaccgtcaatcgaactgcggctacacgtgagcttcgacccgacagttcctgagttcggcccgctccgcgaattcgtcatagataccgacgacaactgcacggaggccgtaattgtgtgctcgcggagcctcgccgatggccggattgcggatttgttcgagggacacgaggaagccgtcctgcacggggccgacgaatcgcactccgctggcgatcgcctcgcgctcttccgcagcttggccgaccgtgtgcctacgctcttcacgacgcgaatatgggccgaggaccctcaggaccctacgaacacgcgtgacgtgacgcccaaagcggtcacaaacctgctgtcgctcggctttgtgaatgcgcagcgtgcactcgatagcacgggtggccgtgatacagacgtgctggcaaaggtgctggagggcctattccaaagtgcctccgtctcgacggcggacggctcccaaaagaacatagcggacggcctcaaaaaagccgttgaggaaatccagtccgggatggacacggatttcaagaatgagctcgcgaagctcatgcccgcgattgagcaattcgggtacccgggcctagataatgtgccgctacagccggagacgaagctcgaggtcggcaaacttctgtccaacttcacgaaggtacagtacgccggttacagcggcgtgcagctgcccgagtcctacaacggactcgggtatcgcaaccttctctatatcctactcaagatcgttggcttcttccgcgagtatcgggcgcatgtgaacgcgcccggcctgcagctcatcgtgatcgaagaacccgaagctcatctgcatcctcagatgcaggaggtcttcatccggcagttgccggagatcgttaaaaagctctgcgccttggagggtgaaaacgtctcgtggccggtacaattcgtcgtctcgacgcactctccccacgtcgcaaatgaagctcgctttgacacgatccgctatttcgccgtgacgtcgacggatctaccggttggggtgcgctgcactcaggtcaaggacctcagcagcgatcttgccggattgaaaggcccgacctctgacttcctgcaccagtacctcacgctaacgcgctgcgatctcttcttcgcggataaggcgatcctgattgaagggacgacggagcgactgatgttgccccaagtgatacgcgccctcgacgatgccgatccgtccctgaagcttcgcagccagtacattacgatcatggaagtcggcggagcctatgcacagctcttcatcccgctcctcaaattcctgggcctgcgcagtctaatcatcactgatctcgacgctgtcaaacgcaacgccaagaagaaactcgaagcttgcctcgtccatgagggtgagaccacgagcaattcctgtatcaagcactggttcagctcggccgaagctgcggccccggagcccaatgcacctgccgataaaccggccacaatgcctgtaaccacgccgcaggctgcttcgacagtccccgtcccggcgacggcaggggtaactgatgacgacgacgaggaagaagttgcggatggagcgacgttgttccctctgtcaaccgcattggcggcagacaacgctgccaagactcgcgggagtctgcgcctcgcatatcaggtcccggaagcggcggacgggccgtgtggccggacgttcgaagacgcgttcattctcgcgaaccagaccttcttcggcattaccggcgcgacgaatgacgcgctcgcgaaagccgcgcagaacaaggccgcgaagcaaaagaagtccaagttcgcattgacctacgcgattgagaaaaccgactgggtcacgccgcgatacattgaagagagcgttcgctggctcgccgcgagcaacaccgccgtcgctgatcccggcgtggcgctcgctgccgaggcccaggccgccaatgcgctcgtcgacaagccaacctccggtgacgcaacgtga

SEQ ID NO: 75073 - DNA, 1740 bp, Burkholderia pseudomallei MSHR3016
gtgaatgagaacacccgatccaacccagctgaagccgccgctgccactgcatgggaagcgctgaaagattgcctcgacggcggatcaagctttgtgtttgaggcgggcgctggcgccggtaagacctactcgctgattgctgcgcttcgctaccttctgcaaggtaggacacgggagcttcaacgcaggcaccagcaagtcgcgtgcgtcacctacacgaatgtagcgcgggatatgatcatcgcgcagactgatggtgatccagcgatctactgcgacacgacccacgcgttcgcgtggatgctcgtcagcccgtttcagaaacggcttcgcgagcttgtccgcacgctgccaggctgggccgatcgtgtcgaagaactcgacgccgcgaacatcactgccgttggatacgcactcggtcgccgctccatcgaagatggcacggcgaacctgcaccacgacgacatctttccggtgtttatcgagctcatgaggtccgcgaagttccgcaacgcagcggcgtcgcgtttcccaatcatcctcgtggacgagtaccaggacacgaacgccaagctcgtcgaatgtctcaaggaccagttcatcggcaaaccctacgcaccgcaattcggcttcttcggtgaccactggcaaaaaatctatggcgatggctgtggttcgatcacacacgacgcgctgaagcgcatctacaagaaggcgaacttccgtagtgcgaagccaatcgtcgatagcttgaatttgatccgcccggacctcgcccaggcggtcaaagaccctgcagcgccgggcgaggttcacgtcttccacaccaacggatggggcggaaagcggcttacggcgaaccactggcaaggcgatctccctgcgaccgaagccgcgcaagcgctcaggaatgtccgcgccgagttggaaagcgttggctgggattttgccggcgacacgaaggtcctgatgctaacccaccgggcacttgcgacggagatgggttacggctcgatgcggaccgtcttcgcgttcaacgattccttcacgcgtaaagccaacgaggtcatcgcgtacttccacgagcatcttgaaccggcagcgcgggcctacctgtccaaacgcttcggcaagatgttcgaagcatttgatgccgagcgtccagtgatgaattcgccggcagacaagggcaggtggacgaacgccatgagacggctctgcgaacttcgtgacacaggcacggttggcgacgtgatcgcacatctgtcctctacgggcctgccgatactctcagacgcagtcgtgcgccaggagagagcgcttgcggacgcgcttgcgggcggtgagccgctgacgggacgcgtcaaggaactccatgcacttcacgcggtgtcgtaccaagagatcatcgcgctctgcaaatatctcgatggtcactcgccttttgaaaccaagcatggggtaaagggcgaccagttcgaaaatgttctagtggtgttcgggcgcggctggaacgagtacgatttcaatctctatcttaagatggccgggaatcctgacctaatcggtacgcaaacggcggactacgagcgttaccgcaacctgttctatgtcgcagtctcgcggccgaagaggcgcttggcgctgctcttcacacatcggcttgagcctagcgcaatggcaacgctatcgaaatggttcacggggtacccgatccgggatatcggcccggcgctatga

SEQ ID NO: 75074 - DNA, 1872 bp, Burkholderia pseudomallei TSV32
atgtctagttatgcgccagaaagcggcgttgccatcaccgacgttcgtgtcagcaactttcgctcgttggccaatattgaggtcgagctcaacgacttgaccgtgctcattggagcaaacaatgctggaaaaacgagcttccttgacgcgatgttcgcggctatcggctccgggcgcaagctattggggcaagacgacattcggctgatgcacggcgaggcgatgccgccaaaagatcggcgcgttgtcgtcgacatccggattcgcccgatcgacgaaaacggaaaggtcgtggacaagttcccggagggcagcttctggacggctttgtgggggcccggaatcgtgctggatgatcacgattttgatgagttcatggcctttcgcacgacgctggcttggcgggtggaaaaggcggattacgtcgtcgaaaggctctttctcaaagaatggaagtcatttgaggactggattgatacgccgacgcaagacaagccaatcacggcggcccaacttgaacccgtcgctttgcattacatcgacgccaagcgcgacctagaggacgacttgcgtcgccaaggctcgttctggcgacggatgaccgaggatcttggcttgtctggcgacgaggtggctgaattggaggctgcgctaacggggattaaccagcagatcgtagacaaaagctcgatgctccaacggctgaagacgaacttgtcggacttgcaggcggtggtttccgccgacagcgctggcatcgacatcgctccggtcgcgcggaaactgcgagacctgtcgaaaggcgtcgacgtgtcgttctcgactgcgggggcgcagtcgttcccgctcgcgcgccacgggatgggcacgcggagcttggcctcgctgctcgttttcagggcatttaccgcttggcgcggggacgtggcggcgaagaacaacgacaaattacattctgtcctggccttggaagagccagagtcgcaccttcatccgcaggcgcaacggtcgctgttcgcccacatcaagaaaatcaaggggcagcgcgttgtcagcacccattcaccgtattttgccggccaagctcaattagaggaccttcggctattcatcaagaagggcggagatactggagcgcgtaagcttgatttgtcgaagctcgagaaggcagacgatatccgcaagttgcaggagacggtcatcgagtcgcgaggggacatcctctttgcgagggccgtggttttgttcgaggggcagacggaagagcaggcactgccgatttgggccgaagcgtattggggagcgtcgattcacgaattgggcttcagcttcgtgcgcgcgaacggaaccgactacttcccgtttatctggcttgcgaagagccttgaaatcccttggtacgtcatgggggacggggagcagaagccgatcaacgacctggaggcggccttgaagaaggcggggcagccagacatagcttcgtctcccaacgtcgttgtcgtgtcttctggcaaaaacttcgagacgcaattattggaggacggctatctcgccgagatcgaaaccgccctgaacgaagcgcacggccgggaatccttcttggacgaattcatcgacaagcatcacgggctggaattggcgaagggaaagggtgtcagggactacaagagtgaaggcggcagaactcgcgccgccgccgacgcgatgaaggcttccaaaacacgcctcgccaagccgttagcccggacgatctctggcttgaaggatccggagagacgtttcccgaagcacatcgaaaggctgttttcggtcatcggagagaatcacggaattcaaaagctggcagtagaggcggaggtcgaggaacaatga

SEQ ID NO: 75075 - DNA, 1854 bp, Burkholderia pseudomallei TSV32
atgaacagtccaaccaagttgcgcctgtcgacgctgcaagcccaggtcgtcgaacacgtcgacggcgcattgctcgtggtagccggcccgggttccggaaaaacccgcgtgttgacggaacgagtccgctcacttctcacgagtgttcctggccactttcgtgtgctggcgctgacgtttaccaacaaggccgcggacgagatgcgtgatcgcctctccgacttgggtgaaaatcggcagcgcgcattcattggcaccctccacagcttctgcttggaaatgctggtggagcgagggaagcttgtgggcgtggaaggcgagccgcacatctttgaacagcataaggaccggaaggaaattttgttggaggcgattcggcaggaccctgttcttgacgaggaggtcaatcagatcgtcgatcgcaaagagcgcaatcggcgggtcgacaactggcttcaaatgatctcgcgcgtcaaggcgcaccccatcacttgcgccgtgctcagtgatgagcttgacaagcgggtcctggatgcctatgacgctgggttgcgtgcttgtggagcttacgacttcgacgatcttttgctgcttggttaccggctgctgacgaacaatcccaagctggcggatttttatcggaggctttacaggttcgtgtgcgttgacgaagcgcaggatcttaacgaagcgcaatacgctctgctttgtgcgctctgcggagactcgtataaaaacgtcatgatggtgggggatccaaaacagtcgatatatggattcaacacctcgagcccggaatacatggagaagttccggttcgagttcgcagcgaaactgatcgagctgaccgagaactttcgatcttcgcaggcagtggtgaacgttgctcggtccatcgatccgaattacttggttgacgcccagcttccgatcaagggcgacgctcgcgtgttcgttggagatgacgaagagcacgaggcgcggttgatagttgacgagcttgaactgctgtttgcccaaggacaccccgatgttgagggcggtgttgagccgtcgaaatgtgcgattctggggcggacccgtttcgctttgctcgcaatagagaacgaactgcgccgacgcaacgttcccttctacaagcgattgaccgctaatcatgaaaacgagtccgacctcgtcgacgagttccacttgtcgttgcgcatcctggcgaatccgagggaccggctccatttggcggcgttggcaacgaagtgggtgacgcagccgcctgaaacggcaacggacgccatggttgcgctgtcgcagatggcggaaagtgcggccgagcagcgagccaaggccgtggcggaagcggtcgcttcgattgttcagaacacggcacgcctagaccttatgccggcgttcaagctattgaggggttatgccgactcgctggacgagaattctaggcgcgcgatctatgaggacgtagccgtctttcagcaagaatgggaccaataccttcgctccgacggcacgtcgcgcaccttgtccggttttatgagcagcaaggcgttgggggccacccaaaaggcccatcgcgacggcgttgccctgctgaccgttcactcgtccaaagggctggaatttgacgccgtgtttattgcagggatggcggaaggaacgttccccgactatcgggccgttggcaaagtgcgcgagatggctgaggaaagtcgcaacgcgtttgtcgcggtcacgcgatcgaagcgcttgctttacctgacctatccccgggtcaaactcatgccgtggggcgattataaggctcagcaggcttctcgattcgtatccatgtctgggattagttaa

SEQ ID NO: 75076 - DNA, 1539 bp, Burkholderia pseudomallei MSHR1029
atgggcgtggatggcgatatcgaggaaacgttggtctatgtgctggaccttaatagtgacgggtcgcctatgacgaccgcacaggttccacgagtcgaaagaaatcacgtgcaggttcactatctacccgcgcgccgtgatccagccgaacacattgcttacggtacgaatgcattgcttgggcgcatgttgagagccgttaattgggaagacgagcgcgaggaagtcaaaggcttcacggaccagatcagtgggagtctcgccgcaaaccgctcggttgctgctttgagcgagagcctgaaggcgacctggagtacgttgcacaaaggcagcttctttgcagatccgcacatcaccttcgtcgcatctgagattgaagcccttctgcgccacttgtccgtttccttctcaccgggacatgacgaagaactcgtcgatttctcgagactgagcgatggtcagaagtccatgctctacttgtcgctggtgctctcagcacagtccatagggcgtgccgtccttgccggcgaggacgattcattcgacccagacaagctgcgtccacccgtatttacgatcgttgccctcgaggaacccgaaaacagcctgtcaccccactacctaggacgcatcgtgaatgccttggtggctatgacgggcaacgaggacgcccaggccctcatcgccacgcatgcgccttccatgctgaggcgtgtcgacccgaagcacattcgctacttgcggctcacggatgaacgtacgacgaagatcacgcgcattcggatgcccaagaagacggacgaggcacacaagttcgttcgggaggcggtacaggcataccctgaaatctacttctcccgcctggtcgtcctcggagagggtgatagcgaagaaattgttttgcctcgaatcctgcgcgccaagggcatcccggtagacgagtccgcagttaccattgcgccgctcggtgggcggcatgtcaaccacttctggcgcctgctttccgcgctcgagattccgcatctcacattgctcgacttggatgtcgcccggtatcaaggtggttgggggcgaatcaagtacgtcaatgatcaattgggcgaatatgcgcccagcaagacgcttcctccggatcacagcgttcctgattggaactcggcagaacacaaggttcgtgactacgacaactacttggacaagttggaaagccgggatgtcttcttctcttacccgatggacctcgatttcgcgatgcttctttcctatccgggtaagtatggcgttgaatcgaaaccaccgagtgagatcaccattaaggcggtgctgggcgacagctatcacgatgcgaagcaatatactgccgatgaactcggcctgttcggcacctatcacaagcgcttcaagcttggcagcaagccggcagcccacatcgaagcattggcccaactgactgataagcaactcctcgaagacatgcctgagtctctgagtcgcttggcggacgcagtgatcgctaagctggaggagttgccggagtga

SEQ ID NO: 75077 - DNA, 1668 bp, Burkholderia pseudomallei MSHR1029; identical to SEQ ID NO: 75071

SEQ ID NO: 75078 - DNA, 1890 bp, Bacillus subtilis
atgtatatatctcaggttcatattcaaaattataggagctttaatgattttaaaataagcttaaatgaaggattgtccataataataggcgaaaataatgttggaaaatcaaatttcttagagagcctcaatttagtttttaatagaaactattcattagctaaaaagactttgcagcaagaagatttttggagtggcttaatcattaaggataaatggccagaggttaaaatagaaataacactgagaggcattaagacagaagatgaactagctgtgactagtaagtggttaactagaaatccagaagaagcaaagctcacttataaatttaggcctaaatcaaatatttctgccaaacttccaaaaaagtctaagtccattagtgaaattcaacttccattacacgagtacgaatgggtgatttatggaggggacattgaaacaactgatgcatttgattttaacatgttagctaagtttgggattgagtacgtaggagcactaagagatgcgacgtctgaattaaaaaagtcatcagggcaattacaacagatattgaaaagtcttgatataaaagagaatgaattagacaggatatctaaaaaattagaagcactaaataaagaaattataaaaggtaacggtgtgcaagagacacaagctcatattaataggttcttggggaaaattactggtttttcaagacaagaagtaaagatacaaatgagcgaaaatgattatgcttctcttctaagggatttgaaggttttaattggatcggtcggcgaaaatgcgcatccagttaatataaacggattaggctataacaatttactttacataagcatgttattaacaaaatttacaaccctaaaagagttaaaacagaattcaaactatctatttcctattttaattgttgaagaaccagaagcgcatctccatacgcatttacaaaaatacttagctaaatatttttttgggcaagaagtagttggacaagtaattatgacaacacattccactcatgtgagttctcatgcagatttagacagtttaattgttttttataagaaatctggaagaaactattcaagacgaattggcacaatttttgattcgaacaataaagagcaaagggaatataaacaacacttgaaaaggtggctggacgcaactaaatccgacattttctttgggaaaaaagttttattattagaaggtattgcagaacggctattaatgccaaagtttttttctatattgtacaactctaaagataatggttcaggttgggagaataccttggaaagtgagggaatatccttaatttcagtagacggggtagcatttaggccattcttacagttgtttagcgataaaggattggatataaagtgtgcagttttaacggatagtgatccagaagctattccagtgagaaatgaaaacggagaagaagttcgagggacggatggtaagattctcaaggaaaaagtttatccctttaaagaaggtcaatatgaaatatgctcgagaacagcgaaccttaaatcagactattgtgaacaagaaaatgtatatatatcaaccaatttaaaaacctttgagtatgatttaattttagaaaataatcaacaattctttcttgaattaattgaaaaacacaaaataggaacagctaaagatcgtacaatcattagaggtttagaaggtcacgagtttgccaaagaagcctatgaattaatctcaaaagaaaaaggtcagttttctcaatatatattagatgaaataaacgatggaaaaacgattaatataccatcatatattagaaaagcctttgaatttcttaaagaacgggatgaatctgatgctactaatagataa

SEQ ID NO: 75079 - DNA, 1764 bp, Bacillus subtilis
atgctactaatagataatgaaaagtacaggcgagaaattatagaacaacccatagaaaattcaattgttgtacatgcaggacctgggagcggtaaaacaactttactgatccaaagattaaaatatataattgaaaatcgcaaaaagtcttactctggaattgcatgtattacttatacaaatgcagcaaaagacgagattatatcaagattgcaaaaggaacaaattgtaccgccaaaagagttctttattggaacaattcattcatttctatatgagaatgttataaaaccatattctcatttgttaaatcagaatgaacaatttaaggttacaccaattggttttgtaagaggattaaagagagaagtgggtgagatgttaaataagtctcaatacactataacagaaagtgaattagcggcttttgaaagtttgggacatgataaagatggtcgtccttattgctttagaggacaaataccttcacaagtagctagggaatggaaaaaaatgttgaaacagaaggggtacatagatcaacaaacagcaatctatgtttcttatgaaattttaaaaaaatatgagcatataaaaaaagctttcagtttacgttttccttttatattaatggatgaatatcaagatgtaacatattatcaagataaagtgttctccttgttaacgcattcttcatttttttgtgtaggagatgctaatcaatctatatttagctttacgggagcagaaccaattatttttacgtctaaggataaagatgaaaaattcaaaaggtataatttaatcaataattttcgaagtacgagtaatattgtacagtttaccaatcgaaaaacggatattatccaaaatgatgctagtgaacatacatccttaaaggaaaaagttttatttataacaaataaaaaagaaatgaaagaagttattgaaatttttcagagagaacaagcaaagataaaaattgatgaaggtcaaatcccatttctaatattaacgaggcaaaataaacttcataagcagataaaccaaattataaaagaaagtaacttcgaggtgaacccatttttagataaattaaagaaccatcactataggagatatcttatactaaaaaatctattaatcgctattgctttcaaaaagagcaaccaattagatgaggcaataaattatatttcagaaagcttaagttatctcttcttcaatgctcctccagcgtacattaagttaaccgacattcaatatgatgcttttatgtggaagaaattaaatgtattcacaatactttatatagatagcttagaccttaatcaaatgactccagataaactgtttgtggagctgaaagaatttataggtgaaacatctgaaaaggtatttgagagaaaagtaaatagaaagttgaggatgctcgattatgattggaaggggtcaaaaagagaagtaaaaacaattaaactgtctgaactggttgaaagcctattgtatgaacatcaatacactcagaaactgagtaatattaagagtatacattcagctaaagggatggaggccgaatgtgtattagtactagctgaaacacaaaatgaacttaacgagtggttggctaataatcaaaagtcagaagaggccagaatagggtatgtagcgttttctagggcaagaaaactcctatgtatatgggcgcctttattaaaagctgaagaactcgagtatttgcaagacaacgtaaagtttatatag

SEQ ID NO: 75080 - DNA, 1698 bp, Aeromonas caviae
ttgaaaatcagtaatgtacatttaattggatttagaaattttgctgattccagcatcaacttcaaagacaacaccttaataattggttccaatgatatagggaaaagtaatctcctacatgcattgagaattttattagacaaaagcttatctgaggccgaccttgaacctaatgagctagattttcatattggtctaaccgatgttagcaatgaaatatcaatcactataaaattcactaatgtcatcgaagatgcagtcatctcagttcttaaaggaaatgtgagtgatgacaatgaaacatttcttagatacgtagcacagaggaataatttagattacaaactttacataggcccctcactgagtgaactagaagaaattagcggacgattctatctaaaatacatgcatttaaaatatattgaatcacaacgtgacttagaacaattcataagaaaagaaaaacgacaactattaagaattgcacaagagtctctttcagaaaaagaaaaagaggaagatgatgacttgctccgtgagataggccatgatttagagttattaaatgaaaagatagcacagttaatttatgttgataaagcgactcaagatgttaatgatgagcttaaaaaactagcttaccattattctgattatgaggtacaacttgatactggcgcaataaaagtcaatgactttatagaaaaactacagcttggagctaatacgaacggttctaacgtgatgcttggtggtgatggaaggaataatcaaatattactagctttatggaaagctaaaagtgccagagagcatgatttagaaaatgaagttatattttatgtcgtcgaagaacctgaggctcatttacaccctcatcaacaaagaaaactagcatcatatttgattgatgagttaccaggccaaactattatttcatcacactcaccacagataaccgtaaacttctctccagactcaatcattagattactacgtcaagatacagctactattgcggcaagtggtggctgttcagactgcatagaatctggttgggataatatgagctacaggatgagtatcctgcctgcagaagcatttttctccaatggagtatttttagttgaagggccatctgaaatacttttatatcagtcactatcgaaatctattggtatagatctagattatgaaaatctgtcaattctttccgtagatggaatttcctttaaagtttacacatcaatattaaatgctctcgctatcccatggacaatgagaactgataatgacacatcaaaagtaccaggaaaaaatgagtggcaatactctggcatcaatagatgtttaagcatatcgggtcaaccccaactaaaaaatagtgacatagagcttacttcacaagaaacattagataatggcatgtgggaacatgtatctggcattattaatggacaaggtattttcttatcaaaaatagacttagaaacagacttggttaatgagttgacagatgaaataaacgatgctctcggaaagacagatattgactcatctattaaatatctacaaggaaagaaagcactaagaatgagaggtcttcttttatctatcgaggacaaactttataagttgcatgatggtgaattagtccgacctttacgaaagttaatagaattgagaaaatcataa

SEQ ID NO: 75081 - DNA, 1611 bp, Aeromonas caviae
atggctatatttaatcccactccacaacaacaagcagcgatagactgcccagatagtattgttgttacagcatgcccaggcagtggtaaaaccacagtgatgagtgaaaaaatccgcttggtaaccgcaagccaaccaggtcataaaggtgtcattgctatcacatttactagaaaggcaagtgaggagttaaagaaacgctgcaaaaaaaattctcatgatacaaaactaagttttttcggtacaattgatagtttctgtttgaaagaaatcatagtcccatttctaggaaggatatggggcggcaaaccatctaactgtaagataataaaaaggcttgaaactcaccatagaggatacctttctcagaattacacatcccccacagaaagagatctctattctgatgatggatttcaaagactctataatgacggcatattgtggatgagtagtttttctgcattatcgctttttattctcaatcattcaacttcagcacaacgttatttaaaagcccgctattcacatgtttttatagatgaataccaagattcatcagaagcacagcatgagttattcattaaactacaccagcttggtttagtcgcaacagctgttggtgacattgatcagtcaatatacagattcagaggaagtcaacctgaattactacttgaattaactagagacacagttaatttcaagcattttaaactttctctaaatcatagatgccacccatcaatcattaactatagctctcgtattcttgacccttcatgtgacttaataacacataaagatgacattagagtttatagacggcgattaaatgggaatttaatcgaggcagcgaatcaaattactccttggataacaggatggttggagtcaggacaaattaaacgagcttgtgacattgctgtcttagctaagaaagaaatatctttgagggaattttcatccggcttaggcgttaattacagactatataaggacacgcctttacatgaaataggcactgaaccatcagatatttatttagattttcttctttataaacacacaactattttaactgcacaagactttattgataaatattctaaccgattagtaggagagagaattgccggtctcagaaaaacactaaaaaccattagaaatgaacaagacgtcaatagctttatagaaaaatgctgtagttttatgcgtctgatgggatatatgaatttcgatgaagaaaatgatgccgttagatctgtatgggccaatgaatcgttaataaaattatttatgccagttactgatggtgaaattcagttaatgacattacataaatccaaaggattggagtttaagattgtcttacatctggacatggaggaatggtctttcccccaccgaatacccggtgtcaaccgcagtgacataaattatcccagtctagaagaagatactaatttacattatgttggtatcactagagctgaagaatattgcattttagttcaaacaaatatgaggcgaaatgcgaatggtggctatgctccctcaagtccatcatatttcttaaacctacctcaactaacaggtttatatcaataa

SEQ ID NO: 75082 - DNA, 1785 bp, Serratia marcescens
atgtatttatcaaaactcgaaatccgcaactttagaaattttgaggcggctgatattcccctggcaggtaatgttgtgttattgggggagaatcgtgttggtaaaagtaatctgcttttcgcaattcgactggttattgatcccactctgcctgattcagccaggcagcttaagctgtcagatttctgggatggctgcgaccttgaatcaaaccctcaaattgaggtgcaccttgaattcgccgatttcgacagtgacacttccctctcagctctgttgaccgattttcgcatcgcagaggatcctagcgtagcaaggttgagctacatttttcgtaaaaaggaagaagtccatggggctccgcgttcgggtgaggactgtgagtttattgtttttggcggaggtcaggaatcgcgaaccattcctggacgcgtcaggcgccggatctccattgatatgctggacgcgttacgcgatgcagaagcacagcttgcttcctggcgaaactccccgctacgccccttgttggaagatgcattctcttcactgagccgagccgatttagatcgcgtagcaactgagcttcaggcagcaacggaaaccatggagaagttcccttcaattagggatctcgaagattctctgcgtggtggcattcttgatctggctggaactgctcacgatttagatgcccgcctccgttttgcacctgctgacccgctcagattgatgcgttctatctctatgttcattgatgatggaaagagggggatcattgaagcgagcctaggttctgcgaacgtggctctgatatcactcaagctagcagagtttgcatggcggcgtgaaaagaatgaacgtaatttctccctgctttgtattgaagaacccgaagcacacctgcacccccaacttcagcgcgctgtttttgacaaactcttcaataatgccgacaaagatcagtcattgattgtaacgagccattctcccacactggcaaccattgctcctcttcgttctgtcgttcgcatttgcagggattctgaagggcgatcgcgagctttttccctggccgaactgccagtaaccagtgaagaactcgacgacattgaacgatatctaacagcaaccagatcggagctgctttttgctaacggagtaatatttgttgaaggcgatgctgaggaggttttacttccaggcttcgcgcaggccatggggatcaatctcgaccagcttgggattacggtatgtaacgtagcgggagttaattttgaaccatacgtgaagttggcagccagcctcggactacctttttccgtcgtaaccgactgggacccactggatggtacgaaacaaccgatgggtaaaacccgttcaattagtatctggcaagcatatagcgatgtatcgggaaaactgaaaaaactaacccctgaaaatattatttggttgaataacagttcttatgaagcctgtaaggctggatttgaaaggatcggcatttttttaaacgatcagacatttgaagtagctgtggccaatacggcaggcctcaaagaagcgctacttgatatcctcgatgaacagggatttggtgtgttacgttcatcaaggattgcttcatggcgtgccggtatagttccagacccgacgcaacttctcgcgatgatatctgacataggtaaagggcgattggctgccaagctgaagcaaaaagcgcctgggcttgcgcctccggagtatattgcttcagctattcaatatgtggtgtcgaatgtctaa

SEQ ID NO: 75083 - DNA, 1794 bp, Serratia marcescens
atgtggtgtcgaatgtctaaccggcgcgcactttcggaggctctgaacgagctattgccgaacagagagcagtacgctgcggccacatacctcggccactgcgtagttattgctgggccaggcagcgggaaaaccaaaacacttacgaccgccatggcacgtgccctgattgatgaggtcgctgacccccgaggcgtggcctgtattacttacaacaatgaatgtgcatctgaacttgaaggacgcctggcctgctttgacgtcactggcggtgatcggaactttattggtaccgtgcatagctttgcactaaatcaggttttaatcccctactcacgatgtatacccggtttgctgccggatgattttcgtgtggcgactagagatgagagtcgcgcggctgttgaagtggcttaccaggctagattcggagctatcggagatccccatgcacgatggaagtttgcagaagagaaacgacgtcgggatgtgaaccgactcctaccagcctggcggaataacaatccggagctggcagatttaattgaaggttatgaggcagaacttcggcgcttaggactgattgactttgatgatatgccactcatcgcttttcgtattattagcgagcatgaatggatacgtaatgctatccggtcgcgctatcctgttttgtttgtagatgaatatcaggatctagggcacgcacttcatgagctggttcttctactgtgctttaacggtggaatacgattatttgcggtcggtgatgcagatcagtccatttacggatttaatggcgcaaatccagggctactggacagtcttgcttcacgggcagatataagaccgttccgtcttcgtttcaactatcgatctggcgcgaaaattatcagggcatcattaggagcgctgggagaagaccgcgattatgttggccccgatggtaatccagagggagagttagggttccatggggttaatggtgattataacgcacaggcgcattttatcgcgcatgatctaattccctcgttgattgagagaggatttcagcctgaacgcatcggggttctttaccgggctgcttggcttggcgataaagttgcggatgagctcaaggccagaaatattgccataatacgtgctgacagtaatgctcttattaagcgcaattctcgtcttgctcgtttcatagaagcctgcagtcagtgggtaacagggggatggaaagaagcctcacctccatttaatctgttactagatcaggcactctttcttgtttatggccgccgcgcaagccgtgctgaagaacaattactgaccgtacagctcatcacatttttacgaaacggaattgataaagcggaaagtgctcacgagtggctgagacgtttaaatgatgaggtcatcaccggctggatgggtatctcacagaacactcagcaggaatgggatgtcatcgctgagttactgaaaagaaccgaccccgtcaggggactggatgtggctctggatgtattcgctgggaaagtagaaggaactgggcgcatctcccttagcactcttcatagtgcaaaaggccgagaatttgatgtagccataatgtttggggtaaataaatatgacttcccaagtaagcgagatctagcttcagataatgcccttcgcgaggcacgacgtctcttttatgtaggcgtcacccgtccccgaaaagagctgcacatggtttatgaaaaaggtaaacattcaccttggattgtcgaactttatcatcgcagccagcagatatag

SEQ ID NO: 75084 - DNA, 2139 bp, Pantoea sp. PSNIH2; identical to SEQ ID NO: 72908

SEQ ID NO: 75085 - DNA, 1800 bp, Pantoea sp. PSNIH2
atgttcatgtggaacaaagatgatctgaatcccgagcaggaagcagccattctgaagccagggagcgtctttctcatcgcttgcccgggcagcgggaaaacgcgcacgctcacctacaaaatcgcctatgtgttgtccaggctgaaatcgaacaagcagtttgtcgttgccatcacttatacgcaccgtgccgccgacgaaatccacgagcgcattgagagccttggggtggatacatcccgattatggataggaacgatacattcgttctgtcttgaatggatattgaaaccgtacggcatctatcacgaagcgttggatcgaggcttccgtgtgatcgatcagcatgagcgcgagaaaatcctggaggcattgtgcaagccttaccagaagccaaaaataacattctgggattgtgagttttattacaccgaaactggatatgtgctctcctgcccacaagattggaagcattcgggtcttcacgtcatattgggcaagtattttgagattctgcacgaaagtcggcagctagactttgagctcattctttactatgcgtaccaactgatcgcacgtcatcctgcgatcagcactcttctggcacagttgttctctttcgtgctgatcgacgagtatcaggacaccaaacgaattcagtattcgatcatcaccgccattctgaaagctggtcaaggtgcgaccaaggcctttattgtcggagatcctaaccaggcgatttatcaatcgcttggcggatatccgattgccttcgaggatttcaaggcgatggccaatatcgatttggacgaactcgaactgtcgcggaactaccgttcttctgagcgcatcattgagtacttcggaaactacaacgttcacaacacacgcatcgaagccgcatccgaggacaaggcgtacccaagccttatttcattcgacgacacagtgagcaaaaatgatctggacgctgagctcatccggctcatccgtttcaacattgagactatgggcatctcacctcacgaggtgtgcattctcgcgccacagtggacgcatcttgcaagcatgacacgtcgtttggtcgccagcatgccggagtactcattcgatggccccggtatggttccctttgcacgggacacagagaatttctggtacaggctttctaagattgcacttactcaggcatcgccgggaatgtatgtgcgcagactgcggtgggccggggagattctgaatgacctagaggcggccggggctagcgtgtcgaagctcacgcggaggtccttgttgagggagtgcaatgcaattaagatcgatgaaacagatggtcttacctacttgagcgcatttttcgagcgtctgtttgcaaacttagcaatcgactttcgccttttcacgctgcttcaagagcatcacgttgccttcttcgatagttcgcaagcccgggtaaatcgattgaagagtgaaggtagcgaatttataggcgatattgagacattcaggaaggtatttcagcataggactggaatcaccatctcgacgatacacggcgtcaagggagccgagttcgatgcagtgatcgcttatgcattattagaagatatggtgccgcatttcaatgatccgaacggtcaagaaagcgcgatgaaattgctgtatgtcattggttcgcgggcaaggaagaacctgcaccttgtttcggaacgaggtcgagttcgccagtattctggcgaagagtatcaagtaactcgcaagcttgcctcatgcagttttggatacgatcaaattccatag

SEQ ID NO: 75086 - DNA, 1719 bp, Candidatus Thiomargarita nelsonii
atgtttctcagaaaatttcagatagaaaattttcgcggtatcaaacacctatctttggaactcgacgaattaactgtgcttataggagaaaataacactggcaagacaagcattcttgaagccttacaaacttgcttaagtcgttcgctcacacgaaaagcgtcaccattttcagatttcgactatcacttgcaagatgccaacgcacaaccgactcaggctaatccgattatcctaactctcactttctcagaacagaaagcggatgaatggcctgacgaaattgtgcaaaccttcaagaatgtctatcaaacagatgttgatacgggtatccaatccatcacggtaaaaatcaccagcacctacaatcaagacgttgaagattttgtaaccagttgggattttttagatttgcaaggcaatgctctccttggtgaggcaaaagcaccaagaaatatatttaatttacaacaacatctaccactgttttatttggcagccctgcgagacgctgcacaggaatttcaacctagatccgctttttgggggccatttatcaagcagtttaagataaatgaggcgcaacgccaagaaatagaaacagagctttcacgactcaatcaacaaattttagattcccataaaggctttgaggcaattaaagaacggcttaaagaaaccaataaaatagtcccgctcgccgaagatgaacctgttagtatcgaagccttgcctgggcgtgttttcgatatgctgtcgcgcacacaagtcatgttgacctctaaaacaggcgcacgcctgcccatcgggcgacatggcgagggtacacaaagccttgccgtcatgttcctgttcgatgcgtttctccgtaatcgtttgcaaagcacttacgacgaacaggcatcccctattttagccctagaagagcctgaagctcacttacacccttcagcaatccgttctattgcaagcttgcttaaagaaatgaaaggacagaaaattgtcgcaacgcattctggcgatttagtttccggcgttgacttgttttctttgcgccgtttgtgtcgtaaaaatggcgaaattaaagcgtttcaactctctaaaggtattttgaccgataatgagttagacaaactcaattaccaagttcgggcaaccagaggcgagctattgtttgcccgctgttggctgatggttgaaggtcagacagagtttattgtcttcaatgaatgtgcccggattttgggtgttgacctttattcagaaggtgtttattgtgtagaatattctcaatatactccagaaggactgctcaaatttgccaatgccttgggtattgattggttttttcaagctgatggagatagcgctggacaaaaatatattactaaagcacagaaatacttaaatggaaaatcagaacaacaccatatcttgaaattgtcgaaagacactatagaggaattattttgtactcaaggttttgaatgtatgttcagaaaatatatagcggatgaaaagcaagatattgttaccgcaactgctgatgaacctcaatactgcaaacaacttatcaaagcctctaaagcggaatttaaaaaagcgaaggctgccattaaaattttgtccgaaattgaaaaagaaggggaatacgccattccagaagaaataaaacaaatcatcaatcaaactgtacaaatagcgaggcaagcatcatga

SEQ ID NO: 75087 - DNA, 553 bp, Candidatus Thiomargarita nelsonii
atgagtattgatctttctagtttaaacgaaaatcagagacaggctgttgaatgggatgagggacctctgctattacttgctggtccaggatcagggaaaactcgtgtattgacttatcgtattgcccgtttacttgaaatgtcacccaataaacacttcaatattttggggctgacttttacaaataaggctgctggagaaatgcgttctcgtattgaagggctagtgtcgaatgcgagagaacgcaccttattgacaacatttcattcattttgtgccaaaattctacgtcaacatggtaatcatatcggattacatcctgattttactattctttctcaggatcacgatcgggaagctatactacacgaagctataaaacaaactggagaaatagaaactacagctcaacgtcttttgccgtttattaatgggttattaaataattgtgttgcaatagaagaggttgaatcacttctggtgaaaaataatgttgacaacacccataaacttgcggcaatttatcgcaattatcgtcagctcctaaaaaaaa

SEQ ID NO: 75088 - DNA, 1752 bp, Candidatus Thiomargarita nelsonii
atgagtatattaatcaaaaccgttcgtattgcgggatttcgatgccttaaaaatattgaagtggaacttgagcaaaccacaatattgacgggcatgaataatagcggaaaaacgtcttttcttaaagctttacaattagcattgggcaaccgtcaatttctctcacaggatgatttttttattcaaggaagtcaggtatctgatcaaataatcattgatttgttgattattccagtcgatgatgatggcaaacggtgtgaaaatttttcagaagactgggaagatcagttcaccgtagatagaactcgaatagatgatatgggtaataatgcctttgtcccgcttagaaccattattacttttgatgcagtaaaaaacaactataaaacccagcaatttattctggaaagttggcctttattaaaaccggataatattgagtggtttgatgttgataacggcgaaccgataggttttgattttgatgaaatccagtttttttatatgaatgcccaacgggatattctggatgatataaaattaagaagctcttatcttggcaaaatgttgtccaaaatcgaatattccgcagatacaatagaaaccattgaagcacagattaaatctctgaatgaaaccgtggttagtagtagcaaaattttatccaacatcaagaccggcttaaaagagctggatactgcaatggatactcatagcgaagggatagaaatcacgccttttacaaaaaagattcgcgatttaaacaaaggtttatcgatctattatactgacagccaagacagtttttctatggaataccacggcatgggtaccagaagctggtcttctctgttgacactaaagtcctttatttctttactatcgatcaatgcccaaaaagatcaatctgtgttttttccgatcctcgccattgaagaaccagaagcccatttacatcctaatgcccagaaaaaactttatggacagatggatgccattgctggacaaaaaatcatttccactcattctccctatatcgccgcaacggctaagttagggcagatacgcaatttttacaaagatgacatcgttacttgtggcagtatagaggttgatcgcttaactgacgaagaaataagaaaaataaatcggcaagtcattaataccagaggagagatatttttctctaaggtgattgtcttttttgagggtgaaactgaagaacaggcactgccaattttggcacaaaagtattttaatcaaacaccggttgaaatggggttagattttgttggtgtgggtgggtatggaaattatctgccatttttacactttgctgaggcattaaaaatcccatggctcattttcagcgatgcggaaaatgatgtaaaagcaagagtccagtctcagtttgctaattgtggttctatcaagagagatagtgagtgtatggttttccttgatgcaaataatgattttgaacaacagcttattagtgatggctttactgatgaaattaaacaagcgataattgatcaaggtgtttatcataatgaacaacataaacaagctaaggtacaagaactcagaaattatgatgacaaccagttatataaaactctcaccggtagcaaaactcaatatggtcctgccatagcagaacagattatccgcagtgataaagatttaccttccaaagtgatcgaactgttccgtaagataactactattttgaccggagaaaaaacatga

SEQ ID NO: 75089 - DNA, 1821 bp, Candidatus Thiomargarita nelsonii
atgacaactcagattaaattatcagaaattcaagaaaaaattgtctttgctgaaaactgtgcaatctatgtcaaagccagtgctggcagtggtaaaacacgggttttaacggaaagaatacgatatttactcagtaaaaccaagaaaagaatacttgctctcacctttactaaccaagctggtaaagaaatcaaggaacgattaagtgatataccggaaattgaccaacgtgtgttggtagaaacttttcaaagtttctgccgttccatgctgaaaaatcatggtcacttgattggtattaccaaaattacacctatttttaaggacgaaaccgataggctggaattgattgaaccggcgattaagcaaaccctttacgctgctgaatataaaaaactagataaaaaagagcaaagagaactttgcgataaagtttcaacttttatttcactagtaaaacggaagttaatcccagactctgaacttgaaaagcatcttgatgaagatgtaattttgatgtatcataattatcaggatattttacatgcccaaaatgccatagattttgatgatttactgtattttgcttataaattactggttaattatccaaatttagcagctttgtatcgccggagttttttcgctatttgtatagatgaagcacaagacttgaataatgctcaatatcaatttttagttgctctcgctaatggtgaatttactaatattatgatggtgggcgatccaaatcaatctgttttccattttaatggttcttctccagattatctggatcaacattttgtccgtgattttaatccggtgattgttgagctaaaggaaaattatcgtttttcaaaagccatattatccgccgtaaaaacagtattcccggatgcagaaaatattgcaggaaccgttaaagagggtatttttgaacaaccgggcttaacagatgaaaacgatgaagcacaatgggttgttgacaagataaaagaattaattgctttaaagcatcatagtgatattgaaggcgacattacttatgaaaaaatagctgtgctggctagaaataaatatgtctttaatgccttagaggcacaattaatcgaaaaccaactgcctttttattacaaaattatgccgggcgctattcagtttgaatctgatttaatgaaaatttttgaccttgcattaagagtaaagctgaaccctcaagacagtttgcataagaaccgattgttacagcgtttaaagatagaggcaaccgacaacaagattaaattaaataaaaagctaatcacattggttgcaggattaaatgatgacggaagtaacatcaagccagaattggaaagtttcagagatagtctaactattgaagatgaaaacgaaaaacagattatatttaatgatattaatgagttactcaagcactggcataactacgctaaaaaaactgataagaaatcattgcatcactttaaaaattccatggctcgggggcaaacccatccattagcatcacctagtggcataacattaagtacagtacacactatgaaagctcaggaatttgatattgtttttattataggtatggatgatgagacttttcctgattatcgagcggtgcgaaacgggggtattgagatgacacaagaaaaaaacaatttgtatgttgcttttacccgtgcaaaacgctttttgtatattacatggccacaaaaaaggatgatgccttggggggattataaaattagaaaaatatcacaatttctaaaggtttttaaacaatatggcaaaaaaaagcagtag

SEQ ID NO: 75090 - DNA, 1719 bp, Candidatus Thiomargarita nelsonii; identical to SEQ ID NO: 75086

SEQ ID NO: 75091 - DNA, 1914 bp, Candidatus Thiomargarita nelsonii
atgagtattgatctttctagtttaaacgaaaatcagagacaggctgttgaatgggatgagggacctctgctattacttgctggtccaggatcagggaaaactcgtgtattgacttatcgtattgcccgtttacttgaaatgtcacccaataaacacttcaatattttggggctgacttttacaaataaggctgctggagaaatgcgttctcgtattgaagggctagtgtcgaatgcgagagaacgcaccttattgacaacatttcattcattttgtgccaaaattctacgtcaacatggtaatcatatcggattacatcctgattttactattctttctcaggatcacgatcgggaagctatactacacgaagctataaaacaaactggagaaatagaaactacagctcaacgtcttttgccgtttattaatgggttattaaataattgtgttgcaatagaagaggttgaatcacttctggtgaaaaataatgttgacaacacccataaacttgcggcaatttatcgcaattatcgtcagctcctaaaaaaaaccaatagccttgattttgcttctattattctcgaagcactggaattattgacaaataaaccagcaatcagaaaacagataccgcgtatttatacacatatttgtgtagatgaatttcaagatacaaacatggcacaatataaagttctaaagcaactagttcatcctgattctcctaatctttttattgttgctgacgatgatcaaattatttatcaatggaatggagccagcccagagcggcttaatgagttgcgtcaagattttgaaataaaggagatccaacttccagaaaattatcgttgcccggctgaagttattgaaatcgccaatcggttaattgtcaataatctttcgcgttctcaaaataaacagaagctccgttctgccaaggtggctcggaatacctcattaagaatcaagcattttgccacctttgatgaggaaagagactgggttgcaaaagacatatcctcacgtccagagtctgaacgaatagaaacagtggtgctggcacgcactcgtaagttgcttgacggagttgttcaggctttgcaaaataatggactgaatggttatgtgccaattagaaaagatgactttcaaagtgcgcctatgcaatggcttcacgccattcttaggttagcaaattctcgccaagatcgagagcaacttcggcgtatttgccaagcattttataggctggaaggcattaacctgaatgttgatgaaattatctcaaacgctgctatctcagaaggagattatttaagaagttggcgagatatggttttgaaacgtcattctgaattatcggcaccgtgcctaaaaatcgtaactgaagacgtgtcaaaattgcttgactatatgaatttcttaaacttgctcaaaaacgcttttgattggtttaataaatttaatgctgaagagccatttaacgactatcaacaagaaaagtcagtatgggagaatatttatacaaatataaagtcaaattatggagaagaacaattaagcttgcatttattacttcaagagctggatttgaactcaaaaacccccgaaccgcctaaaaatgctatccgttgttatacgatacatgctgctaaaggacttgaattcaaacatgtctatctaattggattagtcgaagaacaattgccaagctggggtgccgtcaaaaaaggcaataacagtccagaaatagaggaagaaagacgaaattgttttgttgccataacccgtgcggagatttctctgacattaagctatgccgacaactattttagatggactaaaaaaccatctaggtttttacaggaaatggggctaatattatgccaaaaatcttcgacaacctaa

SEQ ID NO: 75092 - DNA, 1848 bp, Paenibacillus polymyxa
atgtttcttttagaagttagaattacaaactttcgaaagtttggtcaaggaacaaacggtgaacccggattggttctcgttttaaataaaggtctgaatgttctcattggtgaaaatgatgcaggaaaatcggcagtaattgatgcaatcaaatttgtattattaacacaaagcagagaatattctagactagaaaaagatgattttcatgctgattcaaatgaactgaaaatcgaatgcatctttaaggggttttcagtaaaccaagcaaaggattttttagagtggattactattgattcagataaacaatatagtcttcgtgtttttctaactgccaaaaaggatgttaaaggaaagatattaattgacgatgtgcatgcaggaagtgatagcgaagggcaaatactacatagtaaagcacgtgatttacttagaacgatttatcttaaaccattgagagatgcagaaaatgaacttgctgctaaacgaaactcacggttatctcaaatattatattcacatcccgagttttctacgggggaagatcatagactggttgaaatcattaaggaggctaatcaaaaaatcaagagatactttgattatgacgagctaactagtgaggaaaaaaagattctaaaatcaatcaatttttacttatcaaagttctctgataacaaaaatttgttgagttcaaatatagaaattgcagcagttaacctaaaaatgatcttagagaaaattgatcttttgcttgttactacgaaatcaggtttaggatcccttaatcaactatacattgcggctgagttattacttttacaaattgaaaaaactgaaggtattaacctcgcactcattgaggaaatagaagctcacttgcatccacaggctcagataagagtgatagattaccttcaagaattaagtgaaagtagcacatctccgatgcaaatactattaacaactcacagtgtcacattagcttcagttatcaaattgaataatttaattttgtttgctgaaggcaagtcgttttctttggctgaaggtaatactaaactacacaatggagactatagatttttagaaagattcctagactccacaaaagctaactttttctttgctaaaggagttatgattgtcgaaggtgatgcagagaacctattgcttcctacattagcggataaattaggaaaatcttttgctaaaaatggagtttccattgtgaatgtagggagtactgcattgtttagatactcaaaaatatttattagagaattaggtcctattatgcagttacctgttgcaatagttaccgattgtgacgagccggtatcaaagatcgataaagagtctggtggtattgttatgcttccagctagaaaacccaaaaaaataaaatctgaaaagaaagtcaaatatagcgatcaaaatgtaaaagcttatatatctcatgagtggactttagaattcgatttggcttgtagttgcttaaaaaaagaactgttcgcctcaattctcatggcaagggattatgctaatcaagataaggaattaacagaggggagagcggcaaagacatataaggaaatcggtgattatttaaaagaagctgaaacacagattagtggatggagcacctatgaacccttcatgctagcttcaaacatagttagagatgtagtattgaagaaaaacatttcaaaagcggttgttgctcaatgcttttctgaaattttgaatgaacgtagctttacattggaggaattagaagatatcagaagcgacagttatctaaagtacctagttgatgctatagattatgtgacaggagcttaa

SEQ ID NO: 75093 - DNA, 1971 bp, Paenibacillus polymyxa; identical to SEQ ID NO: 74339

SEQ ID NO: 75094 - DNA, 1905 bp, Pseudomonas aeruginosa WS394; identical to SEQ ID NO: 72778

SEQ ID NO: 75095 - DNA, 1551 bp, Pseudomonas aeruginosa WS394; identical to SEQ ID NO: 73783

SEQ ID NO: 75096 - DNA, 2286 bp, Halobacillus sp. BBL2006
ttgcaaataaaatacgtagatatacagaatttcagaaaactaaagtcttgtcgaattgagtttgcagatgagaaaactgttttagtgggagctaacaatagcgggaaaactactgcaatggatgcattgaaaaagtttttaataaaaggccttcaaaggagtttttcaactactgatttcacactttctaattggatagaaataaacaaaataggggacagatgggaggaaggtgtggaagataaatcaggaccaacgttaagtattgatgattgggaggaatttttaccatcattagatttgtggctaaaagttgaagaaaacgaattgcaccatgtaacacatctaataccatcactaaattgggatagtggttatgtaggagtacggataagacttgaacctaaagacttaaaatcattatttaagggttatacttctgcgagaatggcagctaaagaggctattcaaaatagagaaaataaaggccctgattcagatctattcgaactatcaccacagaatatgcgaagttttctggaagagaatttacttaagtattttgtaatcagatcctatacacttgattctaataaattgtctactgaacatacaactcctcaaatattaggaccggaaattgaaccaactgatggtaaccctttaactggattaatacgtattgactacatatctgctcaaagagggtttacggatccagataataaaagtccttatttagacgatgacaataattatgctagtggaggaaaatctttatcttcacaattaaggacatactataatactcatttaaaccctgaaaagttaccagatgcctctgacattggggctctagaggcaattcataatgctcaaagagtttttgatttaaagctaaaagaagattttaaagatgctatacaggaattagaaaccttaggttaccctggcttctcaaatcctaaaattactatatctacccaggttaaaccaatgaataatttagatcataaatctgctgttcaatatgatttgctaagttcatctaatgcggatagtaatataccaatgaggcttcctgaaagtcacaatggattagggtatcaaaacttaatttccatggtatttaagcttatgagtttcagggatgattggatgcaagtaggtaaagtagcaaaggaacaaagtagtagtaaagaagattatattaccccacctttacatttagtttttatagaagaacctgaagcacatttacatgcgcaagttcaacaagtgttcattagaaaagcttatgaggttttaagatcgcataaagatttaggtacatctagaaattttactactcaaatggttgttagtactcactctagtcatatagctcatgaaactgagttttcttcattacgatattttaaaaagcaggtaagtcacaaatcttcaatacctatctcaacagtagaaaatttatcagaggtttttggaagaaacgaagctactaacaggtttgtcacacgttatattaagtcagttcattgtgacttattctttgctgacgctgttattcttgtagaagggccagcagaaaggatgctagtacctcaatttatagaaaatgattctaatcagttgtatgaaagttatatatcaattttagaaatcgggggaagtcatgctcacagattgcagtccttaatagaaaaattaggtattcattgcttgattattactgatctagattgtataagcccgattagtaagaaagcaatttaccccgaaagaaacaagggttacttgacagataattacaccttgaaaaattggctgcctaaacttactaaaattgatgatcttttaaatttagatagtgacaaaaaagtgcttgaaaacaatggtcaatttatcagggtagcttatcaaacacctatggaatgttcaggtcaggaagctttagcaacaacctttgaagatgctttagcatttgaaaatatagatttttttcaaaacaatgaagggataggtttattaaggaaatttaaagaatcaattgattctttaaatggtaaaacagacaataagctattaagtgaaaaatttttcaattccttaagagaaactcctaagaaagcagagtttgcattagatataatctattcagacgactttgaaagaattaaaacacctggttatatcactgaagggctgaaatggttagaagaaaaagtttcttttagaaatgagcatttatctattagtgaaaaagaatatgaggtaataaaatga

SEQ ID NO: 75097 - DNA, 1851 bp, Halobacillus sp. BBL2006
ttgaatattcaagaatatgaagcttctgttaacaatcaaataatgaattgtcttgaccctgataatctaaaaagttttttcctatttgcaggggctggatctggaaaaacaaggtctttagttcaagtgctggatcaattcaaattccattatggcaattcatttagaatacaagggcgtaaagtggctgtaattacatacactaacgccgcgcgtgatgagattgaaagaagactccaatatgatcctttattttatgtctcaactattcatagttttatctggggcattattaagccatttcaaatagatataaaaaagtggctgattaattcgttaagtaataaccttcaagaactaagtgataaattgcaaaagggtagaataagaaatccagaaaagcttaaagcagagattagtagtaaagaaagacgtctagagcatgttaccaatacaaatcaatttatttacagccctgatggggataatcaaaggtttaactcaataaaccattctgaagttataaaaattggccaacaatttttgatggaaaatgctttaatgcagaagattttaaagaataaatacccagttcttcttattgatgaaagccaagatactagtaaatatctaatagaggctttatttgaaatgcaagaaaaacataaaggaagtttttctttgggattattcggtgatacaatgcaacgtatttatagtgacggaaagcatgatttaggttcgaatcttcctgatgattggattacacccgtaaaagaaataaatcaccgttgtccaactagaataattaagttaattaataaaattcgagagccagtagataatcaagatcaagttccaggagaaaataataataaagggattgtacgaatgttcttatgtcccagtgatagtagcaaggagttaatggaagaagaagttgcaagaataatgtcagagcttacaaaagatggatcgtggagttgtgatgcttttgattataaaactttaatactagaacatcatatggcagcaaacagactaggattttcagatttatttcaaactctctatagcgtaaagggtctacagaacggagtattagatggaaatttacctgagttatctctttttacaaaaagaattctacctattattcgatcaaacatactacaggatgattacactgttactaagatagtgaacaagtactctccattgttagatagaaaacactttaataacaaagaaaatcaagttgaaaatctcaagttagctaaacaaggtgttgaagaccttctctctctttggacaaacgataaagaacctattattgaagaggttattcaatcaatttataattcaggtttattcactatcccggaaaaattcaagctattaattgaagaagagattagtcaacctgatggtaaagataaatttagtgatgaactagatgcttggaaagattttattaagatcccatttagtcaaatagaggcttatgacacatatataaaaggagatgcaaaatttgaaacacatcaaggcgtcaagggacttgaatatcctcgtattatggtagtaattgatgacgaggaatcgcgaggatttatgtttagttatgaaaagctttttggtgccaagaaaaagactgctacagacctaagaaatgaagcagagggaaaggactcctctgtcgagagaacaagaaggttgttctatgtaacctgtagtcgtgcgcaagaaagcttggctatagttgcttattcagacaaatcagaattaatcaaaactcatttattggaagaaaattggttagatgaggatgagattattattatgagctaa

SEQ ID NO: 75098 - DNA, 2307 bp, Vibrio parahaemolyticus
atgccagacatccccacagggaccgaagtatccaaaggtattaagcttcgatttgtcgagcttagtaatttccgtcggttaggaaaagtgcagctgaacattgatgaaaaaaccacaattttggttggcgccaataatagtggaaaaacatctattcttgcggcgctacgacatttccttgctgatgggtctccctttagtgctttcgacatcagtatttccaaatggtcaaagctgcgagcccttggcaaagtttgggaagaactgattgaagaccctttaactgttaccgaaccagaagaaaagtggaaagatcaactccagatactgctagaaaccatgccagtattggacctctggtttgatgctgatgttggaatgtatcactatgttgctccatttctatccaaatttagctggaaaggtggcgctgttggtattcgccttcgactggagccggtcaccaatattgaagagctcaagcaattagcatggacttactgctctgcacgttcaccagttaaagatatgggacaagattcattagcgtggcctatagacctacttgatttttttctgcgtgagccattgaagcttgggcgcgttcgtgcatacaaattagataccgataacaacccgattacggaactggtatcctatgaaactcaggcacttgatgtccagacaagtccgattgaccgaaagcatctatcgagattgattcgtgttgatttcatcgcagctcagcgtggattcggaagtgaagaaactgagtcgcggccatcatccgctcttcaacgagttggcatgttttcaaatcagctaatcaagtttgctcaacaacacttaaacgttgctagctccggacatagccagcgtgtagaccttattaaggcagtggctcttgctcagaaagagttagacagtaagattcaagaagccatagccgattcagttcaggaagtgcaagagcttggctatcccgggttgcatgaccctcaagagattcgttttcgtacacgtatccaaactgctgacctcctcgatcacagtactgcggtccagtacagtatgcagaaggattcaatagaagaactcctaccagaatattctattggacttggttaccagaatctccaatctctcagctaccaactagtttcatttagatctgcacgacttaagcctgaaaaaggctcccctgtccccgtacacatagtaatgattgaggagcctgaagcccacctacatgttcaggtacagcgtatatttccaagcaaagcacataaactaattagtccgactgagaaagaagcttcaagcctaaatagccaattgatcataagcactcattcaagtcatctagctcattcggagaattttgaccggctcagatatgttcgtcgtgtggctaagagcgatacgattccaatgccgacgacagaagttgtcaatctagccgaagtctttggtgatgatacaaaaacacgccaattcgctgagcgctacttccgtgttcaacatacggaccttttgtttgctaacgcagctatttttgtggaaggagtcgcggagcgaatgttggtgccacttttcatagaacgttatttcaatgaactgaacagtcgttacgtttcctttgttgatataggtggaagccatgcccatcgactcaaacctctcatcgaaaagctccggatccctacagtaataattacagatatcgatccttgcgaagaaaaggaaggcaagcctaagaaaaatggtgacccaaccaagaaactagtcgctgttgcaaacaccgggcaacccgaacttcagtgtggtaaccctaccttacgtggctggcatccgaaactgcaacaacttgatgatttcaaaaccccgactgaaggtcagttggtatggaatgaaatcgaagattgccatgtatatttcgcttggcagttacctatagctaaagctaacaactgttggcccagcacatttgaggattcactggttcttacgaatgtctcttggttcaaagggttgatggatgagaaattcgatgaagatggagtggagattgaagttcccaaaggggctcttggctcagttgcaaaaaaggcggtagaagccgaagattttcaacagctacttagtgaacttcactctctgatgcacagttcttttaataaaggcgacttctctgccagcatctttgaattagtatcttcaggcgaggatattgaatgtccggggtacattgccaatgcattaacttggttgcagaagcaacttgaaccaagcggagtgatggaatga

SEQ ID NO: 75099 - DNA, 1956 bp, Vibrio parahaemolyticus
atgagcaaacaaagtatcatcactgacaacgatagagatgcgggagtcgtcgaagaaatttgcggctaccttactgaagttcctcctcgcagctactttcttttcgctggagcaggttctgggaagacgagaactctcgtagaggtcttgcggcggattactggagtcgtaaaacacgaaaaaggggagctgcttgctagaaacctgcgtttgtatgggcgttcaattcgagtgattacatacacgaaaaacgcagttggggtcattaacgggcgcctaggggagaatggcctagtaaaggtatctaccatacacgcattttgctgggagctcattagtggattcaacgatgatatcaagacggctcttattgcaatcaaagaagctcagcttgaaaaggaaactgaggaagcacttgcaaagccaaagggcatcactcctgctaaacaacgggatttggatgagataagagaagatatcgagggatttagaaacaccgacctatttatctaccacccggatcgtatgacatatggcctaggagcgcttacccacaatcatgtgcttgacgtaacagcatggcttttaaaaaaccgaccaaccttaacgaggatcctaaaagatcaacatcctattgtactgattgatgaatctcaggacacaatgaaaggtatgctggatgccttattgactattgcagaaccgagaggaagtggtctaactataggacttctaggagatcaccgacagcgaatatatatggatgggcatgccgatcttccgagtttagttcctgatagctgggcgatgccagagctgaaaatgaatcatcgtagccaacgcagaattgttgacctaattaatacaatttgggaagcgaagctagaaggacgaactcaacctgctaatggaataaggcagcattcaagaaccgagaaagctggtggttttgtacgaatttatataggtgacacaaagatatctccagaagataaagctatcggtgaacgttggtgtgcagctcagatgtgtagcgcaagtggcgttgaggcttggtcaaaaggagaatttcaactgctcgcacttgagcataagcttgttgctacgcgtggatcttttcttgatatatttagtgcaatggttctactagatccaaatgcggccgcacccagtggaagtggagagaataaaggtccggctattgtgcaagccttattgaacgaaattaccgatttagaggggtgtatcaatcccaatgggacaattgatgagtttaaagtcactgaggtttttaggcgatatgactgtcttgatgggataccggaagatacagtagagcgagcaaagcgtgttgaagaaatacttagagcaattgaaactttcgccgcagcttgtgcaagacctcttgcgaccgtgggagaggtgatcgaaccaatcttgagtgccaaactgtttaacgttgatactcgcttagctgttgggtatgcagacaaatcaccttcaccttctgtgccagctagaggtgaagaagaatccaaacaagataggttgcgtcgcggattgtgtgcactattttcagccccttggaatcaattaaaaaaatactgcaactatctatctggcaattcagttttagctactcaccaagtagtaaaaggttcagaatttccacatgtgatggttgttatggatgataagttggctggtggccaccttttttgttacgacaagatttttggtggtgttaatctaagcaaaagcgacagcgaaaacataaataaaggcaaagaaacaaccattgatcgaacactacgtttactttacgtaacatgcagtagagctgaagattctctcgctcttgtgctttggtcatcagatccaacagcagccctagaaagagtaaagaatagtggttggtttaatggcaatgaagttgaggcgataccatccccctaa

SEQ ID NO: 75100 - DNA, 1788 bp, Xanthomonas axonopodis pv. phaseoli
atgagaatttctaggatcaggttgatcaatttcgccaatttctcggatattgatatcgagacaggtgagagcattgtcatcgttggcgaaaacaaggtcggcaagagcaatttcattcgcggcctgcagttgatccttgatcctggtttgtccgaacgcgacagacagttgggacttgagcacttctgggatgggttgggtgaagacaaggttggcgagactgtggaagtgtcagttgatctaacggactttacggacgatccgcggttgatggcccacctcaacgattgcgtgattgatcctggcccacccatggtggcccgactcacctaccgcttccagcctaagacgggcctggggcatgccccggaatcgttgaaggactatgagtatgtgatcttcggtggcgacgatcccgatatgcgtattggcggcgcacttcgccggatgttgccaatagatgttcaagtagcactgcgtgacgctgaaaaggaccttgcgagttggcgcaattcgccattgagaccgctcattgaggatcttgccgcgtcgttgaatgatgacacccgtgaggagattcagaatcaggtcgaccaagcacagcgagagctggctggtcacgaggaagtggtagcgacagcagaacggattagcgaacggctaatcgccatcgctggggagcaacatgccgttccgatgtcgctcggacttgcgccaactcgagtcgacgcattgctgcgcagcctgcggctgctgatcgacaacggcgtacgcggagtcggcgatgcgagcttgggaaccgcgaacctgatcttcctggcgctgaagagtctcgaactcgaccgcctcgtttccgatggagagcgcgaccacaccttcttcgtagtcgaggagcccgaagcgcacctgcacccacacgtgcagcgtctaatctatcgttacttccttggcacgggggcggaagatggtgatgaacagccaccgctaacgacaatcctcactacccactcgccacatatcgcaagcgttgcgccgatcagatctattgtcctgctacgccatgacgcagcggaaggcaagactgtcgcggtatcgacagcaaacgcacctttcacgcagagggatgaagaggatctccaacgttacattgacgtcactcgcggcgagattttcttttctcggggggtgattctggtcgaaggcgacgccgagcgcttcatcgttcccgcgtttgccgaggtactcaatattcccctcgatatgcttggaatcactgtgtgctcggtgggggggaccaacttcaccccgtatgtaaagttactgggccccgaaggactcaacatcccccatgtgatcctgacagaccgtgatccgaccaatggtaatcatccattggtccgcaggcggcttatcaatgtccttgacgtgattgagggcggtgtcgatcacgaggaattggatgcggacgaagtgatcgagcttgccgagcagtacggatacttcgtcaacgagaacacgttagagcccgaactatttgcaggtggactggcggaggacatgcaggaggtaatccgggaggagcttccgcgattgaggagagaaactctgaatgcattgcagcagtgggtggacgatcctgctcaaattgatgaagactggctgctcagattaatcgagaggatcggaaaggggaggtttgcgcaggcacttgcgccgtcggtgtcagaggacgtctgtccagcttacattcgttccgctctggagcatatccgtgatgccatcgcgtag

SEQ ID NO: 75101 - DNA, 1338 bp, Xanthomonas axonopodis pv. phaseoli
gtgctcaatcgaaatagcgtcgcgtggcgtagtgaggaggaactcgctgcttgggccgaggcttacgaggccggtcttcgcgacgagggcctaattgactacgatgacatggtggtcttcggtcagcgcttgatcgccgataacgactgggtactacctctggtccaggcaaaatttcccgtgctcgtggtggatgagtatcaggatctaggcgtggcgcttcatcgcatcgtcaaacgccttgccttcgacggtggggtccggcttttcgcggtcggtgatgcggatcagtcgatatatggatttacgggggctgatggcgcgttgctcatggaattggcggctcgcagcgacattgagcccgtccagcttcaattgaattaccgttctggcgcagggatagtaactgcgtcagagatggcgcttggagaagcccgaggctatcaagcgagcgatcctgcgcgacaaacgaccatcgaattcttactgcgcccgcgtggtatggcagatcaggctgcgcacgccgtcgcgcagatcattccggcggccttagcctccaagccgggacgaacgctgggcgatatcgcgatcctatacaaagattatcgcgcaggcgatatcgtggctgaagctgtggcaactggcggtctcgactacatccgtgtggataccgcagcaccttaccgcaaggttgccctaacaagttgggtcgaagattgtgcggcgtggtgcggggggggctggcgtgtcggacgcccacaattgcgtggactactcgaccgctatcgcgcatttcatcgggcgagcttggacgatgcacaggctaggcgcgaagagcaagcgctaaccgctttgctatgggaactgcgcgctgaccagcaacctgcgcgagaatttgttgcttcgttgcgcgacggtgtagtggatcatctgctggcggttgaattggcgctcgctgatcaggaggagcaactggatcgtatgacggcagcgctcgccgaaggcggtgcacttgcttcgctagacatcacgagtttgggcggtcgggacggttcgcccgatcacctcaatctgctgacactgcattccgccaagggctgtgagtacgacgtcgtcatcatggttgggctcgacctcggaaatctaccgtggcgcaacgagagtccagagaagttgcgggaaagccgccggctgttctatgtgggactcacacgtgctcgcgacgaggtccacatgctgtattcgggcttcgttgatggccgctatggccccatgcgccttgggcgctcgccattccttgatgagctggaggcgcgaatgcgcgccgctggcatttga

SEQ ID NO: 75102 - DNA, 1788 bp, Xanthomonas fuscans subsp. fuscans; identical to SEQ ID NO: 75100

SEQ ID NO: 75103 - DNA, 1815 bp, Xanthomonas fuscans subsp. fuscans
atgccatcgcgtagtgtcagcacagcctacttggctcaagccgtcgaactggctgggaatccgggtcagttggcggcttacaactctcagggacattgtgtggtgctcgccggtcctggaagcggcaagacgaagacgctcgtgctgaaactcgcccgcatcctggcggaagacgtcgagtcccctcgtggcgcagcatgcatcacgtatagccaagaatgcgcgcgcgagctcactcgccggattgaagccctgggacttcgacaagcacccaatcttttcattggtaccgtccatgggttctgtttgcgccatctgttgataccgtatggacgcttggccggtttgccgataccgttccctctttcggtggccacccaacgagtcagcgatcggttgttgaagcaaactggagacgcactttttggccagaaccacccgtacaaggtcattgacctcgggcggcatcgccgctccgtgctcaatcgaaatagcgtcgcgtggcgtagtgaggaggaactcgctgcttgggccgaggcttacgaggccggtcttcgcgacgagggcctaattgactacgatgacatggtggtcttcggtcagcgcttgatcgccgataacgactgggtactacctctggtccaggcaaaatttcccgtgctcgtggtggatgagtatcaggatctaggcgtggcgcttcatcgcatcgtcaaacgccttgccttcgacggtggggtccggcttttcgcggtcggtgatgcggatcagtcgatatatggatttacgggggctgatggcgcgttgctcatggaattggcggctcgcagcgacattgagcccgtccagcttcaattgaattaccgttctggcgcagggatagtaactgcgtcagagatggcgcttggagaagcccgaggctatcaagcgagcgatcctgcgcgacaaacgaccatcgaattcttactgcgcccgcgtggtatggcagatcaggctgcgcacgccgtcgcgcagatcattccggcggccttagcctccaagccgggacgaacgctgggcgatatcgcgatcctatacaaagattatcgcgcaggcgatatcgtggctgaagctgtggcaactggcggtctcgactacatccgtgtggataccgcagcaccttaccgcaaggttgccctaacaagttgggtcgaagattgtgcggcgtggtgcggggggggctggcgtgtcggacgcccacaattgcgtggactactcgaccgctatcgcgcatttcatcgggcgagcttggacgatgcacaggctaggcgcgaagagcaagcgctaaccgctttgctatgggaactgcgcgctgaccagcaacctgcgcgagaatttgttgcttcgttgcgcgacggtgtagtggatcatctgctggcggttgaattggcgctcgctgatcaggaggagcaactggatcgtatgacggcagcgctcgccgaaggcggtgcacttgcttcgctagacatcacgagtttgggcggtcgggacggttcgcccgatcacctcaatctgctgacactgcattccgccaagggctgtgagtacgacgtcgtcatcatggttgggctcgacctcggaaatctaccgtggcgcaacgagagtccagagaagttgcgggaaagccgccggctgttctatgtgggactcacacgtgctcgcgacgaggtccacatgctgtattcgggcttcgttgatggccgctatggccccatgcgccttgggcgctcgccattccttgatgagctggaggcgcgaatgcgcgccgctggcatttga

SEQ ID NO: 75104 - DNA, 2049 bp, Bacillus okhensis
atgtacatatctagggtagaaattaaaaactataaaaatttcaaagctaatataattgaatttaacgagggtttaaatgtaataattggtcataataatgctggaaaatcgaacttattaagagctatggcactaatatataatccatctgttaaaaagaacctatcaattgatgattttaataagcaacttacattagaagaattaaaaaagcagccaccacgcatcaacgtatcaattactcttagtcaagaaaaagaagaaaacctaatgggagatgatttggtagtagtaagtcaatggttaacgaaactggaagaaccatacgaagctaaaattcattatgaattttgtcttccgctaaaacatcaagacgagtatgaacaaaaactttctactgcaacctctgtaaatgatgcatgggaaattatagatagaaattttctgcgtttttatacatacaaaatttatggaggaaatttagaaaatcaaattaccgtggatagtgagtatatgaaaaaatttgattttcaattcttagatgctattagagatgtagaaagggatatgttcagtggaagaaatacattattaaaaaatgttttggatttctttatggattatagtataaaatccaatcaaggtttagatgacgatgaaaaagaacaacaaatcaaagaggaaaaaaagaaatttgaagatcaagctaaagtactgatggattctttgaatcagaggatgttggaaggaaaaaaacaaattttatcgtattcaaaagagattggggcttcatttgataatgctgaaccaaactttgctggcggtataacagatgtcgaactctattctgcacttaaactaatagtggagcatcatgatggaattcaactacctataacgcataatggccttggctataataacttgattttcatgtctttactattggcaaaaatgcaagtaaatgcgagtgaaacgtatttaggaagcaacgcaaaagtctttccaatgcttgttatagaagaaccagaagcgcatttacatccttcgatgcaaaagcaattattaaagtttttgaaaaagaatttggcagagaaaaaggttcgtcaaatattcgtaacaacacattcgactcatattacaggagcgttagagttagatgaattaatctgcttatataaaggtgagaatgaaacaaaagtcagctacccaggtaaagtttttggtactaatgtagaaagtaaaaaatatgtacaaagatttttagatgcgacgaaatcaaatatgctttttgctgaaaaacttatattagttgaaggtttagcagagcaattattaatgtctatttttgcagaatatcttggaaagtttttagaagacgaacatgtagctgtaattaatgtaggaggaaagtactttgaccactttttgaagttgtttaattctaataattctgctgcaataaatagaaaagtagtttgtattactgatagggatccagtaaggaaagagcgtttaattgagggggaatcctatacaaaatgttatccatttgagatgaatatagaagctgataaatatgaatataaaattagtaagcaggatgtggattattcgacgaacattaagttttattttcaagatgaattaaaaggtaaaacacttgaatatgatttagtgcgattcaacccaatgttgaagatgttagtaacggattcaatgtctaataaagaagaaattaaagcgctaatgaagctatttcaagaaggtaaagatattgataaactttatagccgattaagtaaatcaaaagaaaatacgagaataatagatggcttaaaacatgaagaattaagttggtcagaagatgataaaaaaatagcactgatagctgctaggtatttaaattcagttggtaagggagttaacgctttggaattagcctacgcattacaagaaaacttagctaagcgaggttctgaagactttgttgagtttgtcgtcccagactatattcaagaagctatagattgggtgtgtgaaaattga

SEQ ID NO: 75105 - DNA, 1740 bp, Bacillus okhensis
ttgattactattacatctagtgacttaattgatattgaacagcactttaaaataacagctggtccaggagcaggaaaaacacattggttagttaatcatataataaatacagtgaaaaattctgcgcgattggagaagacgcgaaaaatagcttgtattacctatacaaatatcgctgttgaaacgattttgaaaaggcttggtgctggtgtaactgacagagtagaggtatcaactattcatagttttttatataagcacgttgttaaaccatacttacattacttatcagatgaatttgaaataaatgtctcaaaagttaatggacatgatacttatggtccaagatattcaatcgtgaaaaattggttagaaaatcataaacgtgtagatgaacttactcatcctaattcatataagcaattgctattcgggcaaaagttagactctttgtttatctggctcaataatctacagtacatgtacgactcagacggaaatttaaagttagtgggtaatcaagaaaaagtaggtggagtaagaaaagtaactgatattttagcagatgatttgattagttataaaaaaatattttggtcatcgggtaaagttgatcatgatgatgtattattctttagttatttattaataacgaggcatccttttatactaaacgtattaagagccaaattcccatactttttcttagatgaggtgcaggatacaaatcctattcaagcaaaaattattaagttgatagctaaagaagaaacaatagttggcattattggagatccggcacaatctatttttgcgtttcaaggggcgagtatagatgaatttattaacttcaaattagaaaatatggtcgaatatcaaatccttgaaaataggcgtagttcgaatcaaattatcgatttgttgaatgaagtacgaaaggatattgcgcaatctaaatataaaaatgttgatggtgaactaccaattttatttattggagatactgtagatgcttataaaaaagtaaaggaactatgcggagaaggttcatcgattcatacactttcaagggataatcccactgctaatgcaatgaaatcgttggttgcattaaatggaatagatacgaagctattaaagaaattcaaagaggccgatagtaataaagatagaccgaggataattttaaattctatagaagcagttgaatttgcacgaataggtgattataaaaatgcattagaaaaaatgaaagtactatttacagattgtcctgagaaagaccgagttaataactcaattaaattacttcaagaactattaactaaatatgatagttataatgaaacttccttaatcgcgttttatacagtgataaaatcccatattccaatgagtacctttaaagcgggtgcagccaaagacttttatgatggaattacatacacccaacttgcaatatgtataaattataaagaagataccagtcagcacagaactattcacaaagcaaaaggtgatgagtttgaaaatgttttactaataccaagttctttagattttcttcttaaccctgatttggagaacgaagaagatagggtttactatgttggattaagtagagcaatcaaccgtttatatattgtcttttctaaacttacgaagaagaatcaaaagttcatagaagaacaatacaacattaaagtggaggacttaacaaaagttcatcatttgatttga

SEQ ID NO: 75106 - DNA, 2316 bp, Klebsiella pneumoniae; identical to SEQ ID NO: 73440

SEQ ID NO: 75107 - DNA, 1878 bp, Klebsiella pneumoniae; identical to SEQ ID NO: 73441

SEQ ID NO: 75108 - DNA, 1785 bp, Klebsiella pneumoniae; identical to SEQ ID NO: 72734

SEQ ID NO: 75109 - DNA, 1818 bp, Klebsiella pneumoniae; identical to SEQ ID NO: 74885

SEQ ID NO: 75110 - DNA, 2217 bp, Vibrio vulnificus
gtgcatattagtagtttaaacctaattaactaccgcaattttaagaacgtcaaacttaactttaacaaaggtatcaacactgtaattggtgagaatgcatcaggtaagaccaacttatttcgtgctctgagattgctgcttgacaactcgatgcctaggtcgtcgacaaaactgtctgagagtgatttctgtagagcgctaggtagttggaaaggtcactggattatcataagttgtgagttcgatgatatttctagtgatgaagctagtcagtcactgttcctccatggaaatgggaatatcgaaggtgaagaagagatagtaaccaaagcaacctacaacctcatattcagacctaaagctcatatacgccaagcgatttcaacaatccccgttggcgacaccacagcgttagaagagtatttaaatgatatctcaatagatgactatgaaacggttttaactgggaaaagtactgcgaattttgctgatccagaagtatataaagctattgtcggtgactttgatgctgttgcttttccaaatgagctaaacaacccagaaattgggatacgactaccatatatcctaaatatgccgaatgaggtttcattcacctttattaaggcattgagagatgtggtttcagacttccacaacaatagaacaaaccccctgctaacactgttaaaaaataagtcgggtgaaatttcccaagaggattttcaaccaatagctgagctgattggtactttgaatgagaatattgaaggcctaaatgatgtttgtgatgttagagatgacattgcatcaacagtaggcgatacagttggagatacgtattctccaagttcaatctcgatccgctcaagtttgacagatgattcagaccagctatttcagtccttgaagctttttgttgctgagtcaaacgatgggtatgaaggtgctattcatgaaatgagtttagggggcgctaatcttttatacctcacgttgaaaattttagagtttaagtatcaaaaatctaatcaatcaatcgcaaattttttattgatagaggaaccagaagctcatattcatacgcatattcaaaaatcattgttcgacaacatcaagtacgaaaatactcaaattatttattcgacccactcatcacatatttcagaagtcagcaatataagaaacatgaacattattggtctggtagatggaaattgtgaggttttccaacctgctaaggggctgaccaatgagcaaagtggcttcgttcagcggtatctagatgctattcgaagcaatctattatttgcacgaagtgtcattttagttgaaggtgatgcagaagaaattctaatacccgttttgtttaaaaaatcaacaggaataagcttggatgagatgggaattagtcttgtcaatataagaagtacaggattcgaaaatatcgcaatgctctttaacgatgaacgtattaggaaacgctgtagtattattactgacctagactctgcgtttttcgatactgaaatccaagaacatgatagtgaagctttaaagaagaaaaagagaaaagctaaaggttcagaggagtcaggagctaatcgtaaactgatacttgatgagttctgcgataataacccttggttaagccctttctatgcagaacacacttttgaagtagattttattaagtcttctaatagcgtatatcttaaaaatgttgttgaagacgtttatgttgatccggcaacaagagtcacagccaaggaagatctatctaatgcagatatcgccacatctggaatgagggcattaacgatggcgaatcatcaaggtaagggctggtttgctattactcttggaaaggcgatcaactttaaagtagtaattccagagtacattcttgaggcaatcaaatttgcacatggtgaatttgatccagttcttacctttaaaatactaagctatcgatttaactctattaaggagcatgtcgctgaaggtaaaaagcacatggaaaaagctgacgcggatggagacatggacctaaaagctcggtgtgaagcttatctgctaccattggaaacaggtatcgaagtatttgcgcctaaatgggatgtattcgactcggctaacgatgacatcaatgatattaaggcttcatttatagctgatttcccaacagaaaatcatcatttgctagaaaggatttaa

SEQ ID NO: 75111 - DNA, 1797 bp, Vibrio vulnificus
atgttcgtatgggataaagatgatcttaatgatgagcaagtggatgctattcgacaagcgggtaatgtattccttgaggcgtgcccaggtagtgggaaaacacgaacattaacgtataaaatcgctcttgaattgtctaagttgaccgatgaaaagaaatggattgtagcaattacatacacgaatcgtgcagctgatgaaattcgtgagagaatagagctactaggagttgaaacttctcaactatggatcgggacgattcattcattttgcttagagtggattataaaaccttatgggatataccatgacaagcttaaaaacggtttcaaagtcattaactcatatgatagtgaagatattataaccaatatttgtcttgggttacgacctcaacaatatattacatactatcaatgttcacatttttatacaccaacaggtctgaacattacaggaagcggtgggagcttagctactagtgttctggaagcttatcatcaacacctagacaataatcaccaaatagattttgaacagatattgtacttctcttacgaactcctacgtaacaaggtcgctatatcaaaaatattatctaatcttttttcttacttctttatagatgaatatcaagataccaaagagattcagtactcaattgtagcgagcattatgagggctaatccgagtaaagtgacaacatttatagtaggtgacccaaaccaagccatatatacatcattaggtggttatgcaatatctcatacagaacttgaatctttaaccgcagcttcatttactccaatgtctttggataaaaattatagaagctcacgaaagattatagagtattatcgaaattataatgttagcccaagtacaactagtgcagaaggtcgtgagagagattatcaaagtacaataacctatgatcaattaactcacaaagatgacttagttgagcaggtaagtcgatatattgagcacaacattgaaaattgcaatatcccagagcgtgatatttgcgtcattgctccttggtggacgcatttagctgcactaacacgaaatttagtgaatcggttgcctcaatatagttttgatggccccggtttagtaccattctctagagaccttgagaacttctggtacaagcttacaagaattattctcacggagccttcccctagcatgtatgtcaaacgtttaaggtgggcatctgaaattttatatgatttagaaattgcaatggtggacatagctcctttcacttcgaaagaactcttaaaatcaattaactcaatttcaatagacgaggaggacggaattacttacctatgctctttcttcgatgagctattcaaaaggttaggggttgattactctctttatccaatgttgcaagagcactatgaatcttttttgagtagtacagaagatcgcatagacaggctccgcagagatagcgaggaatttgctacagatatagaggcatttcgaagagcttttaagccgagaagtggaataaaagtttctactatccacggggttaaaggtggtgaatatgacgcagttatatcattcggtttacttgaggggttagttcctaattttaatgactcatcagaagagagtgcgaagaagcttctctatgttattggctctagggcaagaaaaaacttgcacttgatctctgaaagagggcgaatgcaaggctatagcccaaatcaaaccgaacgtacgtccactgaagttcttcaacgcgtgcaatttccttatgatcgttttgtatag

SEQ ID NO: 75112 - DNA, 2217 bp, Vibrio vulnificus; identical to SEQ ID NO: 75110

SEQ ID NO: 75113 - DNA, 1797 bp, Vibrio vulnificus; identical to SEQ ID NO: 75111

SEQ ID NO: 75114 - DNA, 2202 bp, Clostridium botulinum 202F
atgaaaatagcatttgttgatattcaaaattttcgtaaattaaaaaaatgtcacattgattttagtaaggaaactacgttgtttgttggagcaaataatagtggcaaaacatcggctatggatgcacttggtaaatttctagcaaagaggagctttgtgtttaatgacattacgttatcaaatcacgaagcaataaataatattggagttgagtgggaaaaagaagaagcactacttccagatacaatagttttatgggaggatattgttccaatattagatatttggttaagtgttgctaataatgaattacaatatgtgtcgcatatcatacctactcttgattggaaaggggggattttaggtattagatttatacttaaacctaaagatataagtaaattgtttgaagaatatagagaggtatattttgctgcaagaacaactgaatcaaaaaatactacaaaggtactatcattatggccaaagaatttatgtgactttattgaaaaaagattcgcatcaatatttgtacttaaagcctatattttagatccaagcaaggttaataataagattccacagaatacagattttcaaatggaatgttttgaacaaaatccattgaacggtttgatacgtattgatatggtgggagcacaaagaggatttgctgatccaggttctgaagaaaatggtgaaaaatcaatacatagtggtggtttatctgcacaacttagagactattatgataagcaccttgatccggaaaaaccccccactcctgaagattttgaggtattgcaggcaatcgatagtgcaaaaacaattttcaatcaaaatctaaaatcgaaatttaacacagctatagaggaattagaagcccttggatatcctggagtgaatgatccacaaattactatagagacaaaagttaatgcgagtgagacacttaatcatgattcagcagttcaatattcattaggaagtgaccataataatgatttaaagttacctgaaaaatacaatggattgggatatcaaaatttagtttcaatggtttttcttttaatgcgctttagagatgattggatgcaggtgggcaaagctaaaaaaacaaaagaatttcagggtaaaaagatgccaccactacatttagtattgcttgaagaaccagaagcacacttgcatgttcaagtacagcaggtttttataaaaaaagcatacggtgtcttaaggaataattcatttcttaaaaaacatcaagatttttcgacacaacttgtgataagttctcactcaagtaatattactcatgaaatgaatttttctgatttgagatatttcaaaagattacaggctacggaagattgcaaagtaccaacatcagaggttgttaatcttaccgatgtatttgggaaagatgatgaaaccaataggtttgttacaagatatttaaaatctactcactgtgatttattttttgcagatgcattaatattagttgaaggttctgctgaaagcatgttgattcctcattttataaaaaagaaataccatgaacttaatcaaagatacattagtattttagagattaatggaagacactctcaccgattaaaaccgttaattgaaaaattatgtttgttaacacttgcgattacagacatagatcctgctgatgaggaagggtatcataaagcacaatgtccagaaagaaataaaggatttatttcgagcaattacgcagtaacatcttggttattaaatgaaaaatcgttggatgtcttacttgatttgcctacaaataaaaaagtggtgaatttcaattgcccttatgattactcaatagccatagcgtatcaaacaccacagaaaatattatttgattcaaaggaagttgaagcattatcaagtacatttgaagattctttgatatatgccaatttggaattatttaaaaatcataatggagatggaatttttcaaatcgctaatagcgtaattaataattctaaaacttttgaggaacttcatttagcattatattcaaaattaagggaaggtagcgctggtaaggcaggatttgcacttgacttaatatattctattgaacctgaagaattaattgtacctccatatattgatgaaggattaaattggttacaggaacaactaaaacaggaagtcagtaattgctag

SEQ ID NO: 75115 - DNA, 1854 bp, Clostridium botulinum 202F
atggataaaaaagaatatataggtgatgatcatattgatgaccatgttgatgaagaaatcaagaaatgctttgagaaaaaaaataaaaaaagtttttttacctttgcaggtgctggttccggaaaaacaaaaagtttagtaaatatattaacttatatagaggagatgtatggttatgagcttttaacatattcaagacaagttgctgttataacttatacaaacgcggcatgcgaagaaatattgaatcgtatagattttaaatcagtatttgctgtttccactattcacagctttttatgggaactcataaaaaatcagcaacgagatataaaaaaatgggtaaaaaagaatactgaaacagaaattttagacttagaaagtcagcaattaagaggacgagctagtgctacttctgataatagggctaaaaaaataaaatctaaaaaggagcgcctattaaaaattgatatggtgaaaaatttttcatataatcctaatggaaataattttagatatgactatcttagtcatgctgaagtaattaaaatgggatcagaatttattgctaaaagtgatactatgcaaaatatactaattaataagtatcctattctcctaattgatgaaagtcaagatacaaaaaaagaattaatagatgcattactttctctttatgaaaggcataaatcagaaatagtaattggcatgtttggagatacaatgcaaaaagtgtatacagatggaaaggacgatttagctttatgtattccagatgattgggtaaagccagttaaagtaatgaatcatagaagttccaaaagaataattaaattggctaatgaaataaggaaaagtttcgatgataaaatgcaaagctctcgttcagatgctattgaaggaaatgcttacttatttattgctgacagtaaaagtgataaatctaagatagaaagtttagttgcagattccatgtatgaattaacaaatgatgataaatggttagaaccaacagaatgtaagactttaatactcgagcaccatatggcaggaagtagattggggttttacgaactattcaagacattgtattctgtgaattcactaaaaacaggtattcttgatggaacacttcctgagattcaactgtttatcaataaggttttgccactaatctcagcttataaaagaggcgaaaaatttcaagttgctaaaataattaagcaatattctccacttgttaataaaaaagcttttggtgaatcaactaaggagcctttattgtgtctaaataacgcttatcaatcagtaaataaattatgtgaattatgggatgacggaaagattcctacatgtttagaagttatagcgaatatagagagtagtggtttgtttgaaataccgaatcgattacaaggtatagctgatataaaaagtaatgaaaacatagatgagattacaaactctctaataacctccttttctagctcttttagccaaatagaagcatatgcagcttacgttaatgatgaaacagcatttgcaacacaccaaggagtaaaaggacttgaatttccccgtgtggtagtagttatggatgatgaagaagctcaaggctttctatttagctatgaaaaattatttggtgctaaggaaaaaacgaatacagatatgaaaaatgaaagagagggaaaggatactagtattgcaagaacaaaaagattattctatgttgcatgtacacgtgcaaaacaaagcttagcaattatagcatatacacatgattgtaatgcagttaaacagactgcaattgagaatagttggttcttagaaaaagaaattactattttgtaa

SEQ ID NO: 75116 - DNA, 2217 bp, Escherichia coli
atgtttataaaaaaactcactttggtaaactatcgaaatttcaaaaaagccaatttttactttgataaaggcataaacacgattattggtgagaatgcttctgggaaaacaaatttatttagagcgataaggttattacttgatagctcaatgcctaggtattctctgaaattaaatgaaggggattttaatcgttcgataggaaactggcggggacattggataataatcagtgtcgaatttgacgatatagccgcagatgaaactagtcaatccttatttcttcatggtattggtaatgctgaagatgaaattgttagtagggcaacatatagtttaatattcaggcctaaatcttttattaggcaggatttgtcaaaaataaatcctggtgatataaatgctcttaacgaagtacttaataacataacaattgatgattatgaaactattctagttggtaaaggtgcccttgatctaagcgatagttccaattataaaaaaatagtaggtgattttgatggtgtttcattccctaaaattttaaaccatcctgaacttggagttaaattacccaatatacttaatatcccaaatgaagtttctttgactttcatcaaagctcttagggatgttgtatctgactttcataataataaaacaaaccctttactaaccctcctaaaacgaaaatctggtgaaataagctcaactgactttaaaccgattgctgacctagtgcgaagtttaaattctgagatagagcaatttccagatatctgtactgtaagtagtgatatagcaacgactatcaaagatgctgtcggggatacctattctccaaaagggatgtcgattaaatcaagtttaagtgatgagtctgacgaactatttcagtcacttaaactctttgttgcagaatctgttgatggctatgagggggcgatacatgaaatgagtcttggaggagccaacttactatatcttacattaaaattattagagtttaagtaccagcacgcgaatcaatcaatagccaactttctattaatagaagagccagaagcacatattcatacacatattcaaaaatcattattcgaaaacataaagtatgacaacactcaaataatatactcaacacactcatctaatatctctgaaattagcaacataaaaaacatgaatataattggcttcgttaacggtaactgcgaagtttttcaaccttcaactgggttggctgatgaacagtgtgaatttatccaacgatatttggatgcaataagaagtaatttattatttgctcgcagtgttgttttagttgaaggtgatgcagaagaactattgattcctacattaatcaagaaggtcacggggttaagtttagatgagattggtataagcctaataaatataagaagcactgggtttgagaatgtagcattgttatttagtgatgagcggataaaaaagaagtgcagcataataactgacctcgatgaggctttttttgatattactattcctgaagatgccgataataatgatgttgaaataaagaccaagaaaaaggcagctgcatctcaaaagtctggagcagaaagaaaaaaaaggctgcaagatttttgtaataacaatgattgggttgaggtatttttcgcagaccatacatttgaagtggacttcataaaatcaggtaatagcaattatctagcaaacatcgttagagatatttacaaacaagaagcaataatcaccaactccataaatgaattaaattctggagatataaaaatatcaggagtcagagcgttggccatggctaattatcagggtaaaggatggttcgcacttacactggggaaagtcatagatttcaaaacagctatcccagattatatattaaatgcgatccaatttgctcacggtgattttaatagacagcttaaatataaagttttagaacatcgttacaattctgttattaaacatgtggcttatgcacaactacagataagtaagcttaatgaagctaaagatttagtcttaaaaaatagttggattaagtatataaaagcatatgaggatgggctaagtgttttcagccctaagtgggatttatttgatatatcaaaagatgatattgatattctgaaagcggaaatgatgaaagatctacccatcgaaaacaatgatattttggggagattataa

SEQ ID NO: 75117 - DNA, 1788 bp, Escherichia coli
atgtttgtatgggaaaaggaagaaataaataaagatcaagaagatgcaatcaatgcgcaaggtagtgtattattgatcgcatgtccgggaagtggtaaaacgagaacattgacttataaaatagctttagagctatcaaagcttaatgatgataaaaagtttgtactagcgatcacttatacccataaagctgctgatgaaattaaagagcgaattgagttattaggagtagatacatcacgtttatggattggaacaatccattcattttgttatgaatggctgctaaaaccttactctatttatcatgaaaatcttagggacggttttaaaatactgaacacctatgattctgaagcgttaattacaacaatttgttcaaattacaaaactgaaaaagttaattattatgactgcaatcattactacacatcgaaaggcttaaaattatctggttatatcaaaaagcatggagcaatcaagaatatccttgacgaataccacattcaactaagaaaaaacaaccaaattgattttgagcaaatgctatacttttcataccaattgataagtaaagatgccatatcgaaaatattaagtggtgttttttcctatattttcatagatgagtttcaggacactaaagaaattcaatatgctatagttgccaaaataattcaatctagcgaaggtacaattaatgcatttgtagttggcgatccaaaccaagccatttacggttcattaggagggtatgcaatctcgcaagctgagctggagaaaataactaattctcgattttcatatatgactttagataagaattatagaagctcaaagagaataatagatttctatatcaacttcaatgtattagctagcaaaacaacttcggaaagtaagttccagaattaccaaagtgttgtaacatataatcaacaagtttataaggataatttagttgagcacataagcaagtatattgaatataatgttaatcaactaggaattgagcagaaagaaatttgcattctggccccatggtggatgcatcttgcagctttaacaaggactttagttacaagattaccaaatttcagttttgatggtccaggtcttgttcccttttccagagatattgacaatttctggtataaaatcactcaggtaattcttactgaaccatctccaaatatgtatgtcaaacgaatgcgttgggtttctgatatattgtcagaaatgcatttttgccatgttgatattcaaagattaaaccctcgactatttttaaatattattaacgatatcaaagttgatgaggtagacggtttgatttatctaagaaaattttttgatgaactatttagaagaatcaatgtagatatttcctcttaccctcaactacaagagcactatgactcttttttcaaaagctcacaagatagaattcatcgcctaaaaaaagataatgaacattttgccacagacataaatgcatttcgtaatgcatttaaaccaagaacaggtatcaaagtgtcaacgatacatggagtaaaaggtggagagtatgacactgttatatcattcggattattacaagacatggttccaaactttaatgactcaagtgatgaaagtgcaaaaaaactgttatatgtcatcggttcgagggccagaaaaaacctacatcttatttctgaaagagggagaagaagcaaatataaagattatgagtctacaaaggttctatctggaacaaaatttaactatgacgcagaccctttttaa

SEQ ID NO: 75118 - DNA, 2139 bp, Escherichia coli; identical to SEQ ID NO: 73140

SEQ ID NO: 75119 - DNA, 1782 bp, Escherichia coli
atgttcgtttgggacccaagagacctcaatcctgagcaggcggaggcagtgatcgagccatcaagtatctttctaaacgcttgtccgggtagcggtaaaacccgcaccttgacatacaaaattgcatacgaacttacacgtcgtactgacaagcggatcgttgtagccattacctatacccaccgcgctgccgacgagattcaagagcgtattgaagatctaggagtcgacacttcgggcctatggattggtacgatccatgcgttctgcctagagtggatactcaagccatatggcatctactcccctgaacttgcacacggttaccgtgtgatcgacccgcatgatcgtgaacgtctacttgagagactatgctctccatataaaggtgttactcactgggattgcgattactacgttactgagacggggtatcagcttggctgtgtagacaaaggaaaacaccatatcattcataagattttgaaggcgtacttcgacgagctttcagtgaaccgacagatcgacttcgaacttatcctttggcatgcctacagattgatgcatgacagagcccaaatcgcagtgctgctctcgcgtgtgttttcccacatccttgttgatgagtatcaggacaccaaacagatccagtacactattttgacatccatacttcgtgcaggcagcggaaagaccaaaacattcattgttggcgatccgaatcaagctatctatggatcactgggtggttacgctatgccagtggatgaattccgtacccgtgcagggatcttgattaaggagtttgcgctcagccgaaattaccgctccagtgaacgaattatcagttatttttcgaactacagcgtacacgcaacaaaaatcaacggtgcaggtaagcatgccaagtatcccagccgagtgacctacaatcaaaacgtaacatgcagcgatgtgcacgatgagattgtgagattgattcgggtcagtctcgccaacgctcactctcccgaaaacatctgcgtcctcgctccacagtgggttttgcttgcatccacgacacgaaaactagtggcgatgttgcctgaccagcaatttgatggcccaggtctcgtccctttcagtaataacttcgataatttctggttcaaggtctccaaaattttactaacggactcttcccccagactgcttgtcaggcgaatgcgttgggcaaacgacgtgatcaaagacctcgatagtttcggcgttgacaccaaatcattaactccgcgcattttactgcgggagattaatgctcttacaatcgatgaaacagacggactcagttatttggaccaggccttcaacgatctgctcaagaggctcgatattccccaagaaatccatcctgcgctcttgacccaccgtgaggcatttttcagcagttcggcagcgcgaatagcgcggctgcagaaggaaggggcgacttacatcaatcaagtttcattcttcaaaaaagtttttcgcgagcgagccggtatcactgtctccaccatccatggagtcaagggggccgaattcgacgttgttattgcctttggcttactggagggtatggttccgcactttaatgaagcaaatagacatatcgctgcaagcaagctcctctatgtattgagttcccgtgctcgtaaaaatcttcacttgatctcggagtcaggacgacagagaggaaaatacggtgtctatacctcgactgagttactaacgacttgccaattcagttacgacctggactaa

SEQ ID NO: 75120 - DNA, 1722 bp, Aureimonas altamirensis
atcattgcctttccagaactagacgccgacggcgccagtggcgcggcaattccggaattcttccatcagatggccgctgaagaggcgggcaagctcaaatgccgcctgcgtctcgaagcgacctggaccgatgacggttcgcttgatggtgcgattgaacagaaatactgggcggtccggactttcggggcgttcaccgacgctgattgcaccgagttgaaggctgccgaccgggcgcgaatccaaatgatctacgtgccggcgacgcgggatggtgcttcccaggtgacggcctttctgcgcggcaggctgtggcgtgccatcaactggtcgcagggagtccgcgacacgttcacaaacaccggcgccgccttgaacggcgctttcgccggggagccggccgtcgatgtgattgccgcagcggtgacgcggcgatggcaggaagtttacacagccgggaccgacacgacgccggtcttccgcccgctcgatctgcgttttgagcatttcattcggaaggtagaggtggtcttccgccccgacgaggtcggccgggagcgagccctcgatgacctgagcgacggccagaggtcgctcttccatttggcgatgaccgcggcgacactggacgttgaagccgggatcgtcgccgatcctgctggggccggtttccaggctggcggcgtaccgttaccggcgcttacgctcatcgcgatcgaagagcccgagaacaatctcgctcccttctatctctcccgcatcgtccggcagatacaggacctgacgaagtcgccgcaggcgcaggccgttgtctccagccattccccaagcatcctcgcccgggtggatccgacgcaggtccggcacttccggcttgatccgcacgatcgaacgacccgcatccgcccgatcaacctccccgttggcgaggaagaggcatcgaaattcattcgcgaggccgtgcggacctatcccgaactctatttcgcgcgcttcgtcgtgctgggagaaggtgcgtccgaggaggtcgttcttccccgtctcgccgaggcgatggggctcgacatcgatcgatcctttgtcgcggtcgttccgctgggcggtcggcatgtgaaccacctctggcgactgctgaccgatctcgacatccccttcgccaccttgctggatctcgactggggccgttctgggggtgggtggggacgtatcaaaacggcctgcgcgcaactgctcgcaaacaacgtcacgccacaggccatcttcgggcagcatctaaacccgcaagggccagccgccaatctggcggctttcgacgctttgccgatcgaggacactgcgaatatcacaaactggatgaattggctgcgccagttcaatgtcttcttctgcacgcccctcgaccttgactattcgatgctgaaggctctcccgctcgcctatcagattgtcgaacccggccgtcaggggccctcacctgcaggggagccgcgcacggcggttctcggcgaagacggtctgcctcatctgtacgccgccgaccaggacgttttgatgcgttggtatcggtatctgttcctgggacgcggcaagcccagcacccacgttcgggtgttgagtgcacaagacccggccgccctcgcagctgccgctcccgaagaactgcgcgcactcctgacgtcgattgtcgcccgtcttaccccgccgcctcccgcgagtgcctga

SEQ ID NO: 75121 - DNA, 1884 bp, Aureimonas altamirensis
atgcgccttattcggccagaggactggcgccccagcggcattgacgatctcgaaccggcggcgtggaatgccctgcgccacgctggctcggcgagcgtggtcgcaggccccggcgccggcaagaccgagttcctagctcaacgcgcggactatctgcttgagacgggcctctgccgagcgccgcaccgcgtgctcgcgatttcgttcaaaacagatgcagccaacaatctcgcgtcgcgcgtccgccagcggtgcccgcctgagttcgcccaccggttcgtgtcagtcaccttcgacgccttcaccaagagcctcgtcgaccgctttctcaacgccatccccgctgactggcgtccgacccgtccttacgaaatcgcctttccaaagcggaaggcggtagaagacttcctgacgctcgctcgcctcagtgcgccgccgcaatggcaggccgaaatcgccagctacagcgcgagcgactttgaggccaagatcgtcggcagctaccgcctgccggtcgggcctatcgcgcctcagagcgccgccgagttcgccatcgcgcgctggtgggcgacccaactaccgccgggccagccttctttgctcaccttcgtcggcatcaaccggctggcagagctgctccttcgggccaatcctcacatccgccgggcgctcatcgccacctatcccttcgtgttcgtcgatgaattccaagacacgacctacgcgcaatatgactttctgcattcagcgttctctggcgggcagaccatcatcaccggcgtcggcgacgacaagcagcggatcatggtctttgccggcgcgcgcaaggacgcctttcagcggctgcaagcggatttcgggggaacccgcttccccctcctcttcaacttccgttcctcgcccgacttggtcgctatccagcacgttgtcgcgcgcgctctggatccgaacaccgtcccaacggtcgcccagaccgcgcgccaggtcgatggcgacgtggctcaggtctggtcaagccagaccaaggtggcggaagccacccacctggcgcaatggatcgccaacgacatggccacccgctcccgagcgccgcgcgactacgcgctcctcgtgaaacagaagtccgacgattatgagcacgaactcgccggagccttcaccgcccacggtctgcggatccgtaacgagagccatacccttggcaaaacctcgcttcaggatttgctttccgatgacttaagccggctcgcgatcgcgatcttccgcctgggcgcgacacgccgcgcgccggccgtatggcaggtggtctcgtcttctgtcctggcgctgcgcgctaccgggcaagacgatgatgcgcgcgcggccaaggtcgaggcggaactcagcgcattcctcactgccttgcgcaccgacatggcggccactgccccgtcgcggcaaagcgctgtcgatttcgtcagacgggttttcggatatctggatctcggggcgatcgcccgaacctatgccgaatatggcgttggcgacctgcttgagatcatccttgaagctttttgcatccacttcttcgcttcggccgatggcgccccgaactggacggcctgcctagatgcgttcgagggggtcaatcagattccgatgatgaccgtccacaagagcaaggggctcgaatacgacactatcatcttcgttggcctcgacgaccgggcttggtgggctcacacccccggcgaccccgaaggcgtcgccgcatttttcgtcgccctctcgcgggcgaaacagcgcgcgatctttgccttctgccaacaacgcggccagcgaaacaatgtggctgagctctatcagctcctcactgaagccggggtgccggagatcgcgatatga

SEQ ID NO: 75122 - DNA, 2250 bp, Burkholderia glumae
atgaaaataaagacaataaaaataaagaacttccgattgctgcataatatttctctgcagcttgaagacgagaccacagtcgttgtcggacgtaacaactgcgggaagacctcgctcaccgacatcatccgcaaatttctatcggaacggagcacgttcgagatcgcggacttttcgagcgcttgctacgacaaattctgcgcggcgcaccgtgcacacctaaaaggagctggcgacgaagaggttcgcgtaatcgtaccgtcaatcgaactgcggctacacgtgagcttcgacccgacagttcctgagttcggcccgctccgcgaattcgtcatagataccgacgacaactgcacggaggccgtaattgtgtgctcgcggagcctcgccgatggccggattgcggatttgttcgagggacacgaagaaaccgtcctgcacgggaccgacgaatcgcactccgctggcgatcgcctcgcgctcttccgcagcttggccgaccgtgtgcctacgctcttcacgacgcgaatatgggccgaggaccctcaggaccctacgaacacgcgtgacgtgacgcccaaagcggtcacaaacctgctatcgctcggctttgtgaatgcgcagcgtgcactcgatagcacgggtggccgtgacacagacgtgctggcaaaggtgctggagggcctattccaaagtgcctccgtctcgacggcggacggctcccaaaagaacatagcggacggcctcaaaaaagccgttgaggaaatccagtccgggatggacacggatttcaagaatgagctcgcgaagctcatgcccgcgattgagcaattcgggtatccgggcctggataatgtgccgctacagccggagacgaagctcgaagtcggcaaacttctgtccaacttcacgaaggtacagtacgccggttacagcggcgtgcagctgcccgagtcctacaacggactcgggtatcgcaaccttctctatatcctactcaagatcgttggcttcttccgcgagtatcgggcgcatgtgaatgcgcccggcctgcagctcatcgtgatcgaagaacccgaagctcatctgcatcctcagatgcaggaggtcttcatccggcagttgccggagatcgttaaaaagctctgcgccttggagggtgaaaacgtctcgtggccggtacaattcgtcgtctcgacgcactctccccacgtcgcaaatgaagctcgctttgacacgatccgctatttcgccgtgacgtcgacggatctaccggttggggtgcgctgcactcaggtcaaggacctcagcagcgatcttgccggattgaaaggcccgacctctgacttcctgcaccagtacctcacgctaacgcgctgcgatctcttcttcgcggataaggcgatcctgattgaagggacgacggagcgactgatgttgccccaagtgatacgcgccctcgacgctgccgatccgtccctgaagcttcgcagccagtacattacgatcatggaagtcggcggagcctatgcacagctcttcatcccgctcctcaaattcctgggcctgcgcagtctaatcatcactgatctcgacgctgtcaaacgcaacgccaagaagaaactcgaagcttgccttgtccatgagggtgagaccacgagcaattcctgtatcaagcactggttcagctcggccgaagctgcggccccggagcccaatgcacctgccgataaaccggccacaatgcctgtaaccacgccgcaggctgcttcgacaggccccgtcccggcgacggcaggggtaactgatgacgacgacgaggaagaagttgcggatggagcgacgttgttccctctgtcaaccgcattggcggcagacaacgctgccaagactcgcgggagtctgcgcctcgcatatcaggtcccggaagcggcggacgggccgtgtggccggacgttcgaagacgcgttcattctcgcgaaccagaccttcttcggcattaccggcgcgacgaatgacgcactcgcgaaagccgcgcagaacaaggccgcgaagcaaaagaagtccaagttcgcattgacctacgcgattgagaaaaccgactgggtcacgccgcgatacattgaagagagcgttcgctggctcgccgcgagcaacaccgccgtcgctgatcctggcgtggcgctcgctgccgaggcccaggccgccaatgcgctcgtcgacaagccaacctccggtgacgcaacgtga

SEQ ID NO: 75123 - DNA, 1740 bp, Burkholderia glumae
gtgaatgagaacacccgacccaacccagctgaagccgccgctgccactgcatgggaagcgctgaaagattgcctcgacggcggatcaagctttgtgtttgaggccggcgctggcgccggtaagacctactcgctgattgctgcgcttcgctaccttctgcaaggtaggacacgggagcttcaacgcaggcaccagcaagtcgcgtgcgtcacctacacgaatgtagcgcgggatatgatcatcgcgcagactgatggtaatccagcgatctactgcgacacgacccacgcgttcgcgtggatgctcgtcagcccgtttcagaaacggcttcgcgagcttgtccgcacgctgccaggctgggccgatcgtgtcgaagaactcgacgctgcgaacatcactgccgttggatacgcactcggtcgccgctccatcgaagatggcacggcgaacctgcaccacgacgacatctttccggtgtttatcgagctcatgagatccgcgaagttccgcaacgcagcggcgtcgcgtttcccaatcatcctcgtggacgagtaccaggacacgaacgccaagctcgtcgaatgtctcaaggaccagttcatcggcaaaccctacgcaccgcaattcggcttcttcggtgaccactggcaaaaaatctatggcgatggctgtggttcgatcacacacgacgcgctgaagcgcatcgacaagaaggcgaacttccgtagtgcgaagccaatcgtcgatagcttgaatttgatccgcccggaactcgcccaggcggtcaaagacccggctgcgccgggcgaggttcacgtcttccacaccaacggatggggcggaaaacggcttacggcgaaccactggcaaggcgatctccctgcgaccgaagccgcgcaagcgctcaggaatgtccgcgccgagttggaaagcgttggctgggattttgccggcgacacgaaggtcctgatgctaacccaccgggcacttgcgacggagatgggttacggctcaatgcggaccgtcttcgcgttcaacgattccttcacgcgtaaagccaacgaggtcatcgcgtacttccacgagcatcttgaaccggcggcgcgggcctacctctccaaacgcttcggcaagatgttcgaagcatttgatgccgagcgtccagtgatgaattcgcctgcagacaaggtcaggtggacgaacgccatgagacggctctgcgaacttcgtgacacaggcacggttggcgacgtgatcgcacatctgtcctctacgggcctgccgatactctcagacgcagtcgtgcgccaggagagagcgcttgcggacgcgcttgcgggcggtgagccgctgaccggacgcgtcaaggaactccatgcacttcacgcggtgtcgtaccaagagatcatagcgctctgcaaatatctcgatggtcactcgccttttgaaaccaagcatggggtaaagggcgaccagttcgaaaatgttctagtggtgttcgggcgcggctggaacgagtacgatttcaatctctatcttaagatggccgggaaccctagcctaatcggtacgcgaacggcggactacgagcgttaccgcaacctgttctatgtcgcagtctcgcggccgaagaggcgcttggcgctggtcttcacacatcggcttgagcctagcgcaatggcaacgctatcgaaatggttcacggggtacccgatccgggatatcggcccggcgctatga

SEQ ID NO: 75124 - DNA, 1893 bp, Pseudomonas sp. SHC52
atgtacctcgctgagctgactattaagaatttccgcaagctacgtgacgccaagctgaaatttcagcctgggttgaatgtgctggtaggtccaaacaatgttggcaaaagcgctgtagtggatgcgcttcgaacccttctcgccggtcatgacgaaccgtatccccgccttgatatcgccgatcggcatcgtccgcttgaaggcgagccggctggcgacatttccttccattttgtctttcgtgatttaagccacgatgatgaagcggactttatcgctgcgctcaagcctgctgctgataagaccatggaagcccatatccatgtccgctataccgacgcagatcagacaggacgcttcagagtgaagcgttggtgtggcgatcatctggacgtgaccctcacctcagacatgatggaaaacctcaggggcgtttatctccaacccctgcgggatgccgctcagggacttcgacccagccgcaacagccagctggcacacctgcttcatatgctcacggatgaacctgggcgtgacgcaattaaccaagcactgaaggaactggacgacaagctccaacagaccgaagcgatccagaacacccattccgcgatttcgtcccgacacggcctgatgatgggcgatcaattggcacagacactcgctgttggacttagcgcgacggactttcagcggttatctgctcggctttccctcacggctcaagcaatggagattgagcagaatggcctgggtttcaacaacctgattttcatggcggtagtgctaagcgagctggccaagaatccggacgccgcgtatcgcagcttgattgttgaagagccggaagcccatttgcatcctcagctgcagcgcgtgttgttgcgctaccttgcaggcttaccaacgagcgaaggcgaaaaggcggttcagctgttcgtcaccagtcactctcccaattttgccagcaattccaagctcgaatccctggtgtgtttggttgagaacgatgccggcgtagagaccttcttcccgcgtgacatcaagttcggtaagggcaaacgcgaaaagctggagcgctacctggacgtgacccgagccgaacttttttttgctcgccgggtaatattcgttgaaggcgccgccgagctcatgctcgtcgatgctctggcaacgctcatggggctggacctgcgagagttcggggtcagcctgatcagtgtcgaagggctcaatttcgattctttcctacccttgttcggtgaaaacggacttcggatcccggttgccgtcgtaaccgacgccgatcctttcgatgaggaagaggcccacgagcttgcggaagttgcgctggatgcaggtaacatcgaagacattctcgccgaggctgcgtatctcgaagaaacggatgtccctgttggcgacgatgacgcggatgatccgttggctgagcctgcgaagaaaaagaagaagctaaaacggaaagaagtctacccgtcgctgggagacgaagtgaggctgtcgagcaacaccgtcaagatgaaggaatcggaagacgctttcgtcaaagtgttccacggtctgaaaacgctggaatacgaccttgcattgcttgaggcaaaccgcgacccgatgctcaaggctttagcagaccctcatccgatcatttcggcagcgctacgcaagatcgtcgatgctcagccagacaacactgcgaaggcgaaagcgctgttttgcggtatgttcgagcgtaaagcgagtagcggtaacctgcagaagggccggtttgcccaagctttggctgaacagatttccagcacggcaacgtgtgaagtacctgactatcttcgtaaggcgattgagcatgtctgtcagggagcgatcaagccatga

SEQ ID NO: 75125 - DNA, 1716 bp, Pseudomonas sp. SHC52
atgaagctctccgatgagcagaaggaaataatcaatgcgcctcttggacctatcgctgtcacggcctgcgccggtagcggcaagacggccacagcgatcaggcgactgattgccgtccggcaaaaaatggaaaatagtcggggtcgggttgtacttttgtctttctcgaacgtagcggtcaatactttcaacaaaggctacgctcagctcgcttcaaatcttccagacgacgctaaccgcaagcgtgtagaggtggacacgctcgacggtttcttcacccagcatgtgctgcgtccccacgctcaccggacaatgtcctcagaccaagccgcgtatcttctatccggtacagagccgttcctggctagctttaggtactggcctgaggaaggacgtccgacccctatcaaggacgtcaaagtgggcctggagcatgggagcttctacttcttcaccggtacccacgatgatttggtgaaactcgatactgtcattgcatcagatacgatcaaacgcttgggtcgcattggagcctacacgcacgagcttggccggtactgggtttatcgaacgttggtgggccaacctgcagtcttgcgcgcgcttgccgcccgctacccgcagattttggtcgatgagtcccaggatttgggcaccttgcatcaggctatcttggaattgctcatcaaggcaggagtccatgtctcgctcattggtgacgtgaaccaaggcatttacggcttcgcaggagctgacggttcgttcctgagcaattattacaaccgtgctggggtgaaggatttcaagctcacgcgcaattaccgctcactccctccaatcatcaacatcgccaatttgctctgtggccgcgaggatgaagccgatcgggagcctgaaaacggaggggcatatttcgttgggtacaaggactccgaacttcctaagctttttgaatcgttcaaagcgcagattgatgacttgggcgtgcgacatgaagatgcggtgatactcagtcggggggctgaccgagcggcagtgctttctggcaaagccgctcctcccggccaaggtacggttgctctgttcaccgaagcggcattgatccgagaccagcaaggccgctatcaagaatgcttcaagcttgtgtgccgagcggtggtgggtttgatggataagccgccgcttggcctcagtacccaccttcagggtgccccgcaggatgcatggatgcttgggcttaggcgactgctgtggagcttcatccgcgatgctgagtccgggctaccctcatctacactcttggctaaaaccgagtggcatcccaaattagtgaccaatctcaaaaagcttctctcgaccaccgaagggcaatttgggttgggggccgcagacaggctgggcaacaagctggctaaaaccggattgttggatctgcccctaactggcgcagtagacgagaaggatcgagaacccgggatcagggtggaaacgatccaccaggtgaagggcgagtctattggtgcggttctgtacgtagccaaaaagccgaacatcgacgccttgcttgccggcactcttaccgaagaaggtcgtatcggatatgtcgctgtgactagagctcggaaccttttctggctggccgtgcctcttacttgtctgaaagcactgcgccctaatctgattgccgctggtttcgaggaggttccttcccattag

SEQ ID NO: 75126 - DNA, 1584 bp, Listeria monocytogenes SHL010; identical to SEQ ID NO: 73566

SEQ ID NO: 75127 - DNA, 2376 bp, Listeria monocytogenes SHL010; identical to SEQ ID NO: 73567

SEQ ID NO: 75128 - DNA, 2355 bp, Pseudomonas sp. BICA1-14; identical to SEQ ID NO: 74454

SEQ ID NO: 75129 - DNA, 1953 bp, Pseudomonas sp. BICA1-14; identical to SEQ ID NO: 74455

SEQ ID NO: 75130 - DNA, 2067 bp, Pseudomonas sp. BICA1-14
atgaagctgcgtcatgcaaagatcaagaacttccgtctactcacagacgtgcagcttgcgctggaggatttgactacggttgtcgtggggcgaaacaacagtggcaagacctcattgtccgaaatcatacggcggctactggctgaaggcaccgcagcatttcagctcgaagatttctccagtgcctgctacgacagattctgcgcggcactggaagctcataccaatggccaagatgacgatgtagtcagggctctagttccgtttatcgagttgcgtttgacgtttgaatatgatcctgctcagccgcagttggggcctctcagtccattcgttatcgacctcaaccccgactgcaatgaggcggtcgttgtagtccgctacgagctgaaggatgggcagctcgcccaattgttcttggggcaaccggatacccccctgaccgatgaaacgaggatagctttctttcgctcgcttcgagaatgtatcccaatcaattttgccgtccgaatatgggccgaagacccaaatgacgcggagaacaaacgccagttacagccaggcgcgctgaaggcgttgatcaagaccggcttcatcaacgcccaaagaggcttggacgacataacatcccgcgagtccgacatactcgccaagactgttgaactcctctttgctacggcttcatcgtcatcagcggatgaagccgacaaacatattgcccaagcactgaaagaggctgttcaggacattcaaactcagatagacagcagcttcggtagtcaactgaacagtctgatcccggcgctgaaaaactttggatatccagggctgggaaatcaggaactgcatacagagacactgctcgacgttcgcaagttgctctccaatttcactaaggttcgctatatcggctacagcggagtgaccctgccggagtcctacaacggtcttggcgctaggaacctcatcttcatccttttacagcttgcggggttctataagtcgtttctggccgagccaagctcaccaggagtgcatctggtcttcattgaagagccagaagctcatttacatcctcaaatgcaagaagtcttcatacgtcagctcgcgaaaaccgctcaactgctggtcgaagcaacggaaggcaagacggtttggccggtccagttcgttgtttctacacactcatcgcatatagccaacgaagccggatttgaaagtattcgctatttcctcagtggtgaggtaccaggtgcagctgctggcgttcggcagacgagaatcaaggatctgcgcaagggactggatggcgtttccgagccggacaaaaagttccttcatcagtacctgacactaacccgctgtgacctgttttttgccgacaaggcgatcctggtagagggactgagcgaacgacttctgctccccgccatcatcgaaaagctggagatcgcggagccaacccggccgaagctatcaagccagtacgtaaccaccatggaggtcggcggagcatatgctcatcttttcttcgagctcttgcgcttccttgaattgccaaccctaattctcaccgatctggattcagtagaagaacccggcgggagcgcgtgcgaggtccacaagggaacctattccagcaacgcctgcctgaaagcctggttctccgatgatgatccattcaccctcaatggcctggtgacgaaggatgcctccgaaaaagcaaagcacggcaaccgcattgcctatcaatgtgcggaggaagaaggtggcccatgtggccgcacgtttgaagatgccttcattctcacaaaccgaacattgttcgacttgaagggcgctacacgggaagaacttgaaacggaagccagaagcaaggccagtaagatcaagaagtccgagtttgcgctcaagtacgcgatagaggagaaatcctggacaacgccaaagtacatccttgaaggagtacgctggctgtcggccgacatcgagccagccgtcccggacccggcgcttgctttggtggtcgaggcgacaatcgctgacgaggggggagcagatgactaa

SEQ ID NO: 75131 - DNA, 1740 bp, Pseudomonas sp. BICA1-14
atgactaatccgcagtcacccgctgaaattgccagccagcgtgcacttgatgccatgttcagcagcctggtcgctggagagcacttccgcttggaagcaggagcaggcgcgggaaagacttactcactcatcaaggcgctccactacttgatcgagcgccacaagaacatgttcccaaggagaaaccagcagattgcgtgcatcacgttcaccaacgtggcccgcgatgaaattgccgcccgtactgacagaagcccaatggtgtactgcgacaccaatcatgccttctgttggtcattgattagtggcttccagaaacaactccgtggtttggttgaggcgatgccggcatggcaagagagaattgcggaagccgggggaagtctgggttcccgtgtggttgaatacagtttcgggcaccgttccattcgcgaggatcgtgtgtctctgcatcacgatgatgtactgccgctcaccgtttcattgatggagagcgccaagttcaggaatatagtgacggatcggtttcccatcattctcgtggatgaatatcaggataccgacaaggattggattgtggcgattcagcgactgtttctggagaacccaccttcacccctattcggcttcttcggcgaccattggcagaagatatatggcaatggatgtggaagactggagcatcagcgagtcaaggagattggcaaagaggccaacttccgatcagtaaaaaccatcgttgactgcctcaatcggatgcgcccggagctacagcagtttgtcgaagacccgactgccgttgggcaggtcagcgtatttcatacgaatgcctggactggcgaacgacagacaggtgcccattggggaggagatttgccttcagaggtcggccacgaaacccttgagcaagtgaaggctttattggcacaagggggatgggatttctcccccgaaagcacgaaagttctcatgctgacgcataggcttcttgccagcgagcaaggctatgcgagcttgccggcggtttttcgctataacgagtcgtttgccaagaaggaacacccgcatatcgccttcttcgtggaccagttggagcctgcttgcgatgccttctccgcaagcaggttcggtgccatgttcgacgcactgggtggcaacacgccgctattacggagtcgagccgacaagacagcttggcatgatgcgatgagccagttgatggtgattcgcgaaaatggcacggttggagaggtcgtcgaccaccttctcaacctgcggaagccaagactcccggaagccatcgagagacgtgagcgagagctgcgcgaattcgatcgaactagtggcgaagagatgcccgccgcgctggcggagatagagaagcttcgcgcagtcagatacgcagaaatcaaggcgcttcggggctacttggatggacactctcccttcgaaaccaagcacggagtgaagggcgcggagttcgagaatgttcttgtcgtcatcggtcgcgggtggaatcagtacaactttggagagatgctcgaactggcaggaaaatcagccatcccgccgggaaagcaagcgaccttcgagcgcaaccgaaacctgttctatgttgcctgctcaagaccgaagcgccgccttgcattgctgttcacacagcagctttcatcagatgccctcgcaacacttgataggtggttcttgccagagagcatccacgctattgcgttctcataa

SEQ ID NO: 75132 - DNA, 1806 bp, Novosphingobium malaysiense
atgcggttagcgcggatcgtaattcggaactttcgtaccttcgcgtcacttgacgtgaatgtcgctgatgatctgtgctgcgttatcggtgagaacaacaccggcaagaccgcgatcctgcgcgcgatccagatctgtcttgacaatatgttgccgtcgagtttccggtcacttcagcgcgaggacattcactccgcgatcgatattgccgagccaagccaggttctgatcggcatcgagctgaccgggttcgagggcagggtaaacgaagaggcgctggtcagcacctggaaggtcgccgcggatcgtgcgcgcatattctaccgcttccgcccgcgcccggctgtacgggagcagcttgcgagtggcgacatcgcacccgggacgctgaccctcgaggattattattgggaaatccgcggtggcggtgatcctgcgatcgacctcacagacattacatggaatgacgagggcatcggcgagtccgtgcgcttcgccgacctgcaatcctaccttcttgttcatctgcccgcactccgcgacgtcgagaacgaccttcgcaatccccgccagtcgccgcttatccggctcatcgaggcgttcgagatcgatgcggccgagcaggatgccctgattgccatcctcgaccatgccaatcaggcaatcacgaactcggcgactatcgccgagatagcaggggcaatcgatgcgcggttcaaggaggtctccggtcccgcgttcgagatggacgccacgctcggcctatccgccgcaaccttccgcgcgatcattcgcaacctcaaggtcattttgtcggacctgtcgctcacctcgttcgaacccggccgtaacggtcttggcatgaacaacatcctctacatcgcaatcctgatggaatatctccagcggcggatcgcgttaaaccgctcggccggccagttgatcctgatcgaggagcctgaagcgcatctccatccccagttgcaattctcactgatcgcggccctgcgtgcgatcggcgtgcaggccatcctgaccagtcacagtacccaggtaacttcacaggttccgctaagcagcattgtatcactcaccaagcgtgaggacgcgaccattgctgcgggcaatctcgcgctcaatgcggctctgaccacgccagatattgccgatctcgaacgctatctcgatgcaaccaagagcgcattgctctacgcccgcaaagtcatgctggtcgaagggccagccgagatgttcctgatcccggcgctgatcgagcaggtttacggcgtgaagcttgagcggctcggcatctcggttatcgcgattcatggcgtccatttcgacgtctatgccaagctgttccgcgccggctcgctagagaagaaatgcgccatcgtggccgacgctgacatgaagccgtccgacgccgaggacttcgatccggaaaccgacgcccccgatctggtggcactggaaagcgactttgtgtccacattcgcgggcgccactacttttgaacgcgaactggtatcggtcggacgcctgccgatgttgatcgagaccgttcgagctctcggcgcgccgcagatccttgcgcagatggagaatgggcacgcaacgctcacgctcgggggactgggcctcgccgaagagacggcgctgcgcgtcgaacttggccgtatcaccctcaataccgccaagcgctttggcaaagcgcgcttcgcgcagatagcagcgcgctacgctaatctcgcgtccgatctgccgccctatatcgagcaggcctatgagtggctcaccgaatga

SEQ ID NO: 75133 - DNA, 1764 bp, Novosphingobium malaysiense
atgatccggctgacaccagaacagcgtgaggcggtcgaacatgacggcaatcttctgctgacggcttgcccaggcagtggcaagacgcgggtcattctcgccaagctactgacgctggccgatcaggtcgtcggaacgccccagttcatcggctgcatcacctataccaacgccgcggtcgacgagatcgaggcccggttgcgcacctacggcaacaacgcaatcgcggaccactgtgaaatcaccacgatccacgctttctgcctgcaattcatcctgcgtccctacagctggctgattcccgaggtgccagcgtcgtttcaggtgctctcccgcgagaacagcctgttcgagcagatcgtgacggcggtcgaggatgccttcggtcgcatgcccgccgggcaggtgttcgagaactatgaagcgcttcgcattgacgtgaacggcgaaccctgcggccagggtatcgagaccggcatcgtcacggacgaatccgccgcgctctattgggaacgggtccgcgcccatggatatctagatttcgcgatgatcctctatttttcttggaagattctccaacagcacccgttcgtcggaaggggcatcgcgagccgctttgcatggctgctgatcgacgaattccaggacaccacggatatccagatcgccatcttcggcgcgctccggcatttcctccacacccgcttcttcctcgtcggtgaccagaaccagtcgatcatgcgcttcgccggcgctcgccccgaactcgccgagcagttcggcgatcagatcgacgcgcaccgcgacacggccctgaccggcaacttccgatgcgggccggcaatagtcagcactgcatcaacactcatcccgaccctgccggggatgcagtcggcgggcgatgcagcccagctcgcggcgcaagtgaactacgtccatgtcggccggccgatcgacgccatcaccgaccatttcttgcccgccctgcaggatgctggcatcccgcttggcaaggccgcgatcctggcaccatggtggacgcatctcatccccgttgctcgcgccctccgcgaattcgacgtcccggtcttcggtccgggcgcgcgcccctataagcgtcgccgtctgcttgccggacttgcggagcaacttggggcctgcgccgaggccggcaattacctcggactcccgggtgtcgagcgagcactgtttcggctcatcagtgatcttaccgggaactcgcgctatgatatgtttagttatcaggggcgtcgcgcggcactcggccttatctatctcgctcgcgaacttgccggccggcatcccggcggtgtcgcatggctgcgcgctatcgcccgcgaggctggtgactatctcgagcacgaggaatggttgccgaacagcgcaaaacagccgctgatcgattccgccgaagaaatgctgtctgacatgcaggccagcaaggtcgatctcgctaacctgctgatttccgagatgggcctattcgccaacccccagcatgcgctcaagctgatcacactgcacaactccaaaggacgcgaattcgagggcgttgcaatgatctgcatgaacaatggaaatatcccgcatttctcgacatcgacgcaggaggcgtatgatgagtctcggcggctattctacgtcggcctgacgcgagccaagcgagttcttgttgtagcgtctgaccagtctcactggaagaacacgccgaccccgtttatagcagaggctggtcttggatga

SEQ ID NO: 75134 - DNA, 1842 bp, Xanthomonas campestris pv. cannabis
atgcgattgagtcggatcgtcgtcaaaaattttagaaatttcaaatttcttgatgtgcgcctgggtgagcacgccgtagttctgggtgaaaacaaggtcggaaagacgaatctgctgtttgcactacgactgatccttgatccgtcacttcctgactcatcgcgcaggctgcgccttgaggatttctgggatggactgccgcggccgctgaagacagaggacgtgatcgaagtgtcggtcgagtttcgaggtttcgaagacgatgaaaatctgctggcagtgttggcggatcacctcgtacgtccggatccaatggtggcgcgaatcacataccgttaccagcccgtgccggggcttgcaggtgcgccgcgcagcgaggcagactatgaattcatcgtgtttggcggaggccggcccgacaatgcggtcggctacgatctgaggcgctggatgccgctggacctatttccggcgctgcgtgacgctgaatcagaccttgcgcgatggacgcgctctccgctacgcccccttctggatcgtgcagcaaagacggtcgatgcaaaagcactcagcgcgatcgctggtgaggttcacaagacgacttctaagattgcggcgctacctgagctcgcaggggttgtgggccaggtcaacgatcagctcaccgccatggtgggaaacaagcatgctgtcgaaacggcactgggtttcgcgcctacggagccggaccggttaatacgcgcactgcaaatgatgatcgacggtggcaagcgcggtgtggcagaggccagtctcgggtctgccaatgtgctttatctcgcgctgaagcatctggaacatcaatacttggtggacgagggggagcgtcaacacacttttctggcgatagaggagcccgaggcccacctacatcctcatctgcagcggcttatctatcggaactacttgcaagcgcgtgacgacgcgcaagccgggcccgggccgcgcagtattctgctcactacgcattcgccgaatgtagccagtgtagcgccgctcgccaatgtggtcgtcctgcgccatatcgccagtgaagggcacacagtcgggcgctccctcaaagggattaaactcgatgtcagcgaccgcgaggatctggaacgttacatcgacgtcacgcgcggcgaactgtttttctccaagggcgtcatcctggtggaaggcgatgcggaaaagttcttgctgccgacgctggccaagctgtatgacgagagcttggattttgatgcgttgggcatcaccgtctgctccatcgccggaaccaacttcgctccctacgtccaattgctagggccaaaggggcttgatatcccgttcgtggtgctaacggacttcgatcctaaaaaggaagaggcgagtcaggaggatgcggatcccgatgatgcaggtgtcacagacagctatggcaagaatcgtgttgtcaaccagatcatgcagcacttgctggacagcgacgtttgggacgaggcgaactatgctgaggtactgaaacttgcgccgcagtacggcgtcttcttgaacgagttcacgtttgaaatcgatgttttcaaggccggggcagaagaccattttctggcagccgtcaaggaactcaccaccaacaagaagatgcacgcacgcttcgcgagcctcgcgactgatcctgattcgctcgcccccacgcaattcctcaaggacatcgactccatcggcaagggtcgcatggcgcagcggctggcagcggtattgatgaaagaggatgtcgacgtatgtcctgaatacatcgaatctgcgctgagctatctgaaggccaaactggcatga

SEQ ID NO: 75135 - DNA, 1764 bp, Xanthomonas campestris pv. cannabis
atgacctccaccgcgcccccgtatctcagagccgcggaggatttgcgcgggaacgaggatcaatggcgcgcgtaccaatcgaccgggaactgcgtcattctggctgggcctggcagcggcaagactaagacgatcaccgtcaagctcgcccgcatgctcactgaagacgtgcacagcccccgccggctcgcgtgcattacctatagcaatgcctgcgtcggcgagttgcgatcaagactgaacaagctaggtgcggacgacggcgatcgtcttctgctctccaccgtgcactccttttgtctgacggaactggtgtcgccctacgccgcgctggcaggtatcgatgtaccggacccgctgatcgttgcgtcacccgcgcaggcgcgaaagtactttgccgatgcttatcgcgagcagctggggggcaatgtgccgaattggtttcgcatggcctgcgacaagctgcggcgcacaatcccagacaagggtagtgacgagtggcgcgcatggtcagctcgcgaaacagcggtggttgaggcctacgaagcattgcttctgcagaatggcctgatcgacttcgatggtctggtccttgccggcctgcaacttgtggagaagcacgagtgggtccgacgtgccattcaggctaagtatccggtggtcgtgattgacgagtatcaggatctcggcctgcccctgcatcgaattgtgttggctttgcttaggatgggaactcggatcgttgccgttggggacccggatcagtccatttatgggtttaccggtgccaagccgagtttgctgcgagcattggctcgcctcccgcggatcgaatcgatccggctaaagatgaattaccgatgcgccgaccgcatcattgctgcttccatggcgcttttgccggaacctgcggagtttcgttctcatgatgggcgggccggcgaaatcctgatccaccgtctggagcgcaacatccgcgagcaggcggactatgcacttggtacgctggtgccggcgttgcttgcttctaatccatcatggaccccgggggatatcgcactactgtaccgctcgcttaacgaggggacactgattgcgcaggctgcggatgccctggacttgcggtatttccggctcgacaacggctcgccgatcaagcgcactcggttgaccgagtggctcacggatgcatcgcgatggtgcgctggcggctggcagacagggacggtgcctctttctctgctgctcaaagcttggcgacgattgcgccgctccatcccgcgcgattccgaattactgagcgcacgcaagcgtttgattgcggccctgttctcactgcgggatggtgcgcttcccttgcatcgatggctctcagccttgcgtcgcgaagtactggatgaactgctccagcaggagcctagtcttgccgatgagaaggataacctggacgaactgatgagggctgcagcggagggcgggcccttgcagacattcacggtagaaatattcgggaatcagggcaagagtccggaccaggtcaatctcatgacactacacagttcgaaagggcttgagttccaggcggtcatcatggtcgggctggagaacggcgtgttccccagcagctacgacaagaccgatgagcaattggcagaagcggctcggctcttctacgttggggtgacacgtgccaaaactcagattcatctgacctacgatgacgacgaatcaccgctgatcacctccatccgggaggcaggttag

SEQ ID NO: 75136 - DNA, 1842 bp, Xanthomonas campestris pv. cannabis; identical to SEQ ID NO: 75134

SEQ ID NO: 75137 - DNA, 1764 bp, Xanthomonas campestris pv. cannabis; identical to SEQ ID NO: 75135

SEQ ID NO: 75138 - DNA, 2289 bp, Xanthomonas vesicatoria
atgaaaattcgacatatcgaaattgctaattttcgcaagctccaagcggttcgcgtcgacctcacggacgacacgacccttctcgttggagccaacaacagcggaaagtcctccgcaatgcttgcgctgcgccgctttcttgtctcacacaagagcacgtttaggctgctcgatttcactctttgccacttccccacgattgatgcgataggaaaggaatgggaagccgccctcgcggggagtcaaccaccggtggttgatccgtggatggctatggtcccgatgcttgacctatggctgtcagcagaaaacggtgaactccacttcgtcaaggaccttattccatccttcagttggcgtagtgggcttgtcggtgtgcggttccggcttgagccgaaggacattgtcgcgctctacaacgatttccggtcggaacgcgaacgggttcatgcgctggaggcagaggcggccaaagatgttgacaaggcggcgttgacgctctggccgaagaaccttaccgatttcctcaccaggaggcttggagtgcatttcgaaatgcgctggtaccgcctcgatccggcgaggctcgtcgagccggacacagtgacccgggaggcactgccccagcacctcggagcatctaccatcccgatgcagaccaacccactggccggcctgatacgggttcacgaaatcaatgcgcagcgtggattcggcgaactagacgaaagcgaggattcggcctcggcagggcgatcaggacgacggctttccgagcagctccgagcgtattacaagcggcatcttgacccggagcagtcgccaggcccttccgacattgacgccctccgggcgatggacgcggctcgcgacgcgttcgatgtccggctcgccgcgagctttaaaccggcgttccaggaagttgaatcgctgggatatccgggggccaacgacccgacgatacatgtgacgacgcagctgagtgcggccgacggaattaaccatgaatcggctgtgctctttgaactcgattccattggcggcgcgaccggtaccccaccgcttcggcttccggagacctctaacggactcggataccaaaacctgatctcaatgatttttcgcttgatgagtttcagggatgcctggctgcgcaagagcaaggccgcgctcgcatccggcgatttgatcgtcgagccaatccacctcgtcatgattgaggagccagaggcgcacctccacgcccaggtgcaacaagtattcgtccgccacgcctatcatgtgcttatcaatgatccgttgttgaggaaattccccggcctctcgacgcagatggtagtgagctcgcactcgagccacatcgcccacgaacttccgtatgcgtcactccggtacttcaggcgccttccggcaggaatgcatgggaaacaggtgccgatatcgactgtatcgaaccttgaggccgttttcggggatgacaccagcactaaacggtttgtcactcgctaccttcgctcacagcatgcggacgtgttcttcgcggacgcgttgatacttgttgagggcgccgccgagcgaatactgcttccgcacttcattcgcaaccgattcccgcagcttcaccaggcgtacgtgacactgctcgaggtgggtggcagccacgcccaccgcttgcggccattgctcaacgctctgggaatccctggcctcgtcattaccgacatcgacgcgctgggcgacaaggcatccgtgccaatcaagcgcaatgcagggcaggtcactggaaacccaacactgcgaagctggctgaagtcaaacaacaacaaacgtgagattgattttctacttgatttggccacgactgataaagtcatcgtttccgacgatctctactccatccgcatggcctaccagaccccggcctacgtagcagtccctgtcggggcttcgccggaagaggtgttgccaggaacgttcgaagacgcgttggtcttcgccaactttgcccattttgctgccgcaaggggcaacgggatgattggagcggtggcgcgtgagattgcaaaggcaacgagcggggaggccctcgcctctggactgttcaaggtcataggtgatggagacaaggctgggttcgcactcggcgtcctttatgacacggactttaaggacctgattcctccgcactacatcgaggagggcctctcgtggctgcaggagcgaatcgtcaagaaaaagcacgaaatgcttcttgtgtccgtttccgtagaggagggcgtgcatgaatga

SEQ ID NO: 75139 - DNA, 1866 bp, Xanthomonas vesicatoria
atgaatgagctaaccgatagcttggttgacaacggggtcgacgaagtcattgaccagtgtttacatctggataccctgcagagcttcttcatgtacgccggagctggctccggtaagacgcgatcccttgttggcgcgctgggcaaactccggctacgcgaacgcgagcggctcgtgtacaaggggcaacgcatcgcggtcatcacctacacaaatgctgctcgggacgagattctccggcgaatcgaatttgatgccctgatcgatgtgtcgactatccatagttttgcctggcgactcattaaggggttcgacgatgagatcaggacatggctgaaggtttccctcgacgaatcgatggcgaaacttacagatgcaatggggcgtgcacgcggagcgaacaagacatatctgaagaacaaggccgacttggagcgaaagagaaagcgtttagaatcgctcgattcgatgctgtcattccattacagcccatcgggaacggaacgtctgcgggggtccctgacccaccaggaagtcatcggcatggccggcgaattcctgcaaaaagaaccgctacgcgaagtgctcgtcgacctttatcctgtggttctcatcgatgagagtcaggacacgcatgaggaagtgatgaaggcgcttctctcgattcaggcatacgcaagcgaccggtttgccctcgggcttctcggcgacacgatgcagagaatctatacacatggcatgcgtcggctcgagtgtgcgatacccggagactgggcgcggcccgcaaaggtgatgaaccaccgatcggctgagcgcattgttcgcctcgttaacacgatccgctcggaggtcgatggacagcagcaacgagcccgcaaggacaagcctggtggattcgcgaggatcttcatcaccggcattggtgcagcaaagtcgcttgagcttgaggaggcggtagcgtgcaagatggctgagattaccggcgttgccgagtgggggctcggaccggaacaacgcaagacactcgttcttgaacatcgcatggcatcgcggcggcttggattcgatgaagtcttcgggccgttgtatgagaccgatacactgaagacaccactcctggacggtgtattagggcccgtcaattttcttgtggacgatgtgctgcccattgtggaagcgggcctctcaggcgatgagttcacactggttgacagcatccggacacgctcccccctttttgacagtaaggtgcttgccggacgcgccgaccagttggaagcgattcgagctgcaggtgacggtgcacgacgcttgactgagcaactgcgtgatcgcgatcctccactgcgcgaggtcatcagcggactgcatgagagcgggctactgaccgtgccgaatgcactgcgccatgcccttaacgcacaggagcctgacgacgaagtggcccttgaaggcgaacgcccagcgcaagaattgcatgcctggcgcagagtgctgcaagcgcccttctctcaggttcgcgccatggccctttatgcgaggggactatccgcattcgatacgcatcagggggtgaagggactcgagtttccgcgggtgctggttgtcatcagtgacgacgaagcgaacggattcacgttcagttatgacaagatccttggtgtcaaggtcgccgataaagatgccgagaaggaagtaggtgggggcgattcccagcgcgcccaaacacgtcgccttctatacgtgacctgcagccgggcggagcatagcctagccctcatggtttacgcccagaatcctggagccgtccgtgacgaggtcatccgcaaagggtggttcggtgcggatgaagttgtcctcgtctga

SEQ ID NO: 75140 - DNA, 1803 bp, Xanthomonas vesicatoria
atgcgcgttgcacgtgtccagattgagaacttccggggtattcgcagcgctaccctccacatcgccgggacgacggtcctcctcggcgacaacaacaccggcaagtccaccgttttcgaggcaatcgaactagccattggcgctgatcgactggctcggcaccaggtgatcgacgagcacgacttcttcggtggcgcctaccaagccgcagccgaccagccagcgcccaaaatcatgatcgaggttgtgatcgccgatctggacgcggagcactgccagcgcttccgggccaacctagaattttggcgggaggccgacaagcgtctacttgaacctggcgaggctcgacaagtcgcccaagaaggcgtcgtgcccgcagtccgcgtccggtttgaggggaaatacgatccggaaggagacgagtttgaagctaaaacctggtttgccgtgcccagggcagaagatggaacttctacaagtgaatgccgctccggcgacaagcgcgaattcggcttcttacacctgcgggccctacgcactggttcgcgcgcgctctcgatggaacgcggctcgcttctcgacatcatcctgagaacctacgaagtccggacgaagatgtgggaggggctgcttgacaagctccgtcccctggatgttgtcggcgcccaagatgaggagtttggacgaattctcaaggccattcaggaggccatgcgagacatcgtgccaggagaatgggcagacgctccgcatctgcgtgtttccgagttgacacgcgaagatctcaggcgggttctgaaatcatttctagcaacgggagttgcgggttatgccgccccgtttcagcaccagggctcgggcacgatcaacgcgctggttctctcgatgcttggcctcatcgcagagcgccgccggggacgcgtgatttttgccatggaagaacccgagctttcactgccacctcatgtgcagcagcgcgttgtcgataaggtccgagggattgcttcacaggcgctgtttacgtcgcactcgccctatgtgatcgagcagttcgagccagagcagatgacggtgatgcgacgcgatccaactggtgtcatgtctgcaacaccagtcttgcttccgaccaacctaaaattgaagctctttcgcgatggctttcgcacccgcttctgtgaagcactactcgcccgccgagtcgttgtcgttgaaggaaagacggagttcgtcgcttacagtgctgtgtcccggcgcttggcattccttgcgcccggcgagttcaaacggcttgactcgctcggctgggtgccttttgacgctggtggcgagacgaacgtagcctcattcgctgcgttcttccgacagctaggaaagacggtcgcgacgatcttcgaccagcagttagcaggagcacgcgcggcgatcgccttgtcatgtgatcgggccttcgagcagccctatgcgggtttcgaacacttgctaagagccgaggttcgaaccgatatgcaaagttggttcgtcagatggctagttgccaaccaggagtggccgcatgcacttgcaggcattgttcccccggaaggtagcctggatgaagcttacatagagccattcatgacattgatgcgccataaaaagggcgacgactacctgacactgttctttgagcagtgtcaggtcggacatatgccagcatcgatggttcagacattgcgcagcctgcgagagatggtagaactgccggcagcgcatcctgttcttccccttcccttcatcgtgcagccgatggcacagggaacgtaa

SEQ ID NO: 75141 - DNA, 1644 bp, Xanthomonas vesicatoria
gtgcgaggtggggccggctccggcaaaaccaccattgcacttgcaaaggcatgcgaagacttgacggctggccgactggggcgcacgggcaaggccctgttcgttagcttcgcccgtgccactgtgtcgcgggttgctgagcaagcgaccgcatcactgccacgcgatcaactggctcgaatcgaaatcaatacctaccacggctttgcctggtcgatcctgagaagccacgcgtatctgctaggcactcgcccgggtgtatctctacttcttccagctcaagagcgatctcgtctagcaggcgttttggaagacaaccgcgcacgcgagctgcgacgcctgttcgaagaagaagggctagtagcatttgatctttttccaatcctcctagctgagttgctggacttgctacccgtggttgctcgcgccattggtgacgcctatccggtgatcttcctcgatgagttccaggacacgaacgccgaggaatgggcaatgattgctcgccttgggcgccatagcactctgatcgctctcggggatccaaagcaacgcatctatgatttcaaaggcgccgaccccaggcggttcgatgacttcatcgaagccttcgagccaacgacctttgactttcaaagtgagaacaaccgcagcgcaggaacagatattacgctgtttgcagatgcacttgtgagcgggaactaccgagccgagccctatgttggagtctccgtggtgcgttatggcggccaaagtctccaccccctgaaacagcgtgtccttcgcagcgcaggcagatatcgccgtcgccctgaatggtcaatcgcggtgctcgttccgaccaacaagctcgcagtgagcgtctttgattacatgagaagggaggccaatggtctgccgagctatccggtagatatcgcagtctcgatggaaggaccaatgcttgcgggcatgatcatcgccttactgttagagccgaaagtttccaatcaatccctcggcgcagacgttctggatgcgatggcgttgttagagaccggtcgcaaggaacgggcgtccgcgacggcaatcgaaacagctcgcaagcttcggggccgagctgcacgagtccgccaacgcggagaagccagttatggccaagcggttggagccggcgtccgccaattggtcgctgacgttgaagcattagaactaagtggagatccattctctgactggctttccattcgcaacctgatgacaagcaacgcccggccagaaattcaagcagtagccacagaggcgcgacacatgaggctattgcgccgtgggacgcaaatcgagacgcgcttggcggaggcgtggcgagttcatggctcctacctaaatgcaagagaactgctgcgcgccgctcttgtagaggaccagttcgccgctagttcacgaacccagcaaggggtcatcgtcatgacgatccacaaggcaaagggaaaggaattcgacgaggtggttgtatttgaggacctatacaatcgatacctccgcaatcatggtgctgactcagagcggtccgcacgcttcaatttgcatgttgctgccacacgcgcacgctcggccgttgcaatcatgacgccatcgagggacccctgccgtctactgccttaa

SEQ ID NO: 75142 - DNA, 2289 bp, Xanthomonas vesicatoria; identical to SEQ ID NO: 75138

SEQ ID NO: 75143 - DNA, 1866 bp, Xanthomonas vesicatoria; identical to SEQ ID NO: 75139

SEQ ID NO: 75144 - DNA, 1803 bp, Xanthomonas vesicatoria; identical to SEQ ID NO: 75140

SEQ ID NO: 75145 - DNA, 1644 bp, Xanthomonas vesicatoria; identical to SEQ ID NO: 75141

SEQ ID NO: 75146 - DNA, 1956 bp, Clostridium pasteurianum DSM 525 = ATCC 6013; identical to SEQ ID NO: 73050

SEQ ID NO: 75147 - DNA, 2013 bp, Clostridium pasteurianum DSM 525 = ATCC 6013; identical to SEQ ID NO: 73051

SEQ ID NO: 75148 - DNA, 2145 bp, Myroides sp. A21
atgtatatatcaaaagtaacactagtcaactatagaaattttgctaatgctaattttcattttaaaaaaggaataaacactattattggagaaaatggctctggaaagactaatttatttaaagcaatccgattgcttttagaagatacttctttgccatatgcttataaactaagtgaaggtgactttaatagatccttgggaaaaaataactggaaaggtcattggattataattagtattgaatttgatgaacttaatgatgatgaaaccattcaatctttatttattcatcaagctggtattgctgaagaaaattttgtagaaaaagcaacatacaatttattttttcgaccaaaagctgacataagacacaagatgtctgagttacacccaggagatgttcatgggttacaatctctacttgaacatataacaattcaagatcattatgaaactttcttttcaggaaaaagttcggttgattttagtgatcctgaagtatacaaagaacttgttggtgattttgagaatgttatttttccatcaagtatagatagttcaagatttggagctaaaattccacatcaaatgtctgttgctaaagaaatctcattcacatttattcaagctttaagagatgttgtaagtgatttccataataatagaacaaatcctttacttacgcttttaaagaataaaagtggagaaataaaagaaggagattatcagcccatctctgatttagtgaacagtcttaaccaaaacattgaaacgcttccagatatacagaacattagaaatgatattaaatcaacaattcaagatgctgtaggtcttacctactccccttcatccttatctataaaatctagtgtaccgagtgaagcagagaaattgttacaatccttaaaattattcattggagaacctgaagaggaatatgaaggaggaataaatgaattaagtctaggaggtgctaatctaatttttttaaccttaaaactcttagagtttaagtatcgaaaatctaaagattctttcgcaaactttttaatcattgaagaaccagaagcacatatccacaatcatattcaaaaaactctctttgataagttaaactatagcgatacacaaatcatatattcaactcactcaacacaaatttcagaagtaagtaatgttgaaaaaataaatatacttgcgaaaaaacaaaattttgcagaagtatatcagccctcaaaagggctagaaaaagaaaatataaatcaaatacaacgttatttagatgctgtaagaactaacctcctttttgcaaaaggtgtaattctagttgagggagatgctgaagaaattctaattcctataatgattaaaaaaactttagggcttagtcttgatgaattaggtattagtttaataaatattcgtagtacaggttttgaaaacgtagcgcaattgtttcatgatgagcgaataagaagaaaatgcgccattcttacagatttagattctgcgatatgtgatactactattcatgatgatgatagttctactattaaaaaatacaaaaataaagttgcaaattccgaaaaaaaaggagctgaaagaaaactaaaattaactgatttcacaaaagataatcaatggattgaagtattctattcagatcatacatttgaagttgattttataaaagctggaaatagttgggaagtaatacagactcttgagcaagtatataaagataaagatactgcagaaatatctaaaaaagaacttgaaagtgaagaggtatcaagctatggaaaacgtatactaacaatggctaagcaagaaggtaaaggttggttcgctataatgttaggagaccatattttttatagaacaatattacctgagtatatagttcacgcagttttctttgcaaaagaaaagtttacttctcatactatattagatatagtccagtataggatgaaagaatatctaaaagaatatccaaaatatgattttaaaacttgtaaagaaatacttgaaaaatacaaggaaaaaaaagctactttgatagaactaaaatctcaattagagttaattaccaaagaggaagaccaaatattagcaattcttgataaattgaaataa

SEQ ID NO: 75149 - DNA, 1803 bp, Myroides sp. A21
atgtttttttggagagaaaatagtattaataaagaacaagaaaacgctatccttgaaaaggatagtgtaatgcttattgcatgtcctggtagtggtaaaactagaaccctaacgtataaaatagcctatgaattaagtagattgacctctaaaaaacaatttgtaatagctataacatatactaatagagcttctgatgaaatcaaagagagagtagagcttttaggagtagatgtaacgcaattatggataggtactattcattcattttgtttagaatggattttaaaaccatatcatttataccatgaaaaactaaaaaacggttttaaaattatcaattctgatgattctgaagatattttatctgaactatgtataccttataaagaagaaaaaataacctattttgattgtggtatacttgctaaaacaaatggtttccatttaacttgtttaaataaagtaaaacatgattcattaaatagaataattaaaaaatatcacactatacttgaagaaaataaccaaattgattttgagcaaatactgttttatgcttatgaaatattaatttcaaaacctattgtagccaagattttatccaacctttttccatttattttaattgatgaataccaagataccaaagaaatacaatatcatattatatctgaaatattaagtaaaaacaatggaaaatcgaaaacattaattgtaggtgatcctaatcaatctatttatgaatccttaggaggatatccaatgccgaagcaagatttagaaaaattactaggttttaatctaaaatcactaagtcttgataagaattatagatcatcttccgctattattgattattttaatcactacaaaacatttaatactaagattataccttatggaagtgaaaaagattatccaagtataataacttacaactcatctatctcagtagatgatctaattgatgaaataaccaaacttatcttatataatgtaaatgaaaaaggaataagtcctaatgagatatgtattgctgctccacaatgggtgcacatagcaagtataacaagaaaacttataattaagcttcctgattttaattttgatggacctggaatggctccgttttctcgagatattgacaatttttggtttaaagtatcaagaatagctttaactgacccttcaccttatatgtatattaagaggttaagatggagtactgaagtattaaatgaacttgatacagtaggagtaaatatcacaaatacaaatagtaaagattttttaagaatatgtaactcgtttaaaattacagaaaacaatggattagaatacttgaaaaaaatttttaatctaatctgcgaaaaattaaacatatccttacaaagctttcctcaattaaatgaacatttcaattcattttttaaaagctctgaaaaaagaattcataaactaatagcagaagggaatccttctatagatagtatcgaaagttttaaaaaagtgtttaggcaaagagatggaattacagtatccactatacatggtactaaaggagaagaatatgacacagtaattggttttggtttattgcatgattatgttcctcattttagtgatccaaatggtgaagagaactcaaaaaaaattttatatgttttagcatcaagagctagaaaaaatttacatattatttcagaaaataaacgaggggtaaatttttataagcctaatggaaaatctcccaccacgcatttattaagttataaatatcattattcaacaataaattaa

SEQ ID NO: 75150 - DNA, 1749 bp, Myroides sp. A21
atggggaagcctacaggtattacagaatcacatttccataaatctcttgataaaccggctagagaagctggctcagacagcattgaagtaaatgggagtttttctgggcttaatggggatgaacaaatcgcctatcttccatggcttgatgcaactgataacagtaaagcatatttaaataaaagaattgataataaacccaatccaagaggcagatatgattatacaacttggggtggtgaatctctatcaagtatctttgaatgggagcttattaatgctataagttgtatctatttaccaccattaagagatgcggaaagtaaattagaagcttttcgcggttctagactctcaagactttttagaaaagagaaacctaaaaaaggagaacctaaacatagtattgaagagaaatttgaaactctaaattcagaaatacttaaagatcaatcgataaaaaaagtaaatgaatcgataagaaaatatttaaaagagagtttaggaactattttagggcaagatgcttcaatacaatttgctgaagttaatttcgataggattatagagaggttaagattattattttatcctaatataagctcttttacaaaaccggaattttttagagaaatatcagaaaacagcttgggctataataatattctgtatttagctacagtattggcagagttagatggtctagaaacagatgtaactaaacataagattctattaatagaagaacctgaagctcatttacatcctcaattacaaataaaacttttacagtatttacaaaaacaagcagaagaaaataatattcagattattgttactacacattcttcaacaattacagcttcttgtggtttagaatctcttaatgttttaacaattatagaaaataataatcctacttcaaccttaatagctgatgtcaatctagaaaaagaaaatttgtattttcttgaacgttggttagatataacaaaatctactttgttttttgcgaaaggaattttatttgttgaaggaattgcagaagcattagttataaaagaacttgctaaaaaagtgatcaaaagacatgttgaaaaagagaaaggatttcctgaaaatctagatgattttggagtttcaataatcaatttaaacggtatatactttagacattttatgcaattatttcaaggatataaatttgataaaaatggtgatctaattgatggtattgtatccattcctattagatgtgcaggtattacagattgtgatccaaagactataagtaaaccaacaaattcaaaaaaatgtgattgtaacaatcctcaatattacttaaaagaggagtttgaaatgaattcgaaaaattgtagattatattcaaatcttaaaacatttgaatatgacttaggattacttgataataatttaaaagttttaatccaaatatttgatgaatggttggatacagacggtgaaactaagatacaactaacagaatggaaaagtttaaaatgggataaacagactgaaattgaaaaagcagaaattgcatataaacttcttaattatattgaaaatactaaaaataaaaataaacaagttttaggtaaaggtcaatttgctcaaaaattagcatataaattatcttcagaaactaatattgaattttcagttcctaaatatattgaagatgcaatcttatgggttattaacaatgaaaaaaaagctgtagatgtataa

SEQ ID NO: 75151 - DNA, 1914 bp, Myroides sp. A21
atgtataatttatcaatagatgaaaaattagataaagttaaaaaaaggcttaatactttagatcgtaatttaagtgaagaacaacttgacttcattttacatccaattaataaagcttgctatttaaaggcttgtcctggaagtggtaaaactgaagtagttggtatcaaagcagcatatgaaatttcagattggaaagataaatttacaggccttgctgttttaagttttactaaaaatgcagcaaaagaaattacagatagaataaataagtacaatgggaataatgcaacaaaacatcctcatttcattggcactattgattcttggttacatggttatatcttacatccatatgtccataaaataagtggatttaaaggtagagaaggaaataaaagttactctttgttagagaattctaccgacttaggttttcttgctaataataagtatcatattaaatacgaatatgaaataagggatggaaatggtaagcctaaaacaaagttggttccattttatgcgacagaatttcatctcagacataatggaattcctatcccaaatactgaaaacaaatcttttcacaaaaatattgatctaacggatttaataaggataaaaaataatcttaataaagatggattctgtacctaccaagatgcagaacatttgtgttatctaactttaaaaaacaatcaaaatattttagaaagtttagcaaaaaggtttccttatattattattgatgaatgtcaagatttatctcagaatcaactaagaacatttcatcttttaattgaaaaaggtgtttcaattcttcttattggtgatatgaatcaatctatatatgaatttagaagagttgatattcaaaaaatcaatggttttataaaatatcataaatttaaagaaaaatcattatctaaaaattttagaagtaatcaaaaaatagtcaatgtctcactcggacttgaaaaatataatactggtatcactccaaatcaaattataggcagtgaaatagaaagagtctctaaaagttgtattgtttgggaatacactgacgaagatttgtgtaaacttccgcaaaaatttattgattatataaacctaataaactccacatcacaacatcctgacttacatattctaattaataaaagtggtatacttgcaagaggacataatactctttctaattttagatcacatctatcatctaatttaaacaaaattgagctaattgcaaatgctttaaactgctggtctaataatccaagaacaagtaaagatatacaaaatgctttacaacaaattggtaaagctatttcaatacttgcttataatggcaaaggaaatcatcaacatcaatattgcccagatgtttacaaccaaattgaatggagaaatcaacttagtgatttaataaatcaaatgaccaataattctacaagtatttacccttttacaaatgtaacatggaaagaatggataaaaaaacttaaacaatttttagagaattattggaatcagcttcgcttcccaattaatgactgggattctgtaaaaggaaaaataaaatctgctagtggaatgacagacaaacttgtttctgaaactttaaaagcattagaaaatacatattcagaaaaaatacgaatgacaaccttccatgatgttaaaggtgaaactcttgatgctgttttagttgtctcatctaaagataaaaaaagtaaaggtggacattatgaacattggttaagcgaagatcctaatgagaaagaatttgtaagatttgcatatgtagctagctctagacctaagcacttacttatctgggcaattcctaagaaaactaataataaatacttagcgaaaataaaagacttaggttttgaaacagaatag

SEQ ID NO: 75152 - DNA, 1956 bp, Clostridium pasteurianum DSM 525 = ATCC 6013; identical to SEQ ID NO: 73050

SEQ ID NO: 75153 - DNA, 2013 bp, Clostridium pasteurianum DSM 525 = ATCC 6013; identical to SEQ ID NO: 73051

SEQ ID NO: 75154 - DNA, 1950 bp, Hafnia paralvei
atgcacttgagtaaactgaaaataaatggtttccgctgttttaatgactattttaacattcatttatctcgtggattgaatgtaattgtaggtgaaaatggtgcaggtaaaactgcaatcattagtgcaattagacagttatttatcgattctgagtctggaagatatagcgtcagcaacgatgatttttcatttccatttaagattaatggagaagcagcaaattctttctctattcaagcagagttcgatgaactgagcgtaagcgataaagtaaccctcttaccatggattggatctaataaaactgcagttctaaatttagaagcagaaaataaagaaatacgtggtagatttagaaagatactttggggcggaaagtcgaaaagttctctatttgagcctgagttactggatttaatccaatgcatttatctacccccattaagggatgctgaatcaaagttgtccaatggtcgccaatcacgtttatcaaaactacttagagcattgaaccgaagagagttaaagcgctctcgtaaagatggtaagcctcatccgctagaagaaaaaatcaaggagtttaatactacgttagctgctgatgaaaacctcggtattaaagatgctaatgaattaataacaaaaaacttgattaaggcaataggttataactttggacaaaaaaccagtatacaatttgcagaaagtgattttacaaaaatagtagaaagtttaaaacttcttttttttccagatttatcaaatgaagatcaatcattattccgtagtttaagccaaaatagtttgggatataataacttactatatattgcatctattttagctgaattaacgttagatgatgatgacgatgatgagcaaccccttttaaaattactgcttatagaagaacctgaagctcatttacacccacagttgcaaatcaggcttctcaatcacataaaatccgtagctgacgaaaataaaaatgtccagataattgtcactactcactcaacggtattagcttcatctgttgaacttgaatcaatcattcatttatctaaatcccataatccagttgccacaccgttgcgaaattgtggactaaaagaaaatagttctcagttcatcaaccgatggctggatgttacaaaatcgaatctattgtttgccagtggtgtgattttagtcgaagggattgccgaacaaatgttaataccggctctcgcaaaaagagtgcttagtaatcaaaatgacggtaaaagaagcctagaagacattggtgtttcaacaataaatctgaatggaatatattttaaacactttatgcaactatattgcaacgttaaatcagtcgatgatgtcgacgaagaaattaatggtgaaaatattccaattcgatgtgcaggtttaacagatttagatccaccaaagactattaaaaaaaaggttgcgggcctcgataacacagacgaaattaaggaaatcatcgaagatttcataccttatgatggaaacatcaaagatggtaataatcatgctatcaaactcgtagagtctattaataattcaagtaatgcacgattattcgtaagcaaatacaaaacactggaatatgatcttgccatggaaggaaataatgctgcgctgatgtcaaaaataattgcatcactgtggccaaaaccccagaaaggtgaaagtgaaataatcaatgatttcaatataatgtcaaatattgattggacaaaaaaaacaaataaagaagtcgcagaagctgcatataaaatcctaaatcgaattgacgatgataatattgggaaaggtatgttcgcacaagttatgacagaaaaactcaaagacccaacgttagactttattgttcctgcttatataagggatgcaattttgtgggcgacatcattagaagttggcggtgaaaaatga

SEQ ID NO: 75155 - DNA, 1776 bp, Hafnia paralvei
atggataaccaattcactgatgaacaaattaattatattaattcaagtattgataagcacatttttttggaagcttgtcctgggagtggtaaaactgaggtcgtagctgccaaactagcgaaggaaatatatatctggaataaaagaccaggggggatagctgtactttcttttgctaacagtgctacagaagaattaattaaaagagtatcaaaatactgtaatgcagggcaatccatatatcctcatttcattggcacatttgatagcttcatttacaaaaacatagtatctccattagcaacagaattaaccaattacacagggactgggaacgatgctacaattagaattgtagagccatctgcacaaatggggtacagaacaaaatatagttacgcaaaacgtggcaacatccatgcccatcactattctcacaaccttagaagcggaggtataatttttgagactggggatgcagtatttgatagagctttaaacaccctcaagttagagaattggcaaattcaggatttttcagagacaaaacgtagaatgctagatggaggtttcgcgacttaccgagatattgaatatttggctctgcgagctcttaatgaggaaagatttaagcattttgtcagtttattagcaaagcgctatccgctgattataattgatgaatgccaagacttatcggaagaacaattaactattttgcaaatactattaaatcaagggacaaaattgcaatttgtcggggatcttcatcaagctatttatggttttcgtgaagttgaacccgcgagagtaaaaaagtttattatcgataataattttaacattttagaattaacgagaaattttcgtagctgtcaaaatattgttaatctttgcgcaaagctcacaggtcgtaacaatatcaacggaaacgtaacttggctagatccaagatgcttagtcgttcaataccaaaatagcccaactgaactcacagatacctttgacagcatatgtaaaaattataataaaaacgtaatcgtctcaagaggccactcaaatttattaaagtttcaaacatccgaaaatgaattgaacaatatccaaaaacttgccctggccattagtatttataactcagacgatatgagtatgttaactaactccttgcaactattctcggaatttattcgccatcatcttaaagaaagctgcaaaacaaaagactttaattgcccgtattcggttaattcttctatttcctggcgtaaatttctgtgtgcatcattgagctacatgaatagtattggacttcaaaatatgaatatttcatggtctaattgggttaagcaagctaaatcttcaattcgtatactatcaagtaaagaattttgccctaccaatatttccgcagcattagcaccattagctagtgtaaacttaacttccccatcaggcttagccaacaaagaagtaaactctactttaggtacaatatccgaatcaacatcgctgtatggaagatctactattcatggtgctaaaggtgagacccatgatgtaacaatagtggtatcttccacccgttcaggtaaagattcacattggcttgactggctcagcgatccaaaaagtgaggctgccagattcgcttacgtggcatcatcaaggccacagcattatttaatttgggctgtgaaaacccttaaaaacgaagaaaaaaagaaacttgaggctattggttttactgttcttccactcgatactaatacatga

SEQ ID NO: 75156 - DNA, 1851 bp, Novosphingobium subterraneum
atgcgagttcattcgttatcggtgacaaactttcgcggcatcaagtccgccaccatctgtctgcctgcgcatgcagtgcttatcggtgacaacaacactggcaagtcttcggttctagaggccatcgatctggtacttggccccgatcgactctcccgtcgaccaccggtcgacgagcacgacttcttcgagggtcgttatctcgctcccgctaccgccgtggcagaggctgaccacgatgggcagcctcccgtcgaggccgcaggcaacccattggcggactcagtgccgccgcgcatcgagatcgaagtgacgatcacggacctatcggaggaacagctggctcgtttcggcggtagaatcgagtggctcaacacggctgatggaaccctgttcgttgaggcgaaccccgccggcatagatgcagccgccgtcgtcgcagcgctacgcgtcacctttatcggccaatatgacccggacgacgacgatttcactggtgccacttacttcacccgcagcttgacggaagacgatactccgactccgttccgcaagactgacaagcagcattgcggcttcttgtttctccgctcgcttaggaccggatcccgcgccctcagccttgagcatggcagcctgctcgacatcatcctccgcttaaaggaaatccgcccccggctttgggaaggcacactggatgcgctttccacactggacgtggctggtgacccccagatgggcatcagcggagtccttgagagcgtgaacgcctcgcttaagaaatacgtgcctcgagaatggggtgcaaagccgcaccttcgcgtttccagcctgacacgcgagcatctccgcaaagtgataacggccttcatcgccaccggcagtggcgaccatgccgcccccttttaccggcagggtaccggcacaatcaacatgctcgtcctcgcgcttctttctcaaatcgccgaggacaagcagaatgtgatcttcgccatggaagaggtcgaaactgctattcctccctatgcgcagaagcgcatcgtccatgagctacgcaagctctccgcccaatcgataatcacctctcattcgccctacgtccttgaagaatttggtctagacgagaccgtcatcctttcccggagcagccaaggcatactcagccaagcttctatcgcccttcctgaaagcgtgaagcacaagcgctaccgacaagacttccgcaccaaattctgcgaagggctgctggcgcgccgggtgctcattgcggaaggcgataccgaagccgcggcgcttccggtcgtcgcgcgtcggctctctgatctcaatccggcgacctacagctcaatcgaaggcttgggaatcaccgtcattaacgcgaagaccgagactcagatcgccgatctcggtaggctctatgcggggttgggcaagcgggtgtttgcgctgtgtgatttgcagaccgcggaggcgcagcaagccatcgaggccgaggtcgaacagctgttcatgcatcccgaaaaaggcattgaggaccttgtcctcaagaacaccaccttggaggccatgaaccgcttctcgcagtcgctggcttggccgccgcatctggcagccaagcatgcgggcgccgacgtgaacatgatcgatgcgctgatggactatttccagtggtccaagggtaattggggcatcgccgacttcctggcccagtgctcagaagccgagataccgttgtggtttcggcaaacctgcgcgcggttgcgccagctgtgcgatccgcctccacctccgcctgttgcagatcctgcacctggcggaggtggcgacgacttcgacgcgcttttcaggtaa

SEQ ID NO: 75157 - DNA, 1821 bp, Novosphingobium subterraneum
atggtcgacctgacgccgaagcagcagatcgtgctcgcgaccgccggccaccagctggttaccggtggccccggttccggcaagacgaccgtctcgatcctgaaggcagcgaaaatcgcccgcgaaatgctcaagccagggcagcgtgtcctctttctcagcttcgcgcgtgcgacggtctcccgtgtcctcgaagccatcgacgaagaaaaagacgtctcgtccgacgagcggagccggatcgaggttgacacctatcacagcttcttctggcggcttctcaagacgcacggctatctggtcggcctgccgcgtaggatctcgatcctcacaccgccaggtgaagcgatcgccctagctgcgatccgccgggaatatggccccgacaagaagctcgacgaagcccagctggccgaaaagagagcgcgcgagaaggctgagcgcgaccgacttgcgtttgcagaggggaaagtctgcttcgatctgttcgctgatctcgtggcacggctgctcgagggttccgccaaactgcgagcaatgactgctatagcttggccctgcatcatcttcgatgaattccaggatacgagcgcggatcagtggcgtgtcgtgaaggcgcttggcgaccgttgcaccttgattgcgctggccgacccggagcaacgcattttcgaattcattggcgccgatccggcccgccttgatcatttcaaggctgcgttcgctccgaccttcaccgagctcggctcggacaatcaccgcagcaagggcacggacatactactcttcggcaacgagctgctgaccgccaaattcagcaaggccgaatactctggcatcagcttttgcttgtttccgtccaaccggaaccaggcctatgccgcgctggtcacgcaggtccttcaggcgcgagcccggctgatcgccaccggacggcgcgactggtcgctcgcaatcctcgttccaaccaagcggaagatgcggctcgtttccgatatcctgcgcgatccgttcggtaacgttccgactatctcacatgccgcctcgatcgatatggaaggaccgatcctgggagccgaagtcattgcgcaactgatgcagcaagagcgtgcttcggatgacctcgaccagttggtgcatttgatatgccaatatcttcgcggccgtgggggatccgacccaggcaagggagatctgggcgatgcggtcaagctggagagcgcgctggcgaaatggaacgagcggatcgccgggggacaggcgccgcacgcgaacagtgtcatccatcctatcgctgccgtcctttccgcaacccggcaggtcgttatggtcggcgatccagacaaggactggatcgccatccgcgccacgctcgctgatggagcgtgtacccggttgcgggctattgcgaacgacgcccgcaacgtgcgtctgctcgaacgcggcaatctgatgcgcaatacgctggaacagaactggcgagagcggggtcgctattccgatgcgcttgacatcactcgattggcgtttgttcaggatcacttcgccacagctcagcgccccgagacgggcgtcattgtgatgaacatgcataaggcgaaggggaagcagtttgacgaagtgatcgtgttcgaaggctggccactcagggtgggtaaggagattaaggcgaacccggatcggatcgttcgcgaaaacaagctagaaggcgacctatcccaggcacgtcagaattttcgcgtgagcgtgactagggctaaatcgcgcaccacggtcatgacgccaaaggacgacgtctgcgtccttctgaaatctgactga

SEQ ID NO: 75158 - DNA, 1851 bp, Novosphingobium subterraneum; identical to SEQ ID NO: 75156

SEQ ID NO: 75159 - DNA, 1821 bp, Novosphingobium subterraneum; identical to SEQ ID NO: 75157

SEQ ID NO: 75160 - DNA, 1791 bp, Pectobacterium carotovorum subsp. brasiliense
atgcggatttctcgagtccggttaattaatttcgccaacttctccaacgttgatgttgaaacgggtgaaagcattgttattgtcggtgagaacaaagtaggtaagagcaattttattcgcggcttgcagttgattcttgaccctgggttgtccgagcgcgatcggcaactgggctttgaacatttttgggatggattaggcgaagaaaaattgggggagacgattgaaatttcagtggatcttactgattttactgacgatccccgattgatggctcatctgaatgattgtgttgttaatccaggaccacccatggtggctcgtcttacctatcgctttcagccaaaaaccgagttaaatcgtgcccctgaatcgctaaaagactatgagtatgtgatcttcggtggtactgatcccgatatgcatattggcggagcgcttcgccgtatgttacccatagatgttcagggcgcgttgcgtgatgctgagaaggatctttcaagctggcgcaattcaccattgagaccacttattgaggagctcaccgcgtcgctagatgatgatgctcgtgaggaaattcagactcagatcgacgaggctcaacgggagctggctggtcatgatgacgtagtggcgacagctgaacgaattagcgaacggttggtagctatcgcgggtgatcaacatgccgttccagtatcgctggggcttgctccggctcgcgttgatgctctgctacgcagcttacgcttgttgctcgacaatggtatccgtggcattggtgatgccagccttgggacggccaatctgattttccttgccctgaaaagcctcgagcttgatcgtcttgttgatgacggagaacgagaccatacgtttttcgtcgtcgaggagccagaagcacacctacatccgcatgtgcagcgccttgtctatcgttacttcttgggcactgatggagataatcgtgatgaaagtactccgctgacaacgattctgaccacccattccccacatatcgccagcgttacgccaatcagatccatcgttctgctgcgtcatgacccggaggaagaggagacaattgctctttcaacggtaaatgcaccattcacgcagcgggatgaggatgatctacagcgctatattgatgtcactcgtggcgaaatatttttttcgcgaggtgttgtccttgttgagggcgatgctgagcgtttccttgtcccagctttcgctgatgcactgggtatcccgctcgacatgcttgggatcactgtgtgttcggtcggtggaactaatttcaccccgtatgtgaaactcctagggccacaagggcttgatattcctcatgtgattctgacagaccgtgatccagtgaacggcaggcatccacgtgttcgcagacggttcatcagtctccttgaattggttgaatatgagcactaccgcgactacgaaaatatggatgctgaagatgtgatcggacttgccaacgattacgggtatttcgttaatgagaatacccttgaaactgaactgttcgaaagcggactggctgaggagatgatagatgtaatccgacaggaacttccacaactgaagcaagagactctaaatacattgcagcaatggctggacgatggtgaagtcgatcaaggtcggttgttgaagctaattgagcgaattggcaaagggcggttcgctcatgcgctgtcctcctcggtgtcggaggatgtttgcccagattacattcgtgaagcactggagcatatccgcgatgccgtcgcgtag

SEQ ID NO: 75161 - DNA, 1821 bp, Pectobacterium carotovorum subsp. brasiliense; identical to SEQ ID NO: 72835

SEQ ID NO: 75162 - DNA, 1791 bp, Pectobacterium carotovorum subsp. brasiliense; identical to SEQ ID NO: 75160

SEQ ID NO: 75163 - DNA, 1821 bp, Pectobacterium carotovorum subsp. brasiliense; identical to SEQ ID NO: 72835

SEQ ID NO: 75164 - DNA, 1791 bp, Pectobacterium carotovorum subsp. brasiliense; identical to SEQ ID NO: 75160

SEQ ID NO: 75165 - DNA, 1821 bp, Pectobacterium carotovorum subsp. brasiliense; identical to SEQ ID NO: 72835

SEQ ID NO: 75166 - DNA, 1791 bp, Pectobacterium carotovorum subsp. brasiliense; identical to SEQ ID NO: 75160

SEQ ID NO: 75167 - DNA, 1821 bp, Pectobacterium carotovorum subsp. brasiliense; identical to SEQ ID NO: 72835

SEQ ID NO: 75168 - DNA, 2082 bp, Pectobacterium carotovorum subsp. carotovorum
atgcatatcgagaaggttaagattgaaggattccggctacttcaagatgttgaaataatgctggaaaataattccacggtagtcgttggtcgtaataatagtggaaaaacatcattcaccgagatttttgatcgttttaccggaaggactggtgcgaagtttcgcttagaagacttctcagcaatatcgcgtgaacagttcttcaatgcaaaaatgttaagagaacagacagtaaacccagaagaaattctcgcagcacttccgactatttctcttacgctaacctttcgctatgacagcacaagctcaaatctaggacctctggctccgttcataattgacttagacatagattcaacttccgccattgtacatgtggagtacaaaccaaccttggcaacactccatactctgctcgacataccctcgacaccggaaggtatacagccaagagcacacttctttaggtcattacgcaacacattacccaaagcatatagtatccatatttgcgcaattgatccgacagactcgaccaataaacgcagctttgagaacacatcagcactatcagccttgctgcagtgcgatttcgttcgtgcacaaagaactctcgaccatgcaaatcaaggcgacgctgatataatcggcaaattgctcagtacgctctttaaaacagcaacagcgccaagtgctgcagccgcagatcaggaattagctgcaaaattgaaagcatccgtcgaagacatagagcgcaatgttcaaggtgacttcgacgaaatgctgaaaaacctgttaccggccatggaagtgctaggattcccaagcctcaacgatgcagaacttcggccagaaacttcattaaacgtagaagccttactttcagatcacacaaaagtggtctatgcgagcacagatggagttcatcttccagaagggtataacggtctaggtacacgtaacctgatctacatgctgttgcaacttgagagctaccataagtcctatcgagctaaagaaactcgccccgcaacccacctaatcttcatcgaagaacctgaagctcatttgcatccgcaaatgcaagaagtcttcatcagtcagttgaatgctgccattggaaaactatcagcctgttaccctgaagaacccgcatggaaagtccagtttataatctcaacacactccccacacgttgcaaacgcagcatcattcgaagcagtacgatattttctcaatgactcacagattcaaacgactacacggcgaactaagatcaaagatttcaaaaaaggtatgagtaccatctctcctgatgatcgtcactttcttcatcaatatatgacattgactaagtgcgacctatattttgcagacaaagccattatggtcgaggggacaacagagcgactactgatacctcgactttgcgaattggtcgatagatccctcaatgataaatacaaactcagcagacaatatattacatgtgtagaggtcggaggggctcatgcacacatattctatccacttctcgatttcctagaactcaaaaccttaattattactgacttagattcaactaagtcagtagaaaaaagaaacaaaaaaggaaagacgattacatcttgggaaaagtgtccagtagctgagggagaacggacttcaaacacagcaattagagaatggttccgcccagaaaaattagaggaacagagttgtcagcaaataacccctagagagattattaacaagactgtcgaagataagcagaaaggataccgtagaattgcctatcagattccagagaaactaggtacagatatttgtgctcgtagctacgaagatgccctcgttttagcaaacccagaacgatttgaatggccaaaagaacaggatgaagcaacagaggcttgggaaatagccaaagggcttgcgaagacagatacggctttgagattcgcaatccgtgagaaggaatgggttgttcctcgctatatccatgaaggtctagtctggctttctgaacctctacctatcacatcatccacagaagaatcagttaaagaggcgacagtatga

SEQ ID NO: 75169 - DNA, 1734 bp, Pectobacterium carotovorum subsp. carotovorum
atgactgaatctgtaaagaaccctgcgcttatagccgcacacgagactcaaagaaaaattgaggaggctcttgatgcagaccgtagctttcggcttgaagctggcgcaggtgcgggaaaaacatattccctagtagctgcactaaagcgacttatagcagaacgtggctcacgtttagttcaatcagggcaaaaagtggcttgtatcacctacactgaggttgcacgcgacgaaatcgcccgagaaattgaggaacaccctgcaattcttgtagataccattcacggcttttcatggacattcttacgtcaatttcaaaaggcactgcgtgatctcattagagaaatggaaagtcgaaaagagaaaatcgaacaaggcggcggtattggttcaaaaacagttgattacgatttagggtttttcaacgtcaatgaaaacggaatcacactaagccacgatgacattccagaaatgatgtctaatttgttgaaaaaagaaaaatttagacgccttttaagccagcaatttccagtcattttcatcgacgaataccaagatactcatcgtcaatttatggatgccattactgagcacttcttgaagccgaaaatcggtcctctcatcggtttatttggagatcactggcaaacaatttatcggagcgaatacgaactcgcagaatatcctatcgaagaaattacaaaaggatctaactttcgttcagttccagcaatcgtagacgttttaaacaaacttcgacctgaactttgtcaggctactcatgatccaagcgcaaacggagaagcacgtttttttcataccaatacctaccaaggccaacgaactaatcaaatgcactccaaagaggatctacctcctgacctagcacgacgggtccgagaagacttgatgctacgactacaaatcgaaggttgggatctaaataaaacaaaagtacttatgcttactcataatgtcttagctgcagagcagggatatccttccattgctgaaatattcaaaagccgcacagagcagttcgtgaagaaagaagatccagcaataaaattttttgcagaaatagtggaacccatgtacgccgcctataaagcatctcaatatggcgatatgttcagggcatacggttcacgccccgccatcaccagacaggaagataaaatcaagtggcgccaggacatggactccctccaaaagttgcgtgaagaaggtactatcggacaggttatcgaccatcttaagacaactcgacgtccatccccgccagatcgcttattacgccgtgacgaagaattcaatgcattggatggcgataatatacttgaagctggatcagctcttcagcgatatagcaagctgcgacctgttccttacaaagaaatagttgaagtagtaaagtttattgagaaacagacctcgtttgccacacaacatagtgtcaaaggtgctgagtttgagaacgttcttgtcgtacttggaggtggctggaaccactacaattggccacaactcttcgaacttattcagacaaagtcgttgaatagcaaaaatacgaaaggtttttatcgcgctcgcaatcttttttatgtatcaatctcacgtccaatgacacgactcgcagtcctttccacgcagactttaccggctccagcccttgaagcaataaataatctttttggagtagataatgttatggcgctcaatatcgcaacgtaa

SEQ ID NO: 75170 - DNA, 2301 bp, Pectobacterium carotovorum subsp. carotovorum
atgccgactacggacgcatcagttgaggtagcacctaatatgtcctccccgatccgcctcgcctgtgtcgaggtctgcaatttccgacgcctagcatgcacccgacttgatcttgatgaaggaactacgattctggttggtgcgaacaacagcggtaagacgtcgctgctgaccgttctacgaaattttcttggggactctcccggcttccgcccgtatgacctaagtctttcccaatgggccaagctacgtgagctaagcaaagcttgggaggggctcactgaagatccgactactgacacaaaggacaccaaaacttgggaagttcagctacggaccttgctggactgcatgccgttcgccgacctatggttcaacgcaaaagagggagcctacagctacgtagcaccctacatcacctcgttgaagtgggagggtggccctgttggcgtaagagtacgccttgaacccgtttccaacaccgatgatttgaggaagatggcgtggtcctatcgtgaggccagattccccgtgaaggaccttccgcaagaggggcatgcttggccagtcgacatcatcgactattggctgagaaacccatcagatctgcgtcgcatcgcttcgtatcgtcttgatcccaaaaagggaccactggctcctacggctgccgcgctcccgcagagcctgccactaagctcttctcccgtggagctgagccacctaagaaaattggttcgcgttgactttgtttcagcacaacgcgggctcggatctgaggaagatgaagcgcggacagagtcaccaagctcgcggccaggcatgttctccagtcaactgctcaagttcgcccggcagcatctgaatgtatccaccagcgctccagtacaagacgaggctctcgtgaccgctatcgcgaaagcacaggcggatcttgacgagttgatctacgaagcactcaagccggcaatggaggatgttgagatcctaggctaccccggtctgcacgacccccagcagttccactttcgaactcgaattcagaccgctgatcttctggctcatagcaccgcagttcagtatcgcatcgacaagacggctgtcgatgagtccttgccagaacattccattggtctcggttatcaaaaccttcagtccttgagttttatgctcgtttcattcagagctgcgcgtctgaatccgccgcaaggagcgccagccgcagtgcatcttgtgttggtcgaggagccagaagctcatctacatgtgcaggtccaaagaaatttctcatccaatgcgctggggctcatccgacctaaggaagcaatccactccaaactacgcagccaattgctcatcagcacacactctagtcatctggctcatggtgacagtttcactcgccttcggtatgtgaagagattggcaggtaaatcagaagggggaaaaccaagcaccgaagttgtgaacttgggtgatgccttcggcaacgatctagagactcgtacctttgccgagcgctacttccaagtgcagcacaccgatttgctattcgcagatgcagctattttcgttgagggtactgctgagcgaatgctcataccactcttcattgaacgagattttccgaaactcgccaagaagtatgtgtccttcgttgacattggagggagtcacgcacaccggctcaggcctctcatcgagcgccttggtatcccaaccgcagtcattaccgacctagatccggtcattcccatcaagtctgcaagcgggaggatagtgcggtccgctgtgcatatcgcggggcaagctgacctagagtgcggcaatgacacattgacatcatggcacccaaagcttgctaaattcgacaggtatggaacgcccacgacagcagaacttgagtggatatcaccgactggagtgaaagttcggttcgcttggcagttgccaatcagtgcggccagcgctcaatggccaagctcgtttgaagatgcgctcgtgttgtcaaatatcgcctggttcaagaagcttgatgaagaagttgacgaaagaggcaagaaaagaaagcaccgtggtgcactaggcaaggcgattgatctcgtgatggatcatccggaccatgtgaagcttgttgaggcactccacaaactgatgcacggcagcttcagtaagggagactttgccgccacgattttcgaaaggctcaacgctggggctgagctggactgcccagagtatatcaaggacgcgcttgcctggctaagtacagagctgaaggtcaccgcaggtgaaacaccatga

SEQ ID NO: 75171 - DNA, 1956 bp, Pectobacterium carotovorum subsp. carotovorum
atgaacgtacaagtccagtcgacaggcaatgaccgcgatgcccacgtcgtggaggaaatctgcggattcgtcactgcgccggtccctcgaagcttcttcctctttgcaggtgcaggttcaggtaaaacgcggacgctcgttgaggtgctacgaagaattaccggcgtggttaaacacgaagcaggcgggaaatacgccaagcgccttcacagccaaggccaagccatacgggtcatcacttacacaaaaaatgcaaccgacgtcattactgggcgattggggagaaacgacctggcagctgtatcgacaattcacgcgttctgctgggaacttatccaagggtttgatgtagatatccgagaggcactgcttgcactcaaagatgaagagttagcgatcgctaaacaggctgccgcagagaagaaaaacggagaaaccgacacggatcgcaggaaatacgctgaaattgcagatgaagctgaaaagatacgcttcgttgagaaatttatctatcatcctgaccgcaacacatatggcatcggcgctctagcacatgcaacggtcctcgccgttgcagcttggcttgtcaaccacaggccaactctccagcgcattctggaggagcatcatccgttggtgctgatagacgagtcgcaggacactatgagaggcatactagatgcactcttgaacgtggaggccacgcggccgggaaagtttactctaggactacttggggaccatcgtcagcgcatttatccggacggccatcgtgatttgcccgcgcatgtgccgactaattgggcgttccctgcgctgaaaatgaatcatcgaagccagaagcgaattgtggatctcatcaacgcgatttggcacgccgacatcgctggccgaacacagcccaagtcgggttttgctcagtacccgcgagaagagaaatcagcaggcactgttcgaatctttattggcgatgccgcattggcaacagcagaaaaggttgagcgtgaacgtcaatgcgccgcatctatggcaaaggcgaccggggtcgaagcctgggtggatgagaccaggaagttcaagacattggcacttgaacacaagctggcggcgaaacgcggaagcttctttgatgcgtacctcgccatggacctattggacgaagacgcagctgctccaaagagtaacggtgaacggactgggccggccatggtgaggcctttgcttggatcaatccttgaccttgcagcctgcttcgaaccgaccggtgatttggacgagtttgcagcgatggaggttttgcgagcggggaaagcgcttgcacatcttcaggaagatgttgaggagcggcggacgcaactcgcaaaaatacacaatgctgtgacggccttcggtgctgcaattcgaaatcctagcgctaccgtacgagaggttttgaatcctctattgagcaagcagatttttgatgcagacgaccgccttgttgcagcctttgccgatgactcacctcctcctgctccacctaaagtgctgagcaaggaggagaggaataaccgactgaaacggggctggagtcatctctttaatacgccctggtcgcagattgcacgctaccgggattacttgcacggagaggccgaactcgcaacgcaccaagtggtcaagggctcagagttcaaacacgtgatggtggttatggacgattatgaagcgcggggattcttgttctcatacgacaaagtgttcggtgctgagccgctttctaagggggataacgagaacgtcgcagcaggcaaagaaaccactgttgaccgtaccttacgactgctctacgtcacttgcagcagagctgaagaaagcctcgccttgattttatgggtaggtaatcgcgctgccgcagccgaagcaatcaaagctatgggatggtttcaggaagaggagatttccttattggactga

SEQ ID NO: 75172 - DNA, 1791 bp, Pectobacterium carotovorum subsp. brasiliense; identical to SEQ ID NO: 75160

SEQ ID NO: 75173 - DNA, 1821 bp, Pectobacterium carotovorum subsp. brasiliense; identical to SEQ ID NO: 72835

SEQ ID NO: 75174 - DNA, 2295 bp, Pectobacterium carotovorum subsp. carotovorum
atgaacattcagcacatagagatatctaatttccgcaaactactttctgtgcgaattgacttctctagtgagaccacgctgcttgtaggtgcaaacaatagcggcaaatcttccgcaatgctggcgctcaggagatttttggtttcaaaggcctctgcttttcgactccaggatctgactctttgtcatctagccaagttggatgacattggtaaggaatgggaaaatccacccgaagattttgaaatccctacaaccaaagactgggccaactggctccctagtctagatatctgggtgtcggcagatcaaggagagttccactacatccgggatctcatacccagctttgcgtggcgcggtgggcttgtgggaatgcgtttcctacttgaaccagatgatatgaatgcactgtatacagactatcgtaaggagcgcacgagggttgcagagcttgaggatgctttagataaggaagacccccctggtagccagctgaagctatggccgcagaacctacatgattatctgagccgtcgtctaggagctcaattcaaagttcgttggtaccgcctagatcctcaacaacttaataaacctgacaagtcgactcgaatggctcaaatgcagcaattgggtcctacaaccctgcctctggatagcaatccactcagtggattaattctagtacatgagattaatgcacagcggggattcggcgaccattcggacgataatcaaggcgataacactagacctagcagtgcacggaaactctcggaacaactcagatcctattactcccgacatcttgatccgggtgacagcccagatatctcagatctcgaagcgttgcgggcgatagatgcagcccaatcggcattcgataccaggttaagtagcagcttcgaaactgctattagagaagtcgaggggttgggctaccccggccgcaatgacccacgcatcaaagtcgcaagccgtctggcaacaactgatggcatgaaccatgaagcggccgtcctttttgagttagattcaattcagggcaccccagaagctcctcctcttcatttaccagagaccgctaacgggttgggatatcaaaacctgatatctatgattttccggctgatgggttttagagatgagtggctaagaaaaaccagagccgctagcgctgaagtaatagaccacattgaacccatccacctcgtgctcattgaggagcctgaagcccaccttcatgttcaagtacaacaagtttttgtgcgacacgcctataaggttctatgtggagacgatttacttaaacgctactcaaatcttaagactcagcttttagtgagcacacactccagtcatgtaactcatgaagtggagtaccagaaccttaggtatttcaggcggctccctgctgggatgaatggcatcaatataccagtgtcaacggtctctaatctctctaacgtgttcggcgagggaacaaaaacaacagagttcgtaaccagatacctgcgtgcacaacatgcagacatattcttcgccgacgctgtcattttggtagaagggtcagcagagcgaatgatgctgccgcattttttgcggaataagtttccattccttgaccgctgctacatcacaactctcgatatcggcggcagtcacgcacaccgactaaggcctttaattgacgccctcggcatcctaacactcgttattacagaccttgatgcagggcttaataaagctgcaaaaccagtgcaaagaaacgcaagtcagattacgaacaatccgacattgcggagctggatgaaactgatgcatcttggcagcacagtggatgagttgcttgaactgccagagaaccaaaaagagcaccagatcgacgatctgtactcggtacgtatcgcctaccagactcctatatctacccacctgccctcgactggtgaagcaatacaagctcttccaaatacctttgaagacagctatgtacttagcaacgtcggttactttgcggaaaagacaggcggcactggcctgatgaaggctttcgtaaaagttttgaatgaagtgcgaacatcggaagcactcggggaaggattgttcaacgaattacgcgaaggaaagaaagcagaatttacgttgctcgttttgggcgacaaaaactttcccagcctcgaaatccctgaatacatcagtgaaggcctaaattggcttgagtccaaattacgaagcaagcaaaaagagttgctggtaattccacccgagagcacagaggtggcgccatga

SEQ ID NO: 75175 - DNA, 1848 bp, Pectobacterium carotovorum subsp. carotovorum
atgagcgaggcaactgtcgcagatgccgacaccaccatcaaagcttgcctgaacctgacagatccgaagagcttttttctttacgccggtgctggttcaggaaaaacccactcactcgtcgaggctatccgtgaactaataaaacgcgagcgagaacgcctgacattcgaggggcggcgcattgctgtgatcacctatacaaatgcagcctgtgacgagattattcagaggttagagtttgatccactcgtggaagtctcgaccattcacgcattcgcctggtgcctaatccaaggattcgacaacgagatcagagagtggctgaggatcaaacttagccaagacattgagaaaatcgagggcgagctcgcacgctcaagaggcgaaaataaaacttctcgaggaaacagacggaagctacaaagcaaaatacgcagacttgagactctcgacgagattacgaagttcatctacagccccacaggtgacaacagagagttgcaagcactcaatcacgacgaggtcattaagttaactgcagcattcgctcctcaacgccctttgcttgatgttctagtagaccgctacccaattgtattgatcgacgaaagccaggacacccatgctccagtaatggaggcttttctgaaagtccaacaattggcacagacacgcttctgcctaggactactgggtgacaccatgcaacagatttacggccatggagtaacgcgccttgataaagcgataccgggtgactggttgaaacctgaaaagctcgttaatcatcgctgccctcgcagggtggtagaccttatcaacgtgattcgaagcactgtagacgctcatcagcaaatcccaaagcctgatgctattgaaggtgtagtgcgtatgtactgcattagtcaaagccaaaatcaggcagcaaatattgaggaaaacatcgctcattcgatggctgtaatcaccagcgatagcgaatggactactggtcctgaaggacgaaaaaccttgattctcgagcataaaatggctggacgtaggatggggtttgagaagctgttcacgcctctatacgcagttgaacaccttcaaacaggcttgttggatggaaccctacccgcacttcgcgttttcagtgaaggcgtccttcccatccttaccgcaaaggacgatcacttccttctgcttgaaaccgtacgttctcgctctcccttgctcagtaaggacgcaatgcaatcaacaggggatcaatcagcccacatgcagcgtgtagaggacgcaacgcatgccctgctcgctcttttcgaaagaaatgacccaacactactagaagtcgcaacgcttctaagacaaactcaactccttaatgttaacgaacatcttgttgaagcaatggcgttgggagctcctggtgaggctccagaccctgaagatacgaacgcaatgaccaactacgcctaccagctattccttgagcgtcccttttcggagctggtagcctttgcgaattatgcggatggcctttcaccctacggcacacatcaaggcgtaaaagggctggagtttccacgagtaatggttgtcataaacgatgaggaggcaggcggcttcttattcagctacgacaaattgctgggcgtgaaagaaccaacaaaaaccgatcgagacaacgaacgtgatggcaaagacaacgcactagctcgtactcgcagacttctctacgtgacgtgtagtcgtgctgaaaatagcctggcgattgtcgtatatactccccagccgtcactggtaaagcgaaatgttattgatgcggggtggctccaagagagcgaggtcgaaatcctgtaa

SEQ ID NO: 75176 - DNA, 1791 bp, Pectobacterium carotovorum subsp. carotovorum; identical to SEQ ID NO: 75160

SEQ ID NO: 75177 - DNA, 1821 bp, Pectobacterium carotovorum subsp. carotovorum; identical to SEQ ID NO: 72835

SEQ ID NO: 75178 - DNA, 1791 bp, Pectobacterium carotovorum subsp. carotovorum
atgcggatttctcgagtccggttaattaatttcgccaacttctccaacgttgatgttgaaacgggtgaaagcattgttattgtcggtgagaacaaagtaggtaagagcaattttattcgcggcttgcagttgattcttgaccctgggttgtccgagcgcgatcggcaactgggctttgaacatttttgggatggattaggcgaagaaaaattgggggagacgattgaaatttcagtggatcttactgattttactgacgatccccgattgatggctcatctgaatgattgtgttgttaatccaggaccacccatggtggctcgtcttacctatcgctttcagacaaaaaccgagttaaatcgtgcccctgaatcgctaaaagactatgagtatgtgatcttcggtggtactgatcccgatatgcatattggcggagcgcttcgccgtatgttacccatagatgttcagggcgcgttgcgtgatgctgagaaggatctttcaagctggcgcaattcaccattgagaccacttattgaggagctcaccgcgtcgctagatgatgatgctcgtgaggaaattcagactcagatcgacgaggctcaacgggagctggctggtcatgatgacgtagtggcgacagctgaacgaattagcgaacggttggtagctatcgcgggtgatcaacatgccgttccagtatcgctggggcttgctccggctcgcgttgatgctctgctacgcagcttacgcttgttgctcgacaatggtatccgtggcattggtgatgccagccttgggacggccaatctgattttccttgccctgaaaagcctcgagcttgatcgtcttgttgatgacggagaacgagaccatacgtttttcgtcgtcgaggagccagaagcacacctacatccgcatgtgcagcgccttgtctatcgttacttcttgggcactgatggagataatcgtgatgaaagtactccgctgacaacgattctgaccacccattccccacatatcgccagcgttacgccaatcagatccatcgttctgctgcgtcatgacccggaggaagaggagacaattgctctttcaacggtaaatgcaccattcacgcagcgggatgaggatgatctacagcgctatattgatgtcactcgtggcgaaatatttttttcgcgaggtgttgtccttgttgagggcgatgctgagcgtttccttgtcccagctttcgctgatgcactgggtatcccgctcgacatgcttgggatcactgtgtgttcggtcggtggaactaatttcaccccgtatgtgaaactcctagggccacaagggcttgatattcctcatgtgattctgacagaccgtgatccagtgaacggcaggcatccacgtgttcgcagacggttcatcagtctccttgaattggttgaatatgagcactaccgcgactacgaaaatatggatgctgaagatgtgatcggacttgccaacgattacgggtatttcgttaatgagaatacccttgaaactgaactgttcgaaagcggactggctgaggagatgatagatgtaatccgacaggaacttccacaactgaagcaagagactctaaatacattgcagcaatggctggacgatggtgaagtcgatcaaggtcggttgttgaagctaattgagcgaattggcaaagggcggttcgctcatgcgctgtcctcctcggtgtcggaggatgtttgcccagattacattcgtgaagcactggagcatatccgcgatgccgtcgcgtag

SEQ ID NO: 75179 - DNA, 1821 bp, Pectobacterium carotovorum subsp. carotovorum; identical to SEQ ID NO: 72835

SEQ ID NO: 75180 - DNA, 1701 bp, Pectobacterium carotovorum subsp. carotovorum
ttggaaatatcatctctaaaactcaaaggttttagaaactttaaagatgcacacatcaattttaactcaaatactctggtcatcggtgccaatgatgttggcaaaagtaatatgttgcattcgctaagaatgctattagataaaagtatatcagattcagaaattgaaccaaatgaacttgactttcatttagaaaatggaaagtcatgtgaagaatttgaaattattattcattttaaagatatcaatgaagatgcagtactttcaattttgaaagggaatgtcagtgactcaggtgaatcgttcattaagtatattgcacaaaaatccgatctcagctataaactttttattggtgagtctttagactctttacaagaaatcaactctcgctattatcttaaattcgttaatttaaaatatattcaatcacaacgagatttagagcgatttatccgtaaagaaaaaagacaactattaaaaatcgcacagcaatcattgaactctgaagaaagagaagaagatgacgatttgttaggagagataagtatagatttacagtctattaatgataaaatatctcaacttatatatgtagaaagagctacaaaagatgtcaacgatgagctaaaaaaacttgcgcatcattactcagagtattctgtgcaactagatactggggcaattggaataaatgactttatcgacaacctacaacttggagctaatacaaatggttctaatgttatgcttggaggagacgggcgaaacaatcaaatattattagcattatggaaagcgaaaagtattaaggaacatgatatcgagaacgaggttatcttctatgttatcgaagaacctgaagcacacctacatcctcaccaacaaagaaaactggctgattatttgatatcagaacttccaggtcaaacgatcatttcatcccactcaccacaaatagctgtaaactttgaaccaggctcagtaataaggttgcttgaccgtgctggacacacagtagccgcaagtaaagggtgttctaaagatatttcagatggctgggaaggaatgagctatcggatgagtatattgccagcagaatcgtttttttcaaatggagttttcttaatcgaaggaccatcagaagttttattttaccattctttagccgaaaatttaaacattgatcttgattatttaaatatttcactggtttcagtggacggaatatcatttaaaatttacgtagctatactagatgctttagagatcccatgggtaatgcgaacggataacgatatatctaaacttaaagatcaagaaaagtggcaatattcaggtataaaccgatgtttagatatagtcggtttggaaaagtttgaacatagcgacatacaaatagtacctatagatactctgaccagcggtgattggcaaacagtttctgaagaaataaataaacgcggggtatatttatccaaagttgatttagaaactgatctggtaggagaattaagcgcaccaattttaaacgctttaggtaagaaaaatgaccaaggtgcgatagagtacttacaaaagaaaaaagcattaagaatgcgtgaacttcttaaagatataaaaacagaccttcacaaacttaatgccggtgaattagttaaaccgttaaaccatcttgtaaaaataattagaggtgaatga

SEQ ID NO: 75181 - DNA, 1626 bp, Pectobacterium carotovorum subsp. carotovorum
atgagtactttctcaccaacacctcagcaaaaattagccatcgactacactggaagcatggtaataacagcatgtccgggaagcggtaagaccacggttataaaagaaaaaatcagaaatattaccgactgtcttccagagcataaagggatcattgcaattacattcacaaagaaagcaagttcagaactggaacgtagatgcaaggctgaaggacacaatgtaaaacatagtttctttggtactattgatagtttttgcttaaaggaaataattattccatttctttcaagggtatggggaggaacaccaacagaatgcaaagtcttaaagaaattggaatctccatataaccatttcatagaaagcaattttgctggcacaccatcagttattaatatcaatgaggaccctggatataaaaaactatacgatgagggaatactttggatggggtcattctcggccttagcattaaaaataattaatgaatcatctgctgcgaagcggtatatcaaagcaagatatagccatatattcatagatgagtaccaagattcgtctttatctcagcatgagctatttctaaaaataaacgaacttggcttatgctccattgctgttggtgatgtttggcaatcaatctatgaatttagaggagggaattcggagcttcttttagaattggtaagtaatacagaatgctttaagcattttgagataaatttcaaccatagatgccacccatcaataagcaattatgcttcaagattgcttgaaccatcctatgttttactacctgcggatgagataagagtatttaggagacgacttaatggaaatcttaaagatgctgctgttacgatttcctcctggatttcaggatggctgagtagtggcgaatggaagttagaaaaagcaaatcaaatagccattttagcaagaaaagaaaaatcactaacattattctgctctggattaaacttaaacttcaggctttatgttgacacccctctagataaaattggtactgattgctcagatctatacaaagatctgttagcatacaagtacggctctataagtacagcacaagagtttattaacaaagtttttgatggggttatagtagatgataacactctgctcttactaagaaaaaaaataaaaacaattagaaatgaattaaaaaatgaagatttaatacataattttcacgatattgcatgtattttagggataaattcaacagaacatactgatggggctgtaataagaacaatctcagacgatattttagtcaaacaattcaaaccattagatgataatgagatacaagtaatgacccttcataaatctaaaggactggaattcaaattagtatttcacctagatttagatgaatggtctttcccatttagagaatataacagtgaagacagatacacacctcgatacccgacgcttcaacaagaacttaacctccactacgttggtataaccagagctgagaattgttgcatccttattaattcatccctcagagaaaatgcatctggggactttaaaaacacagatgaatcatatttcttcaaattaccgcagttaaataatctgtatagttga

SEQ ID NO: 75182 - DNA, 2295 bp, Pectobacterium carotovorum subsp. carotovorum
atgaacattcagcacgtagagatatctaatttccgaaaactattttctgtgcgaattgacttctctaatgagaccacgcttctcgtaggtgctaacaatagcggcaaatcctccgctatgctggcgctccggaaatttttggtttcaaaagcgtctgcctttcggctccaggatctgactctttgtcatctagccaagctggatgagattggtaaggagtgggagaccccctcaaaaaactttgaaattcctacaaccaaagactgggccgactggcttcctagtctggatatctgggtgtcggcagataaaggagagttccactatatccgggatctcatacccaactttgcgtggcgtggcgggcttgtgggaatgcgtttcctgcttgaaccagatgatatgaatgcgctgtatacggactatcgcaaggagcgtacgagggttgcagaacttgaggatgctataaataaggagggccagcccagtagcccgttgaagctatggccgcagagcctacatgattatctgaatcgtcggctaggagataaattcaaagtccgttggtaccgtctaaatccgcaacaacttaagaagccagacaagtcgactcgaatggctcaaatgcagcaattgagtcctactaccctgcctctggatagcaatcccctaagtggattaattcgagtacatgagattaatgcacaacggggattcggcgaccattcggacgacagtcaaggtgataacactaaacctagcggcgctcgaaaactctcggaacaactcagatcctattactcccgacatcttgatccaggtgacagcccggatgtctcagatctcgaagcgttgcgggcgatagaagcagcccagtcggcattcgataccagattaagtagcagcttcgaacctgcgattagagaggtagagggattgggctacccaggccgcaatgaccctcgcataaaagtcgcaagtcgcctagcagcaactgacggcatgaaccatgaagcggcagtcctttttgagttggattcaattcagggagcaccaggagctcctcctcttcatttaccagagaccgctaacgggttgggatatcaaaacctgatatctatgattttccggctgatgggttttagagatgagtggctaagaaaaaccagagccgccagtgccgaagtaatagaccgtattgagcccatccacctcgtgctcattgaggaacctgaagcccaccttcatgttcaagtgcaacaagtgttcgtacggcacgcctaccaagttctatgcagagacgctttacttaaacgatacccaaatttgaagacccagcttttggtgagcacacactccagccatgtaactcatgaagtggagtaccagaaccttaggtatttcaggcgactccctgctggaatgtacggcataggtataccggtatcaacggtctctaatctctctaacgtgttcggtgagggaacaaagacaaaagatttcgtaactaggtacctgcgggcacagcacgcagacatatttttcgccgacgccgtcattttggtagagggaacagcggaacgaatgatgctgccgcattttttgcggaataaatttccattccttgaccgctgctacataacaatcctcgatatcggtggcagtcacgcacaccgactaagacctttaattgacgcccttggtatcctcacccttgttattacggatcttgatgcaggacttaataaagcagcaaaaccagtgcaaagaaacgcagatcagattacgaacaatccgacattgcggagctggatgaaactgatgcatctgggcagcacagtggatgagttgcttgaactaccagcgaaccaaaaagagcaccagattgatgacctgtactcgatacgtatcgcctatcaaactcctattcccacccacctacccgtgactggtgaagcaatacaagctcttccaaatacctttgaagacagctatgtgcttagcaacgtcggtcactttgcggaaaggattggcggcactggcctgatgaaggctttcgtaaaaattttgaatgaagcgcaaacatcggaaacgctcggtgaaaggtttttcaacgaattacgcgagggaaagaaagcagagtttgtgttgctcgttttgggcgacaaaaactttcctaacctcgaaatccctgcatacatcagtgaaggcctcaactggcttgattccaaattgcgaagcaagcaaaaagagttgctggtaattccgcccgagggcgcagaggtgacaccatga

SEQ ID NO: 75183 - DNA, 1848 bp, Pectobacterium carotovorum subsp. carotovorum
atgagcgaggcagctgtcgcagatgccgacaacattatacaagcttgcctgaacctgacggacccgaagagctttttcctttacgcaggcgctggctcaggaaaaacccactcactcgtcgaggctatccgtgaactaataaaacgcgagcgagaacgcctgacgttcgaggggcggcgcattgctgtgatcacctatacaaatgcagcctgtgacgagattattcagaggttagagtttgatccactcgtggaagtctcgaccattcacgcgttcgcttggcgcctaatccaaggattcgacaacgagataagagagtggctaaggatcaaacttggccaagacattgagaagatcgagggcgagctcgcacgctcgagaggcgaaaataaaacctctcgaggaaacagacggaagctacaaagcaaaatacgcagacttgagactctcgatgagattacgaagttcatctacagccccacaggtgacaacagagagctgcaagcgctcaatcacgacgaggtcattaagttaactgcagcattcgctcctcaacgccctttgcttgatgttctagttgaccgctacccaattgtgttgatcgacgaaagccaggatacccatgctccagtaatggaggcttttctgaaagtccaacaattggcgcagacacgcttctgcctaggactactgggcgacaccatgcaacagatttacggccatggagtaacgcgccttgataaagcgataccaagtgactggttgaaacctgaaaaactcgttaatcatcgctgtcctcgcagggtcgtagaccttataaacgtgattcgaagcactacagacactcatcagcagacccccaagcctgatgctattgaaggtgtagtgcgtatgtactgcgttagtcaaaaccaaaatcaggcaccaaatattgaggaaaacatcgctcattcgatggctgcaatcaccaacgacagcgaatggactactggccctgaaggacgaaaaaccttgattctcgagcataaaatggctggacggaggatggggtttgagaagctgttcacgcccctatacgcagttgaacaccttcaaacaggcttgttggatggaaccctgcccgcacttcgcgttttcagtgaaggtgttcttcccatccttaccgcaaaggacgatcacttccttctgcttgaaaccgtacgttctcgctctcccttgctcagtaaggacgcaatgcaatcaacaggggatcaatcggcccacatgcagcgagtagaggacgcaacgcatgccctgctcgctcttttcgaaagaaacgacccaacactactagaggtcgcaacgcttctgctgcaaactcaactccttaatgttaatgaaaatcttgttgaggcaatggcgttgggagttcctggtgaggctccagattctgaagatacgaacgcggtgaccaactacgcttaccaactattccttgagcgtcctttttcggaactgacagcctttgcgagttatgcggacggcctttcaccctatggcacacatcaaggcgtaaaagggctggagtttccacgagtaatggttgtcataaacgatgaggaggcaggcggcttcttattcagctacgacaaattgctgggcgtgaaagaaccaacaaaaaccgatcgagacaacgaacgtgatggcaaagacaacgcactagctcgtactcgcagacttctctacgtgacgtgtagtcgtgctgaaaatagcctggcgattgtcgtatatactccccagccgtcactggtaaagcgaaatgttgttgatgcggggtggctccaagagagcgaggtcgaaatcctgtaa

SEQ ID NO: 75184 - DNA, 1791 bp, Pectobacterium carotovorum subsp. carotovorum; identical to SEQ ID NO: 75160

SEQ ID NO: 75185 - DNA, 1821 bp, Pectobacterium carotovorum subsp. carotovorum; identical to SEQ ID NO: 72835

SEQ ID NO: 75186 - DNA, 1872 bp, Pectobacterium carotovorum subsp. carotovorum; identical to SEQ ID NO: 74904

SEQ ID NO: 75187 - DNA, 1869 bp, Pectobacterium carotovorum subsp. carotovorum; identical to SEQ ID NO: 74905

SEQ ID NO: 75188 - DNA, 1881 bp, Xanthomonas axonopodis pv. phaseoli; identical to SEQ ID NO: 75058

SEQ ID NO: 75189 - DNA, 1656 bp, Xanthomonas axonopodis pv. phaseoli; identical to SEQ ID NO: 75059

SEQ ID NO: 75190 - DNA, 1785 bp, Cupriavidus sp. SHE; identical to SEQ ID NO: 71894

SEQ ID NO: 75191 - DNA, 1338 bp, Cupriavidus sp. SHE; identical to SEQ ID NO: 73899

SEQ ID NO: 75192 - DNA, 1737 bp, Flavobacterium sp. JRM
atgagtatcagattaaaaacggttcgaataaaaggattcagaggttttaaaaatattgaagtcgactttcaaaacactacagtaatagtaggaacaaataatgctggaaaaacaactattcttaaagcattgcaacttgccttaacaaattcacattttatttctaatgatgattttttctactatgaagaccatattgacgatactataattatagatttattattcgttccaatagatgaacagaatcaagtagttaatgaatttaatgaaaaatggagtgatatttttaaagtcgatagaattggaatttcatctgtaggagaccaaataatggcttttagaacttcaataaaagagtataataaatcttttaaaaaacaacaattttacattgaccaatgggaggaattcaaagatgataatgacaaatattggtttgatgtcgaatatgataatgagcaaagtttttattttgatgaaattccatttttttatcttgaagcaaatagagatattttagaagatattaagtcgaaatcttcatatcttgggagaatattatcttcactggaattctcagctgcagatcaacaaatgattgaaacacttatttcacaactaaactcaactacaatagcaagttcagacacactgacagagttacaaacgactttagaagaactagatactgcaatggataatccaaataattcagttcaactaacaccttttactaaaaaagttagagatttgaataaaggtatcaaaataaattattctgaattttcaatggattatcacggaatgggaactagaagttggtcatctctacttgttctaaaatcattcttaaatcttaattgtaaaatttatcatgataacgataggccttattttccagtattagcaattgaggaacctgaatcacatttgcatccaaatgcacaaaaaaaactatattcacaaataaatgaaatagttgggcagaagattatttcaacacactccaattacatagcatcaaatgcacaactagaagaaataatttccatttgtaaaaatcgaaatgatatacaaattggtaaactatcagctggcttcgactccgaagaaattagacaaatacgcagacaagtaattaatgcaagaggagaaatatatttttcaaaattagttgttctatttgaaggtgaaactgaagaacaagttcttccaatcctagtaaaaaaacactttagtattgactttgttaatttaggagtaaactttatcggtgtaggtggatttactaaatatctaccatttattagattttgtgaatcattcaacatagaatatttaatcttcagcgacaatgagccagatgtcaatactgatgttctcagacagatatccaaatctgaaaaaaaagattctagtaaagttgtttttgtgagtccgaataacgattttgaaagagagttatgcgaagaaggatatattgatgaagtaaaaagtgcttaccataaaatagaattagaaaaatgtactaatgaacgacataaacaagcaaagcaagtacaactaaatgcaattcctgatgctgactattatgaaattataactaaaatgaaaactcaattcgcccccttaattgcacaagagttacttatatctgagaagccattacctgcaaaaattttggagttatttggtaaaattaatgacatcttaaatccagcaacaaatgaataa

SEQ ID NO: 75193 - DNA, 1824 bp, Flavobacterium sp. JRM
atgaataaaattaacttgtcgaaaaaacagtcacaaattgtagatttaggaacaggctctttcttaattgaagctagtgcaggaagtggaaaaacaagggttcttactgaaagaattaaaaaacttttagaagacaattcacctaaaattttagcaataacttttacaaataaagcaagtgaagaattaaaggaaagaatagatttagacaaacataaaaataaaaatatttttgtaggtacatttcattccttttgccaatcaattttagaagccagatttaaattactaggcttcccaaaaatgccacatatttttgaggatgaaaatgatagaattgaaattgtagaggaagcaattaaatctattccatatttcactgaattatataacaatttagagagcaaagaaaaacctatttataagtcaaaagttctttcatttatttcatccgttaaacgagaattgctagaaccggaagacttaataacagaagaaggtgaagaacattttctatttctatataatgaatatcaagatattttaaaatctaataatgctgtagattttgatgatttaatattattagcctataatcttttttcaaataatgaagctgttcaaaatttatattcaaaatcttacaacaatatttttatagatgaaggacaagatttaaataaagcccaatattatttattaaagtcactttgtggaaatcatattaaaaatataatgattgttggagacccaaatcaatctatttacggtttcaatggttcaactccaaaatacatggacacattctttattgaagatttccatgctacaaaaatcacattagaagaaaattatagatgttctaaagaagttattgatgctgcaaataaattaatgaatcttaatgttggtgctgtaaactacgtcattaaaggtaaattcgaaatctataaagctagcaatgaaaaagatgaagccagttatatcgccgaaaagattaaaaatcttattaatctccagatacatagtgacattgaaggtataattgactataattctatagctgttttaggtcgtaataaatttgctttcaagtatattgaagatgaactgctaagaaataagattccatattattttaaatcgggaaatattggaataaaatttcaaactacgtttatgaaattatttgataattattttagaatcaaaattaatccatcagataaattacatctaaaaagactaaaaaacttacttaaaattgaagattttgaaaatgaagataaaatactaaaatccaaattttcatatttctcggtcataaaagatattattaataatcttactgaagataattttaaaaaatctttgaataagatttcagaaaatataaaagattttactttttttaatgatgatgaaaaacttgaaatatataatgaattagaagaactgaaaaatttatggaccgaatactcatacaataatttaaaaccaaatttgacaggatttaagaatacaatttctttaggcatactcaaaaaagattccaagcaagaaggagtatgtttaagcacagtccatacaatgaaaggacaagagtctgaaattgtttttttaataggtttagatgatggaacattcccctattatttagctatacagaatggtggcgaagaattaattcaagaaaaaaataatttatatgttgcgtttactcgtgcaaaaaggtttttatttgtttcgtatccatcagttagaattatgccttggggtgattcaaaatcaagaataatttctagattcttgaaaaatttttaa

SEQ ID NO: 75194 - DNA, 2184 bp, Flavobacterium sp. KMS
atgaacatagattgcgtcgatatccaaaattttagaaaattaaaaaagtgtagaattgatttttctaaagaagagacaattttagtgggaccaaacaatagcggtaagacaactgcaatggatgcattaattagatttttaaagaaaaagaaattttccagtagagattttacattaacaaattggttagaaataaatgcaattggtaatttatggattagtgaacctgaattatcaaaattagatttcacaatagaaaaatggatcgataatttaccatcattagacatttggtttcatgtagaacaaaatgagattcatcatgttattaatctaatacctacccttgattgggatggtggctttttaggagttaggttgcggtttgaaccaaattatattgagcaagtatatgaagaattcatgttctcttattctaattcaaaatcaattactggtgatgaggaaaatgattttaagctatggccaaatgatctatgggattttttagataaaaaaggcaatttaaataaattattttctataaaaacttatttattgaattcagaattaaaagattcaactcaagaacttcttaaagataatatacctacagaaacggatatagtaagcggacttataaaagttgatattataaatgctcaaagaggtttttcagacataaatgttgatgcagacgatacctctagcattaaaaatttatcaagccaattaagagaatactatgataggcatttaaacccttctgaaaatccaacaacagacgatctgaaagctttaaatgcaatacaacaagctaaacagctttttgaagataatttacaagagagtttcaaaccttctttagatgaattgcaaatgcttaattatcccggatttggtaatccgacaattaatttatcaagtaaatttaatactgtggacactttaaatcacgattctgcagttcaatataatttatgtactgaaaatccaaatcttactcttcctgaaaaatataatggtttaggttatcagaatttaatatctatgatttttaaattaattagatttcgagatgagtggatgcaagtgggaaagaatcataacactggtacagtagttaatagtggagaatttgaaccattacatttggttttaattgaagaaccagaagcacatttacatgcacaggttcagcaagtttttataaaagaggcatataaagtacttagaaatcataaagacttgaaaattggtaattttaaaacccaattattaattagtactcactcaaatcacattgctcatgaaataaattttacttcattacgatatttcaaaagaatcaaaggaaatagtggatcaataaatttatctgaagtagtaaatttatcagagacttttgggacaactgatgactcaaccaaatttgctattagatatttaaaagctaatcatagtgatttattctttgctgatgccgtaattcttgtggaaggaccagttgaaagaatgctagttcctcatttcataaataaaaatcataaaaatctaacatcatgctatatatctatactagaaataggaggtagccatgctcatactttaaaacctcttattgaaaatttaggaatactaactctaataattactgacttggattctgtcgatccatctagaaataatgcaaaaactctacctgaaaaagcaaaaaaatataaaacaggtaatgatactttaaaaaaatggtttcctataaaaactgaacttgatgatttatttaaattgagttctacagaaaaggaacatacgatttatccaattaaagtcgcataccaaattccactacaaattaataatggaaaaatggatgttgaagtatatccatatacttttgaagattcattagtaatggaaaataaattaatttttgaaaaaatatcaaaagcgactggacttttagcaaaaatgattgatgcatcaaaaatagaagatattaatgtctctgctaaaaaaatgtatgaggtaattactgaaaaaggagcaaaaaaagcagaatttgctttagaacttttatattttcaagaaccaaacgacttaataaccccagaatatataaaacaaggattagattggcttgaaaccaaattagtaggtaaaaaagatggtttaacagtataa

SEQ ID NO: 75195 - DNA, 1905 bp, Flavobacterium sp. KMS
atgagcgcagaaaaatctaatcatgacactgatgatcatgtagatacagagatatataactgtttgaaacttgaaaatcctaaaagcttttttctctttgctggtgcgggatcaggtaaaacaagatctcttgtaaaagtcttaaccgattttaaaactgaatatggaaaacaattgagattaaacagaaaaaaggtagcaattatcacatatacaaacgcggcttgtgacgaaataattcacagattaaaatatgacccaatttttgctgtaactacaattcatagttatgcgtgggaattaattaagaactttaatcatgatataaaattatggttgaaaaataatttagctaatgaaatttataagttagaagaagaacaaagcaaaagtaaaaatttattaaataaaacatcaatagatagaacaaggaaaatcgagtcaaaaaacaaaagacttgataatttaaataatattcaacaatttacatataatcctaatggagataatatttctaaagattcattaaatcattccgaagttataagtattgctgctaattttatacagaataaaccattaatgcaggatttattagtttgtaaatttccaatagttttagttgatgagagtcaggatactaaaaaagatcttataaatgcattttttgaactacaaaaaaataaaaaggaatctttctcattaggcttatttggtgatactatgcaaagaatatatgtcgatggaaaagaaaaccttgaactagaattgccgaaagattggattaaaccagtaaaaaaaatgaaccatcgatctaataaaagaataatttcattaattaatagtattagacaatccgttgataaacaaaaacaagaaccgagaaatgaaaaggaagaaggcttcgtgaggctttttatttgtaagagaggtctagataaacaaaaaactgaagttaatgtatctcaaagaatgtctgaaatcacgggtgattttttatggaataatgacataaataatgcaaatataaaaacactgattcttgaacatcatatggctgcaagaagaatgggatttttagaatttttcgaacccttatacaaagaagatagattatcaacaggagtactcgatggaacattagcaggagctaatttcttcacaaaaataattttacctatagttaatgcaaatgaagtaggggataaatttgctatagctcgaatcgtcaaaaaatattccgcctatctaaataaaaatgaaattcttaaaaatgcacaacaaatagaaaatataagaaaagcaaatatggccttattagatttattggttttgtgggatgataatgcagatcctcttctaattgatgtaattaaaaatgtatataaaacggaattattccccttacctgatagcttacttacaattgctaaaagaacaaaatctgatttattcgaggccaataaattagaaaatattgaagttgaagacgaagttagtgatgatgtaattgacgcatgggatcttgctttagctaattctttttctcaaataaaacattataatgattatatatctgaagattctaaatttggaactcatcaaggtgtaaaaggattagaatatgagagagtaatggttattttagatgatgaagaatcgaaaggtttcttgtttagttatgataaattatttggttctaaagatctaagtccaacggatagaaaaaatatagaagagggaaaagaaaccgctaatgatagaacaagaagacttttctatgtagcttgtagtagagcaaaagaaagtttagcaatcgtagcttacaccgacaatcctgaaatagtttcaaaaagcgcaatagaatttggctggttcaaaaaagaagaaattgtaattatataa

SEQ ID NO: 75196 - DNA, 1701 bp, Lactobacillus ruminis DPC 6832
atggatggtgaaagaacatatatgaaatttgaaaaagtggttattaaaaattttagaaattttgataatgttgaacttgacttatcaaataaaaacatattttttggtctaaatgatgtggggaaaacaaatttcttgtacgatctacgatatgtatttgataaagatattcgtaaacaaaaccttttagattcggattttcataataagcagcttgataaaccaattgagattgttgttactatagatattagtgatgttgctgacagcgattgtcaaaaactccgtgcacagctaaaaggtgcattgctaagtgagcataataaggtacatataaagctttttgcagaatatagcaaaacagaaatgctcgctctaccgatattatcgtggggtggtgatattaatcatctttacgaaatgaagcaaagaggatatctatatgaaatagactatgtatttaatgtcatttatattgattcttatgttgatttgtattccctatttaaaaagaatgtgagccagcttgtcagaaatgaaaaggatgaagataaagatattctggcaaaaattcaaaatacagttgatgatttgaatgatcatattgcttctctgtctggaattaaagaatttgaggataaacttactccagaatatcaaaaattccatgatgaagggatatctgtttcaataaaatccgaaatcgcagtaaagggattgtactcaaatatcatcccatatattaaacaagataatgataataatttatatcctactgctggggaaggtaggaaaaagttattggcatattcaatatacgacatactgtcagatgaaaatgcggaaaagaaaatcaatttgtttttaattgaggagcctgaaaaccatcttcataagtctatgcagattgcattatcacaaatactttttaccgatagcaaatacacatacttgtttgtaacaactcattcgccttttgttctttatgaaatggataatgtaaatttagttcgaatatatagtgagcgaaaaatcaatagtattagcacattttataaagtgcctgatgcttatgagaaaaacaggaaaatgttaaaccgttgtttgtcagaagcaatctttgctaacaaagtacttttggttgaaggaccatctgaatatatgctatttagcaaagtcctttcagtagtgcatcctttttatgaagcagatggaatatatattttaccagttgatggtgtgggatttaaaacatattttcctatcctggataaacttgaaatttttagggtggtaaaaactgacaatgattttagagcggtaacaggaaaaggtacatatagtgctttaggcttttcacgctgtaataattatattggggaaaaacgtctgcctactgaaccaattcaagaaaattctgtttctgccaagaggaatttatataatttaaatataaatgatttggataaaatacgaagtgactttcatatttttttatcaaaagtggatttggaaaatgatttagacgagtttttacatgatagattatcagctttattggataatgataatcctgttaaatatttacaagatgcaaagcactatcatatggtggagatgattgagaaactttcggatacggattgcagaacaatatataatcattacaactttgcatgtttgaaggaggttgccgaatga

SEQ ID NO: 75197 - DNA, 1521 bp, Lactobacillus ruminis DPC 6832
atgtttgaaggaggttgccgaatgaaactatctccaattcaagagaaaatagtagaaactcccggtaacttaatagtaagggcaagtgcaggaacaggaaaaacccatacaatggttaataaaattgctaaggaaattgatggtaatcatacacataaagttattgctgcaattacttttacaataaaagcagcacaagaaataaaggatagattgtctgtcgatgtagttcaacacttcattggaacaaacaacagtttcgttattgaggaagttataaagccttttatgaaggatgtttatggtgctgatttcgatttggacatgagtacggactattcagctaaagttggtacttttcaagaagctattaaaaaaataaagaaggaaggtatcctctgctcatatcgagataataaaaggaactttatttttgatttggctcaagaaattgtagaaaattcttcggcttgtaggctttatcttcaagcaaaatattttaaaatatatatcgatgaatatcaagattgcgacaaatcaatgcataaattctttatgtatttatgtgatgaattgaatatcgaaacctttgttgtgggagatgaaaagcaatcgatttatatatggaggggtgcttatccagaggcttttaaaagcatctggaacaaaccaaattttaaaaagatatttatgggagataattttcgctcttgtcaacaaatacagaattattctaatctattatgtgatgagacaagaagtctttacaatcctacggaaaatatagataatattgtgtggctttctcctacaaaggaaaattgggcaacagaagtattgtctaatattgttcccgaaaaaaagtcagcattattgcggttttctaatgataacgcacgaataggagcaagtgaattaacaacaaacggtttagagtatgtttatatcccacagactcctattgctgatattacaacagatacagcgtggctttatacagcaattgctaaataccttataattggaaagtattctgcatatgatgtaatttcggaaatacctgttgagggaaatgaaagtcgcaaaacagtatctaccgtaaaaagattactcaaaagaattgaagagactatagatgatgagcagtctttcggctcatgtgtcacagcattggctgaatatcttggatatgatactcgccctgatcacataaacaaattattcaaaacaatttctgataccagttttcatgtggcatttgaagcggataaatacaaacacatcgcaatcacattccactcttcaaagggattggagtttgaacaggtaattgtatttgcagaggattatcgactgtctgatatatcgagtatatacaaccattatgtagcggttacacgtgcaaaaagcaaattgattatcgttaagttaaacaataacaatgcgaattgttttcacaataatttacaaaagatattttctgaaagcggtcataatatagaagatgtcgttttattttga

SEQ ID NO: 75198 - DNA, 2244 bp, Leisingera sp. ANG-S; identical to SEQ ID NO: 72354

SEQ ID NO: 75199 - DNA, 1950 bp, Leisingera sp. ANG-S; identical to SEQ ID NO: 72355

SEQ ID NO: 75200 - DNA, 2244 bp, Leisingera sp. ANG-S3
atgaaacttacacgcattgaaatcttcaatttccgcaaattgcggaacgcccgtctggacatgtcggataagcagacgttgttcgtcggggccaacaacagcggcaagacatcggccatgaaggcgctgcgcaaattcctcaaggatcgcggcggcatcgacacgcgcgatgttacagcctccaactgggccgcgatcgaacaaaccgcgagcgcctggacacaggaggccgaggcggatctcagctcgctcttggctcagcttccgttcctcgacgtctggctccatgctgacacgtcagagctgcaccatgtcgcgcatttgatcccaacacttacctggactggcggtctgctgggagtacgcctgcgcatggagccaaagaagggggccgacatcaaggctcagtacctagccgcgcgagaggccgctcaggcgctacaacccgacggcgcaacggccgacggattcgcgctttggccacgcgactttcgggaatttctggacaaacgcctgaaggacctattcgagctcaacgcacatcttttggaccctgcgagcttcacaacgacagagccggtggagccacatcccctgccgcccttgtcggaggggatcggtgcgaacccatttgctggcctcatccacattcgtgagatcaacgcgcaacgcggtttcgaagatgcgggagacagtaagggcggcgacgatgagccaacaaaccgaaccagccggaagatcgccagccagatacagccctatttccgcaaacatatcgaccccgaaacggaccccacgccgaacgacattaaagcgctcaaggccatccatgatgccgaaaccaccttcaatgcccgtctcaaggatggcttcgccgatgccatcaaggaactggaaaatcttggctaccccggcggactcaacaatccaaaactcttcattgccacgcagatcaaacccgttgacgggctcgatcacccagcggctgtgcaatacgatatatcgggcgacgcatccggggtgaagttgccggaaagctataacggtctgggcttccagaacctaatctccatggtgttccagctgatgcgcttccgggatgactggatgcaggtaggcaagttcaaatcccaagtggtgagcgcggacgacaggggcatcgaacccctgcaactggtgctgatcgaggagccggaggcgcatctgcatgttcaagtgcagcaggtcttcatggccagagcctacaaggtgctccgcgaccatgatgatcttagggagaagggatcggcttttaccacgcagctggtcgtgagtacacattcgggccatatcgcgcacgctgcctcgtttgaggaactgcgttatttcaagcgcgagctgccaagtcccggagttgtacccacggccactgtggcgaatatgacggggctcttcggagaggatacagaaacccgtcgtttcgtgacgcgctatctgctgagcacacattttgacctattcttcgccgacgccatcatcgtgatcgagggtgccgcagaacgaatcctgctgccgcatctgatccagcatcactaccctaatttggctgcggcctatctctctttcctggaattggggggcagccacgcgcaccggatgaagcctctgatcgaggcactggagctaccgacgctgattatcaccgatcttgacgcggtggtggaggtcaacaagggcggtaaggttgtcaaacaatcggcccagccttgctacggggccgctcagaccacctcgaaccacgtgctaaagacctggctccccgggctagcagagatcgacacgcttttggctcctccactcaaggccctgtgtcacacggcctccgaccgccccatcgccgtcagttaccagacactgcaaagcgttacccttggctcggtgtccaagaacatcacgcccagcaccttcgaggatgctcttgcgctgaccaacccgaaactcgtaaaggacgccgcgaaggcggaactgtcctgccgcatgacccgtgactttgccaagttcatcgctgccgagtccacgccagaggacctcgccaccgcgctctttgatcggttggcaaaaaaaccggagaaggccgccttcgcgctggacctcctttatatcgaggacatcaaagcacttcgagcgccgccctatatcgacactggcctgacttggcttgcgcgccagctgaaggacggagggggtgcgatatggtgggcgtga

SEQ ID NO: 75201 - DNA, 1950 bp, Leisingera sp. ANG-S3; identical to SEQ ID NO: 72355

SEQ ID NO: 75202 - DNA, 1905 bp, Pantoea agglomerans
atgaagcttgcaacaattcgtctaagtggttttcagtcttttggtcaggaggccaccgaactgagccttgaagatatcacatatatcatcgggccaaatggttccggaaagaccgccgcacttcaggctttgtgtcgactttttgcgtttgacccttcgctacggcgggttcagcgttcagatttccacatcccttttgacgaagaggaggcacccgctgagcgccagttgtggatagaggcagattttctatttcctgaacttgaaaaggaccaggacaacagcactgttgcacctcattttagtcatatgcgtctggacgagccagaaggtgtagcgcgcattcgttttcgccttactgcgaccatggggctggatggcgacattgaagaagctttggtctatgtcctggatattgatgccgatggctcccctctgaatgtggctcaggtgcccagagctgaacgtaatcatatacaggtgcattatctgccagccagacgcgatcccgcggaccatataacttatggtgcgaacgcgttacttgggcgtttacttcgcgctgtccgctgggatgccgagcgcgatacgattaaagggctgactgaccagataagcgaaagcctcgcagcaaacccctcagtcaatgcttttagtgaaagtttaaaaacaacctgggcaacactgcataaaggtaagttttttgctgatcctaaaattacttttgttgcatcagaaattgagtcgctgttacggcatttatcggtttcctttactccgggtcacgatggatcatttgtcgatttctcccgcttgagtgatggccaaaagtcgatgctttacctttctcttgttttatcatctcaggcgataggcagagctgttcttgctgagaaagatgtatcctttgaccccgacaaattacgcccgccggtctttacactggtagccctggaagagccggaaaacagtctttctccacattatctgggacgcatagtgagttcccttaatgccatgacaaaacatccggatgcgcaagcactgattgccacgcatgcacccactatgctgcgccgagttgatcctgagcgaattcgttatcttcgactggatgagtcacgagagacgcgggtcacttgtattaagttgcccgagacaacagatgaggcacataaatttgtgcgggaagccgtgcaggcatttcctgaaatctatttttcgcggctggtagtgcttggcgaaggtgacagtgaagaaattgtgttgccgcgtttgctgcaggccaaaggtgcgcccgttgatgagtcggccatcacgatagcgccgttggggggacgacatgttaatcatttctggcgactacttgcggccttaaagatcccttatcttacactgcttgattttgatttagcccgctatgcggcaggctggggacgaatcaagtacgtcaacgaccagttttcattacatcatccgggtaagaaactgcctgaaaattatggaattccacattggaatgatggtaaacagaaatttcgtaacttcgaaaattatctcgacctgcttgaagagcgtggcgtgtttttctcctacccgatggatttagacttttcaatgctactcgcttatccagatgcgtatggcgttgataaagaagagcccgacgaggcaacgattaaagctgtgctcggaaaaagtcactacgatccaacgcaatacagggatgacgaattagcgctgttcaatacctatcaccaacgtttcaagcttggcagcaaacccgcagcacacatcgaggcgttgacacagctaacagatgcagaactgcttaaaggcatgccagtatctctggacaatctggcagaagccgttattgccagactcgcggagctgccagaatga

SEQ ID NO: 75203 - DNA, 1665 bp, Pantoea agglomerans
atgattactgttgaagattggcaacccgccgatggattgacgctggaacccaatgctgaacgtgcagcaaaagcgcgtaagcgttgcctggcgctgactgccggacctggcgcgggtaagacggaaatgctcgcgcaacgagcagacttccttttgcgcacaggaacatgccggtaccccaagagaattctggccatctcatttaaggtcgatgccagcagaaatctgaaggaacgcgttgagcgcagatgtggattggaattggcctcacgcttcgacagctatacatttcatgcgtttgccaaaaggatcattgatcggttcagaccgattctttcgggagaatatgcgctcgatgccgggtacaccattgtcgagaaaaaaaatggcccatctcgcactgaaatagaattcggcgatctcgttccactcgctattcagatattgaaaaactcaaaaattgcccgcaatgcgattcgacaaacatacagtgatatttttctcgatgaatttcaggactgtacgaacttacagtatgacttggttaaactggcgtttcaggggacgaaaattcgcctgactgctgtgggtgatacaaagcagaaaattatggcgtgggcaggtgcgctggacggtatttttcagagctttgttaaagacttcaatgcggtacccctcaatatgtatcgtaattttcggtctaagccccagttgctgcgggttcaaaatgaaattatccgtaagttagatcctgcatcagtcatgcctgacgaacaattgaaaggtgatgagggtgaagtatatgcctggaggttcgacgacagcctgattgaagcccgttatctggctgatttgataggtggctggataaataatgagggcgtaccaccagcggaaattgcaattctggtttctaagcagttggatttgtatgcagaccacctcatgtcggagttacatgagcgcgggatcccataccggaatgaacagcagttacaagatatcacggttgaacccgtcgcgtgcttagtcgttgattatctgtcttgtctttatggtcaccgggaacccaaggcatggatacggctgatgaatcagttagtcccttttgcagacgaagaagtccaggccagtgcacgaaaagacctcgatcagttaataagaaagcatcgtaaaaaagtctctgacgccaggaaaacggattctccattttccgggatgtggagttttgttggggctttcctgaagcacgttggcttgcaaacgcttgtagctttatcgcctgagtatgaatctcatgaacggctgaagcaggttgttcgggataccagggcgagaatcgagaacattatgggggccgattcagatttatcgggcgctttgaaacggtttgcgaatgatcagtctgttcgcattctgactatccataaaagtaaaggcctggagtttgattcggttgtaatgatggcaattgaaaatgagattttttttggtgatgaagctgagaaccgttgcgcatttttcgtcggtgtttcacgcgcaaagagacgtctggttttaactcatgccgataagcgagatcagccagctaacgccaagcgctggaagactatcagaacgcctcaatccgagtattttggctacgtggtcccatttgtccggtag

SEQ ID NO: 75204 - DNA, 1701 bp, Enterobacter cloacae
ttggaaatatcatatctgaaacttaaaggttttagaaattttaaagatgcacatatcaattttaattcgaacactctgattatcggagctaatgatgttggcaaaagtaatatgctgcattcgctaagaatgctattagataaaagtgtatcagattcaggaattgaaccaaatgagcttgatttccatttagaaaatggaaattcatgtgaagagtttgagattattcttcattttaaagatatcaatgaagatgcggtcctttcaattttgaaaggtaatgtcagtgactctggtgaatcttttatcaagtatgttgcacaaaaatctgatctcagctacaaactttttataggtgactctttagagtctttacaagaaattaactctcgttattatcttaagttcgttaatctaaaatacattcagtcacaacgagatttagaaagatttatccgcaaagaaaaaagacaactcttaaaaattgcccaacaatcattgaactctgatgaaagaaaagaagatgaagatttattaggagagataagtacagatttgcagttgatcaatgataagatatctcagcttgtatatgtagaaagagctacaaaagaaatcaacgatgagttgaaaaaacttgcacatcattattcagagtattctgtgcaactagatactggggcaattggaataaatgattttattgataatctacaacttggagctaatacaaatggttctaacgtaatgcttggaggagacggacggaacaatcaaatattattagcattatggaaagcgaaaagtattaaggaacatgatatcgataacgaagtcatcttctatgttatcgaagaacctgaagcacacctacaccctcaccaacaaagaaaattggctgattatttgatagctgaaatcccaggtcaaacgatcatttcatcacattctccccaaatagcggtaaactttgagccagactctataataagattgcttgaccgtgggggacacactgtagccgcaagtgaaggatgctcaaaaggtatttcagatggctgggaggatatgagctatcggatgagtatattaccagcagaatcatttttttcaaatggcgttttcttaatcgaagggccatccgaaattttgttttatcattccttagctaaaagtttgaatattgacctagattatttgaatatttcattgatttcagttgatggaatatcatttaaaatatacgcagcaattctagatgctttagaaattccatgggtaatgcgcactgataacgatgtatcaaagctaaaagataaagaaaagtggcactatgcaggtattaatcgatgtttagatatagctggtatagaaaagtttgagcatagcgacaaaaaaatatcttctcaagatactcttgctaacggtgattggcaaagagtttctgatgaagtgaatagatctggaatatatttatcaaaaattgatttggaaactgatcttgtagaagaattaggtgcttcaatattagatgcactagataaaaaaaataaccaaagcgcaatagaatatttacaaaagaaaaaagcaataagaatgcgcatacttcttaagaaaattaaaaatgaccttgataaacttagtatgggtgatttggttaaaccgttacaccatcttgtaaaaatagttaaaggtgaatga

SEQ ID NO: 75205 - DNA, 1626 bp, Enterobacter cloacae
atgagcgttttttcaccaaccactcagcaagcattagccattgattaccctaaaagtatggtaataacagcatgccctggtagcggtaaaactacagttataaaagagaaaattagaaatattactggttgtcttcctgagcataaaggagtcattgctattactttcacaaggaaagcaagtgcagaactggagcgtagatgtaaggccgatgggcacgatataaaacatagtttttttggtacgattgatagcttttgcttaaatgaaataatcattccgtttcttcccaaaatatggggtggcaaactaacagaatgtaaagtacttaagaaattagattctccatataaatattacttaaaggaggatttttttggaacaccatcaattgttaatgtcaatgaagacgctggctataagagactgtatgatgagggaatgctgtggatgagttcatttgctgccttatctttaaaaatacttaatgaatctcctgcagcacaacgatatataaaagcgagatatagccatatatttatagatgaatatcaagactcatccttatcacagcatcaattatttttaaaaataaatgagatcggtttatgttctattgctgttggtgatgtttggcaatcaatttatgagtttcgaggtggaaatgcagagttgttacttgacttggttagagataaaagtatttttgaacattttgagataaatttaaatcatagatgtcattcatcaataattaattatgcatctcgactactagattcaaatttcgtattattgccaagtgaaagtattaatgtttataggaagagattgcctggaaatcttaaagatgtttcgatgacattatcatcatggatttcaaaatggttaaatgtaggtcaatggggcgtggaccaagcaagccaaatagctatttttgcaagaaaagaacagtcattactattgctatgctcgggattgacatcaaattttagggtttatattgatacgccattagataaattgggcacagaatgttcagatttatataaagatcttctagcgtatagatacaaggcaataggtactgcgcaagaattaattaataaagtatttgatggcttaatcatgaatgacaaccatcagttttcattaaggaaaaaaattaaaattctcaggagtaatctaacagatgaggaactaattaattacttccatgaaatcgctggaatgctaaacattcagtttactgaatctaatgataatgcagttttggaaattatatcagatagtatgtacttaaagcagtttatgccattagataaaaatgaagttcaagtaatgacacttcacaagtctaaaggacttgaatttaaaatagtattacatttggatatggatgaatggtcttttccatatagattagtaaatgaggttgatagaaatatagcactttatcccagtcttccacaagaaataaaccttcattacgttggtattacaagagctgagaaatgctgcgtattaattaatgcagagttacgccaaaactcgactggtgcatttaagaagtctgaagcatcttacttttttaaattgccccaactagagggtctttatcgttag

SEQ ID NO: 75206 - DNA, 1701 bp, Enterobacter cloacae
ttggaaatatcatatctgaaacttaaaggttttagaaactttaaagatgcacatatcaattttaattcgaacactctgattatcggagctaatgatgttggcaaaagtaatatgctgcattcgctaagaatgctattagataaaagtgtatcagattcagaaattgaaccaaatgagcttgatttccatttagaaaatggaaattcatgtgaagagtttgagattattcttcattttaaagatatcaatgaagatgcggttctttcaattttgaaaggtaatgtcagtgactctggtgaatcttttattaagtatgttgcacaaaaatctgatctcagctacaaactttttataggtgactctttagagtctttacaagaaattaactctcgttattatcttaagttcgttaatctaaaatatattcagtcacaacgagatttagaaagatttatccgcaaagaaaaaagacaactcttaaaaattgcccaacaatcattgaactctgatgaaagaaaagaagatgaagatttattaggagagataagtacagatttgcagttgatcaatgataaaatatctcagcttgtatatgtagaaagagctacaaaagaagtcaacgatgagttgaaaaaacttgcacatcattattcagagtattctgtgcaactagatactggggcaattggaataaatgattttattgataatctacaacttggagctaatacaaatggttctaacgtaatgcttggaggagacggacggaacaatcaaatattattagcattatggaaagcgaaaagtattaaggaacatgatatcgataacgaagtcatcttctatgttatcgaagaacctgaagcacacctacaccctcaccaacaaagaaaattggctgattatttgatagctgaactcccaggtcaaacgatcatttcatcacattctccccaaatagcggtaaactttgagccagactctataataagattgcttgaccgtgggggacacactgtagccgcaagtgaaggatgctcaaaaggtatttcagatggctgggaggatatgagctatcggatgagtatattaccagcagaatcatttttttcaaatggcgttttcttaatcgaagggccatccgaaattttgttttatcattccttagctaaaagtttggaaattgacctagattatttaaatatttcattgatttcagttgatggaatatcatttaaaatatacgcagcaattctagatgctttagaaattccatgggtgatgcgcactgataacgatgtatcaaagctaaaagataaagaaaagtggcactatgcaggtattaatcgatgtttagatatagctggtatagaaaagtttgagcatagcgacaaaaaaatatcttctcaagatactcttgctaacggtgattggcaaagagtttctaatgaagtgaatagatctggaatatatttatcaaaaattgatttggaaactgatcttgtagaagaattaggtgcttcaatattagatgcactagataaaaaaaataaccaaagcgcaatagaatatttacaaaagaaaaaagcaataagaatgcgtatacttcttaagaaaattaaaaatgaccttgataaacttagtatgggtgatttggttaaaccgttacaccatcttgtaaaaatagttaaaggtgaatga

SEQ ID NO: 75207 - DNA, 1626 bp, Enterobacter cloacae
gtgagcgttttttcaccaaccactcagcaagcatcagccattgactaccctaaaagtatggtaataacagcatgccctggtagcggtaaaactacagttataaaagagaaaattagaaatattaccggttgtcttcctgagcataaaggagtcattgctattacttttaccaggaaagcaagtgcagaactagagcgtagatgtaaggccgatgggcacgatataaaacatagtttttttggtacgattgatagcttttgcttaaatgaaataatcattccgtttcttccaaaaatatggggtggcaaaccaacagaatgtaaagtacttaagaaattagattctccatataaatattacttaaaggatgatttttttggaacaccatcaattgttaatgtcaatgaagacgctggctataagagactgtatgatgagggaatgctgtggatgagttcatttgctgccttatctttaaaaatactcaatgaatctcctgcagcacaacgatatataaaagcgagatatagccatatatttatagatgaatatcaagactcatccttatcacagcatcaattatttttaaaaataaatgagatcggtttatgttctattgctgttggtgatgtttggcaatcaatttatgagtttcgaggtggaaatgcagagttgttacttgacttggttagagataaaagtatttttgaacattttgagataaatttaaatcatagatgtcattcatcaataattaattatgcatctcgactactagattcaaatttcgtattattgccaagtgaaagtattaatatttataggaagagattgcctggaaatcttaaagatgtttcgatgacattatcatcatggatttcaaaatggttaaatgtaggtcaatggggcgtggagcaagcaagccaaatagctatttttgcaagaaaagaacagtcattactattgctatgctcgggattgacatcaaatttcagggtttatattgatacgccattagataaattgggcacagaatgttcagatttatataaagatcttctagcgtatagatacaaggcaataggtactgcgcaagaattaattaataaagtatttgatggcttaatcatgaatgacaaccatcagtttttattaaggaagaaaattaaaattctcaggagtaatctaacagatgaggaactaattaattacttccatgaaatcgctggaatgctaaacattcagtttactgaatctaatgataatgcagttttggaaattatatcagatagtatgtacttaaagcagtttatgccattagataaaaatgaagttcaagtaatgacacttcacaagtctaaaggacttgaatttaaaatagtattacatttggatatggatgaatggtcttttccatatagattagtaaatgaggttgatagaaatatagcactttatcccagtcttccacaagaaacaaaccttcattacgttggtattacaagagctgagaaatgctgcgtattaattaatgcagagttacgccaaaactcgactggggcatttaagaagtctgaagcatcttacttttttaaattgccccaactagagggtctttatcgttag

SEQ ID NO: 75208 - DNA, 2139 bp, Enterobacter cloacae; identical to SEQ ID NO: 72908

SEQ ID NO: 75209 - DNA, 1800 bp, Enterobacter cloacae; identical to SEQ ID NO: 72909

SEQ ID NO: 75210 - DNA, 2001 bp, Pseudoalteromonas elyakovii
atgaaaataaaaagcgcccgtataaaaaactacagactgttaaaagatgtcagcttgactctagatgacagagcaacgcttattgttgggcgtaataatacgggtaaaacttctcttgctgaaatatttcgaagctttttaaatccggctggagttaaagtccgttatgaggattttaatcagtcctgcttagctggttttaatgaggctttaaatgcctataaagctaaccgagaagatgaagagattcgtcctctaataccaacgatagagttagaactgcgaatcgattacaaggatgacgagcacgactttggatctttaggtgatttcatagttgacctcgacgatacattattcgaaacctgtgtattggtttcctatcagttaaaaggtggaaaaattaaggaattttttcaggatttagatatcgctaatcgtaagaaatatttttctgaattaagaaaccttatcaatcaacatttcgaaaccgctatatatgccattgaacctactaattctggcaataaagtcaggctggagttttcagcatttaaccgattgatattgtcaggtttaataaacgctcaacgcggacttgatgatgaaactcatagtgagcgagatgttcttggtaaatcattaggaaatatttttaaaagtgctaacagtactggagcgcctgaggcatttaaagctaagtctgaagagatcaataaagttgtagaagaactgcaagaaaaagtcgatactgattttcaagggaaagttaaatcgcttttaccaacactgaatatatttggatatcctggcttgaaagatccaaacttaagtgcagctacggagttgaatgtaaagtcacttctggagagcaataccaaagtgttttacgaaggcgatgaccactttactctgcctgaaacctacaatggtttaggaatccgaaatttgatttttattctctttcgcatctatgagtactttagagagtttcagtcccagcccactcctccgaaagggcatttaatcttcattgaagagccggaagcgcaccttcacccacaaatgcaggaagtattcattcggcagcttgaggaaatagtcggagagtttcaaaaacaacttaacggcggaaagttgtggccagttcagtttgtggtcagcacgcactcttcccatattgccaatgaagtagattttagcaaagtgcgttactttttatctaagagtggaaaagaaactaaggtaaaagacttgggagaagcgtttggcagcgaagacgtcaaggaagacaaggaatttttgcacaagtacttaacactgacaaaatgtgatctttatttcgcggatagggcgattcttattgaaggcgctactgaaagaattcttctgcccgagatgatcaaaaaagtggatgatttgaaacagtgcggtttgcgcagaaagtatatgtctgtagtcgaggtgggtggcgcatatgctcatcatttttataaattcattgactttcttgaacttaagacattgttcattactgatttagattcagtaaagaagaccgagggtgagaagagagcaacatatccggcttcctgtgtgagtgaaggtacacattcaagtaatgcaggcctgtcaaattggtttggtatgaaagggtatgcaagtttagatgatattagtgccaaagaagagaactccaaagtttcaggatgtcggagattagcatttcagatcgacgaagatgaaaaagctctatgcggacgtagctttgaagatgcttttattttggccaatgtaaatctattcggtttacatgatttagaaggggtagagttggagcgtcgcgtttttgaaagggctaaggatataggaaaagatagcaaggccaattttgccattgagtattctattaaaacaacagattgggtcgtgcctaaatatatttgtgaagggttagagtggctagatagcgatgatgcagttaaagcggaggaggcgtag

SEQ ID NO: 75211 - DNA, 1767 bp, Pseudoalteromonas elyakovii
atgacaaagataagtccagccgagcaggcttctatcgaggcgttagagaagctcagaaattgtatcaacaaacaccagagtttccgtttggaagcaggtgcgggtgcgggaaaaacctattctttgattgagtcgattaagtatctgatatccaatcgtgcagatgaatttttaggtaatcggcagcagattgcttgtattacatacacaaacgtcgcaaaagatgaaataaaggatagaacggaccatcatcctgttatttttgcagatacaattcacgcgttctgctggaatatacttcaacactatcaggtaaagctccgagagtacctcccgaagctaggtgaaaaatggctacagcgaatagatgaggcagggggcgttaccgatcaagtggttaagtatgatcttggatttcctgcgattaatgaatatgagataaatttgcaccatgatgatgtaatcacgttgatggctcatatacttgcttatccaaaattccagaagctattaaaaagcaaattcccgatagtattcattgatgaatatcaggataccgatatcaagctagctgaaagtattgtctccaacctaattaacaatgactctggtgtagttatcggtttattcggcgatcactggcaaaaaatctatggctcttcggcttgtggtttgatatctagtgacaaaggaaaaatagtagaaatcggaaagaaagcaaacttccgatcagacaaaaatatagttagttgtttaaacagaatgagacctgacctcccccaagctgaatcagaaccagactcagaaggagtgataaaagttttccattccaatgattgggtaggtgtacggagagatggttcaggtggtgggcattggaagggggatcttccagaagatagtgtaagagaacatgtagagaaaacgaaaaagttaatgcgtagagacggatgggatttatctcctgacaagacgaaaatccttttcttaacaaacaatctcatcgccagtgaacagaactttaagaatctatcggactgttttcgttacacagatgattatctcaaaaaaaatgacaaatatatccagttttttcttgatgtgatagaacctacagcacttgcatatgagcaaaagctgtatggtgaactattgcaaatcaaaaagaaaaaccatccacagttgaaatgccaagctgataaaactgagttgattaacaatctagggaaagtaatgcatgcaagagccaattctactattggcgacttgctggatcttttggtgagaactaagatgccaaggctttcgtcaaaagtagaagaggctgaaacacgatataaggagcttacatcaaagtctaatgatgaactggaagagagagaattgagatttgttgacaagctcagtaagttgcgcgctgtaaagtatttagaggttgtaaacctgagtgaatacatcgattcaaagacgcccttctctacgaaacacggtgtgaaaggcgcagagtttgacaatgtacttgtcgtttgtggccgcggctggaatcaatatgactggaaccagatgttagagtggatggatgggaactaccctaaagataggcaaggtacatttgaacggaatcgcaacttgttttatgtcagctgttcgcgaagcaagcacaatctatctctgctgtttacacaggagttatctgcaaaatcaattgaggtgcttgagcggatatttggtaaaaacaacgtgctaggtgatccgattggagcttag

SEQ ID NO: 75212 - DNA, 2055 bp, Lactobacillus brevis
ttgttcatatcaagtgttgaaataacaaacttcagaacttttaaggaaaaacaaataattcgttttacagagggaattaacattttagtcgggcccaacaatattgggaaaaccacgataatatcagcgataagattaatcttcgacaaaaataaatttggattagatataaatgattttagtaagattgaaacaaaagaagaattgaaaaactgctctcctaaaatcactgtgtcagttaacttgcaaaaatcaaacaaagaaggtagtgatagcgacgatcttctagcaatacgcaattggctgactgatatagataatccatataaggcaaagattactatgcagtttcaacttccaactaaatatgaaaaagcatatctggacgccgtaaaagacttagacgatataggcagtgtctggttagagttggaagatgagtttcttccaaaataccaaagaaaatattttgtaggagagtccgcacaaccattaatggataattcgttaagtcgttttaattgccaatatttgccagctattcgagatgctgaaaaaagaatgaattcgggaaacaaatatctactcaataaacttttaaattttttcattgattacgatttaaaaagcaatgaagagttgaaaaaatctgacatcgaaaagaagatgcaaaagcgacataaagattttcatgatctggctgtgaatctattgaataatcttagccctagatttaaagagggtaaaaaggaaatgctgaagtattcaagccgaaccggggctacttttgatggtgaagaaccagaattcaatagtacgttaaatgatcacgatatcctaaaagaatttagtttagttgttaaaaatggtgaatcaaatgtgccaataaatttaaatgggctaggatataacaatttaatttatatttctttagtattagctgaacttcagcaaagtcgttccaattcttattttggtgataattcaagtgtttttccatttctattaatagaagaacctgaggcacatcttcatcctgatatgcaatatgattttttgaaatttttacaaaataatatcaaggatggtacaactagtgaaacagcaaagcaggtgattataaccacgcattctcctaatattacagctgctgctagtttagatgatcttattgttctcagtaaatataaaagtggtgttaaaattggatatcctggggaaacgtttatcgataatccaaaagacaagaaatttgtagaacgatttttagatgtcacacgatccaatttgttttttactaatcaacttattcttattgaggggttagcggaacaaatgctaataccgcaatttatgaaagccgatacatctaacatacaaaacagacatatttctattattaatttgtctgggcgctatttcattccctttttaagaatgtttgatacaaataagaatcctaataccgcaatatataagcagattgcctgtctaacggacttagatcctgttcaaggaaagcaaaacaaatcctgtccgccaatatttcaagcggaacctgacagcaaaaatccgaatatagaaagtatcaaggctttgaaatcggctaatattaaagtgttctcacaagatgaagattctggctataagtctaatgaaggttggacgtttgaatatcagctgtatatggataatcctgctctaatgccattgatctttcacgattctatgagatattgtgatgcatgggaaaatttgaaaaaaatgagcattgaaaatctgagtattgaaaaaatatcgaatactttccagaacgaaagatctaaacaaatggacggaatactcaaggaaaatcacaatactaatgatttatcagaaattactgatcccaagttaattaagctatatctaggaacaatgtttctatattcaattaaagataagggcctttatgcgcaagaactttccgaagaaataagtagtggtaaatctattacagtgccaaaatacatcaaagaatgtttcaaatggatggcagataaaaatggattataa

SEQ ID NO: 75213 - DNA, 1269 bp, Lactobacillus brevis
atggattataaaagagtatcatctcatgagaacataaatattaatcaaaatttcttggtatcagctggccccggctcagggaaaacggaattcttagtaaaccatattcatcacataattaaagagtctggaaaaataaacacattaagaaaggtattggcgattacttatacgaatgttgcagccgataatctttcaaggcgtattggatatacatctggtcttacgcaagtttcaacaatacacagctttctatcagaatttatacttttaccatactcatggttattagaaggcaaatattctttaccaaagaagctcacaattacccctcatcaattagcgagtttttctgattttaaagagctttgccaaaaatataaatgccagtatatgacatattatgacaatattcgggatcgtatttcttcaagtatatattttaagaagctgaatgatcattacagtcttactattgatcagaaagatacacgagttccaaataaaagatatcctattaaaaatgatcctaaattttttatggaatataaacaatcatgttggaaaaacggcatcatcaattacgatgatgttttgttgttatcattaatcattttagaaaacaatccatttgttgctaaactgatttctaatagtttcccatttatctttattgacgaatttcaagacacttcaataatccaagctgaaatcattagtattttagctgataatggaagcaaagtaggagttattggcgatgagaatcaatcaatttatggatttgcgcattcaagtcaggaaacctttagaaaattcagtctaccgaaactaaacaaatattgcattaatataaatcaccggagcagcgacccgataattaaacttttaaatggaattacagaaaattctgggaaggatcctcaaattttacagaacataccaggtcctaagccaactatagtggttggagaacctagattagttgttaattggtttttaaaaaatcacccccaaaactcagcatgttccaagatgatcattagttacagtaacgactatattgaacaaataaacccgaattacagtgccccttctaaaaaaattaaggataatatcaataagatgcgcactgatgatagaggaagattcatctatagtattataaaatcacttaagttagcttctgagggtcaaataaacgccagtatttcatctttcttccgttcttacgaaaaaacggtagcgtcaagaatcttgtgtaaatga

SEQ ID NO: 75214 - DNA, 1998 bp, Rhizobium etli bv. phaseoli str. IE4803
atgcgccttgagaacgtaagtattcgaaacttcagattgctgcggcgaatatcgatcgaccttgccaaaaacaagacaacgaccattttcgtcggacccaacaacagcggtaagacctctgtcatggaagcgcttcgactctttattgggcctggaggtgagacgcctaaaatttcttttcacgatctttcacagcttcgccaccgtgaccttaagcgcattgaggttctgcttgcgggcgaaggtaatccggaaaaaaggattgcactcttaaagcggttcgccccgcgtatgcggcttgacctgactttcgcatatggcgaagaccaggctgaccttgtggcagcgacacagcttttgatggacttgacgcccggcacaaacaaggtgcggatgaggatcgactacgcgctggagaacgcaaagaagcttctcgatgatttcgaggcacggccgcgcaaagatcaatcgctttgcgactacctaaaagagacgttccgcgatcactttaagcgcgtgttcttcaaggtctcccccgacggcaaggaggtcgaaaagcttgaagacggcggcctcctgaaatccctgctgcgcgtcgatcttgtgccggcccagagacacgtcgacgacgatgaagggagccggtcggcaaagctctcaaagctgctccacgatcactacgagcgcttttatcaagtagatgacgctgctggctatcaggcagtcgaggatgctctcacgcaaagtgccggtgatctcaccggcaagtacggcaaggccttcggtcgcctcacgaagcgccttcagaattttggctatccgcctggccagaaagcgccggacctgagagtgcgggccgaattaagcgctgagacaatttaccgagacaatgctcggatctattatgccagtgaacacgccgggaaagggggcgtgatggaagagttcgagcttcccgaaaaatacaacgggttgggttacaaaaatctgatttacatcgttctccaattggaatctttccgggcggcaatcgatgcgtccaagggcgacaagccacgtgtccacgtcatcggtattgaagagcccgaagctcatctgcatccccagatgcagacagtttttatcagtgaaatctccaaagccttggaaacagatgggggcactacggcgcaggtcgttctatccactcattcatcgcacatgattgcccattcggagtttgaaccagtgcggtatttccggcgagccggccgtcaggtcgtcatgcaggatttgtcgaagctgccgttgcccgacgatgatccccatcttctcgatttcctacgccgctacatcaggctaacgcactgcgatctgttttttgccgataaagccatcttcgttgaagggcaggtggagcgattgctgcttcccatgatgatagaagaacaggctaaggtggcggggtgtgagacgctcggcagccagtatatcagtatctccgaggtcggcggtgcctatgcgcacaagtttaagccaatcattgaattcctcggcattccgagtttgatcattactgacctggattcggtggatgataacaatgaaaagtgcccggtcgcggagggcaaaggcacaagcaacgtttgccttaggacgtggcttccggcgaaaataaaattcgacgagttgatggcctgctacgacgtagacaagacgcaaggctgcatccgtgtggcctaccaagttagccaaaacgggcattgcggtaggtcattcgaagaggcgtttgtttatgccaatattccttggttgacggcaaaccacgccaaactcacgtcaactaaagctgcgatcaagaaggcggtggacgccgggctcgcggctcaggcgtggacgctgagtaccaagctggcgaaagtcgatttcgcacttgatcttatcgatgcgccgggatggggcattcctctctatattcagcaaggccttaaatggctagcagaacatccggcaaaatga

SEQ ID NO: 75215 - DNA, 1671 bp, Rhizobium etli bv. phaseoli str. IE4803
atggatgcggacgagaaaatcctggaatgcctcaaggcgcggaagagctttctgatcgacgcaggagcggggtcaggtaagacatcctcgctcattcgtgcactcgactttattcgggggcccgaccgactgagtgtgatggggtcgggtcagcgcgttgcctgcatcacctttacaaacgtggccaagaacgagattatcgagcgcacagagcacgacccattgtttgcggtttcgacgatccacgatttcctctgggcctcgatcaagtcgttccagaaggagctgaaaccagccctgctggctttcaatgagggcctgccggcaaacagtcgcaggaagcagaaccagaacgagcttgaggccgcattgaaaacagtgccggcggtcatttactcagatcggggcgcaaattttctagaaggacgtatcttccatgatgatcttctgggtgtggcgtacatcatgttccgcgatcatcctctgttgtctaaggtcgttgccgcgcgctttccgttcattttcgtggacgaatatcaggacaccgacccagtcgtcgtaaaaacgcttctggaacaattgctaaaaacaaaacaaccaccgctgatcgggttcttcggtgacaagatgcagagcatatacccaggtggcgtcggcgaactttcagccgagcaacaagcgcttctcatccaaatcaaaaaagaagagaactatcgctgctcaaaagcggtgatcaaactgctcaacaaaatcaggacggatattcagcaacagcccgcaggcgctaatctgccgggcgccgccgggtatgttagtttggtcggcgtcgatcccgatgcagatttgtcagctttggccgtgcaaaaggcccgcgatgcttttggctggaacattgagggcgagttgaaggtgctattccttacccatcgtcttattgcccgcaaagccggttacgctggcctatgggcggcctataacagccgaggcggcttcattcaggatagattccagagcggcgaagacccgatcgcctcgttcttcgtcaacaaagttgaacccttcattttggcttggcgaaaaggaaaggttgggcgcgctatcagttttctaaaagaacgaccgagcccgattgccggggcggccgagaaagctagagttaaggcaaatcttgatgagttgctttccctcatcgacaccggcggcaccattgaagcagtgttgaagcatctgcacaaagcccaattggtcaccctcttggatgacctcgaagatgctattaggggatctgtggcgccagctgatccggactctcatgaagccgcacatcaagcctttatggcgctgttgctggctgtgccctatattgaggtcagtcgataccgagcggttctggaaaatagcatgccgttctctaccaagcacggagtgaagggcgatgagtttcagaacgtaattgtggtacttgatgacgcgggcgcgaattggaaccaatactccttcggcaagatgctagcgggaaccgataccagccaaggtcgggagaagcgtacgcgtaacctattttatgtgtgctgctccagagccaaagacaagctgattgtcgccaacattggcgccggtgcccaagcgaaaatagaggagttgtttggtgccggcgctgtcgcaatgtga

SEQ ID NO: 75216 - DNA, 1563 bp, Xanthomonas citri subsp. citri A306
atgagtgccctgaagcctgccaaagacgggcagatggaggcgcatatcaccatcagcttctccgaggcagacaagacagggcgactcagagcgaagcgctggtgtggagaccatgacgatgtcggcttgacagcggacatgatggagaatcttcgaggggtctatcttcaacccctacgcgacgcatctcaagcccttaggcccggccgcatgagccagctgtcgcgactgtttcagcttctcgttgatgacaatggcaagatcgagatcaatggggcactaaagctcctggatgatgagctcaaaaagaaggcgccaattgtgagcacccacaaggcgataaccacccggcactcggagatgctgggtccgcagctttctcagctgcttgagctcggggttagcgtcagtgattttcaacgcctggcttcgcgcctctctcttaccgttgatctgttcgagcttgagcagaacgggctcggattcaacaatctaatcttcatggcggtcgtgctcagcgagctgaccaagaacccacaagccagctatcgaggcctgatcattgaggagcccgaggcacatctacatccccaattgcaggctgtgctcttgggctactttgagaccatcaaggcagtggacaaggagaagcctgtccaactgttcgttaccagccactcacccaactttgccagcatcgccaatctcgacagtttgacttgcctagtcgacaccggcatcaaggtggagacgttctttccgcgagacatcaagtttgctgtcggaaagcgcgaaaagcttgagcgctatttggacgtaactcgggctgagctcttttttgcacgccgcgccatcctggttgaaggcgctgcggagttggttcttgtcagcgtgctcgcagagaagtgcggccacgatctacgcaagcatggtgtcagcctcatcagcgttgaaggcctcaacttcgactcgttcattccactgttcggagagaatgctctgaagattccggtctccgtgcttaccgatgcggacccaacgggtccgagcgaagaggatgaagaggcggggagtgacggtagcgtagtagcggacgaccttgcgtcgacagatgacgcctctggtggaaagaagaaggcggctcctgtctacccttcgattggtgacaaggtgcagctgtctgcaaacaccctgagtatgatcaagttcgaagattcatatctcaaggtcttccatgggctgaagacgcttgagtatgacttggccttatacgcctgcaaccgcaagatgatgcttgcggcgcttagcgagcttcacccgaagatatctgcaagcctggcgaagaaggtcgacgccgctacgggagagacagagaaggctcgcgtactattcagcggaatgttcgagaggaagaacggaaacgtccagaaggggcgctttgcacaagctttggcgcaccttatcgctaaagcgaaagccgaagatttcattgtccccgggtacatcaagtctgcagttgaacacgcttgccagcctggcccgaagaagggcgaggacgaatga

SEQ ID NO: 75217 - DNA, 1797 bp, Xanthomonas citri subsp. citri A306
atgagcacggatactccttcattagaacagggtgcgatcatcacggcaccattgcagccgatgtcggtcatcgcttgtgcgggaagtggtaagacattcacggctgtacgaagactcgctcacatacgtcgatgcctcggtgatcaccggggccgggttgcgctcctgtccttctcgaacatcgcagtcgagaccttcaggcgcgagtaccaagcacttgccgtgggatcgctcaagatcccgtcccaccagcgcgttgagatcgacacactggacgggttcattacgacaaacattctgcgacctcacgcccatcggacaatgggatgtaccacgaccccgttcttgctatcaggaagcgagtcgttcctgctaggaaaggactatcgcttttgggtggaatcgccgagaaccggtaactacccggtgccccaagcgcatatccatcgcgttgttataggcccttcaggggctggaacggacttcttctaccagaactccggcatgctgacgagaatcaacaatggccccaaggctgccgcagccttgggaaaactgggggcttacacccacgagctggcgcgctactgggccgacctcaccctccgcgaacaacccgagatcctgcgcgtactcgcgcgtcgctatccccacatcctcattgatgaagcgcaggatatcgggatcctgcaccagttgatcattgaaaggctcagccaagcaggctctcaaatctccctcattggcgatcccaatcagggcatctacgagttcatgggtgccaccggctcgttcctgtccagctaccacagcaaacccggtgttgctccggcagccctgacacgcaactatcggtccgtaccggccgtactcgatctagccaatgcaatctcagcgcgtacggacgaaccggataggcacgcgccacttacgctccacggagcctacttcgttccgtacacgactaccagtacgcagaatgtcctggcggccttccaggcgacactgatgtctgctggcttggaccctggacgttccgccgtactctgccgtgcacgaaagtgggccaacgagctggccgggagtgagggtgcccctggtgttggaacgacgaagatgcttgcccaagcggcgatggtgcgcgatatccactctgactactcaacagcattcagactcgtggcaactgccatcataggtttgaccgacaacgcacccaagggcatcgttgctcgcctaactcagccagccaggtacccagaagaacgagcgcttcgtcgcgctgtttgggctttcaccagagattcggtagcaggtctgcctagtgcgtcgctacccgccgtaagcgattggcagccgacattgttgcaacgtgtcagggtcctgatgacgaatctgagcacggctcatggacttaatcacacctcgtccaagctcggcagtcggctctcaaagaagagtttatccagttcgccgctaatgagcccgccggacctaggtgcagatcaacccctgcggatcagaattagcaccgtgcaccaagtcaaaggcgaaagcctggatgccgtcctctacatggcaacgaaggcgcatgtatctgcactcttagacgggggttccactgaggatgggcgaattggatacgtggctgtgacccgagcaagggatctgctgtggctgggtgttccggcgacagctttgaagatccttcgtgccgatcttgaagcgaaaggcttcaaggacgcaaccgctaagattgcggcccctcctgccgggcatggcataggtaccccctga

SEQ ID NO: 75218 - DNA, 1461 bp, Komagataeibacter intermedius AF2
atgcatgctctccgtgagaatgccgatggcaaaatcgaggcgatcataggagtaacctatggtgatgccgataaatcggggcgtttgaaacctcgccgctggtgcggagattttgacgaaacatcgatgacatcgtcaatgcttgaaaatttgcggagtgtctatcttcagccattacgtgacgctgaacagggtcttcgaccgagccgtaatagccaactttctcgtcttctccatctactctcagacgaacctgggcgaaccgaaattgcaactgccctaaaaacacttgacgacacgctcaagacgcagaagccaatccaagatacttatgacgcgatttccggtcggcatctgactatgttaggtaaggtgttggcgcagaaaattgacgtggggcttacgggtactgatttcggtaaattggccgcccgcctatcgctcgtcgttaacaatttcgacctcgaacgaaacggcctcggctataataatcttatctttatggctgtagtattgagcgaactagcaaaaaatccggatgcagcatttcgcagcttaattattgaagagcctgaagcacatttacatccgcagcttcaggcagttttactgagatatttatcaagcttggataaggacgatgcaggcgagaatctagttcaagtattcgtcacgagccattctccaaatttcgctagtattgccgatattgagtccgttgtctgcttggtcgatgcaggtaccaattgtgctgcagtattccatccgcgtttggtaaattttgaaaagggcaaacgtgataagcttgcgcgttatctggatgttacacgggcggaactgttctttgccagacgtgcgttatttgtcgaaggcgcagccgaattgttactggtcaacgtccttgctcaatgccacaaacatgacttgagaaatcatggagtcagtctgattagcgttgaaggattgaacttcgactgctttatgccgctgttcggtgaaaacgcaataccgatcagagtagcggtaatcacagatgcagatccgagcactacagtcgacgagaagacagtggcgctctatccggcggcatttgatactgtcgacccttcggacacgactaaatgcatgctcaaactacaagatgatctcgtgcgtgtattccatgggcaaaaaacatttgaatatgatcttgccctgatcccaaaaaaccggccgatcatgttgaaagcacttacagatattcatccacagatcggaaaaacccttaaagaaaaagtcgacgcctcagtaggggaccaagcaaaagctgaggcgctatttcgcgggatgttcgaacgtgagagtacgaatgtgtccaaaggaaaattcgctcaagcgttagctgcccagattcaggaaaatcgcctagagtttgaggcacctagttatatcctccaggcaatcgagcacgtctgcagatga

SEQ ID NO: 75219 - DNA, 1746 bp, Komagataeibacter intermedius AF2
atgacggatgcgctttcatctgagcagcgcaagattgttaatcttccgctcattccgatcacggttacggcctgtgccggcagtggtaaaacaaaaacagctgtccatcgcctcgcagcgatgcgacagatgtatgacggttctggtttggtcgcacttctatcgttttcgaatgtagcagttgacacgttcagaaaggaatattcggcgttatcacggcggttgcctaccatcggccgatcttcatctgtcgagattgatacaatagacggcttcataacgagcaatgttttgcgaccacatggtcacagagtgatgaaatgtgatcgaataccataccttgtcgaaggtcacgagggattcctagccagatttaaagtctatgatggcaaaatctcgcgatcaacagcaagcattgacatcaccagtgatggtaaaggattccgttatacaattgggcgaggcgctaaagtaatcccagaaaatcgggcggaagccgctctaaccaaattggctgcggttggtgcctatacccactcatcaggtcgttactgggtgttacgcaccttacgcgaaaaatcatttgttctaagagctttagcccggcgttaccctcacatactcatcgacgaagctcaggatatcggcccagaacatcaagcgtttcttcagcttttgattgatgccggatcgcagatatctctaattggtgatcccaaccaagctatctacgagtttgctcatgctaatggcacctttttgcgagactatggcactcgaccgggcgtgagcgcttataatctgacggtaaattaccgatcgctgcctgccattgtagatgtcgccaatcatttaactcagcgcaatgacacagcagcccgtaaagcagctaaagatcaagcagctacctactatatgccgttcaaggaaacggagcgagatcatgctctaacatcgtttcgaagtcttatggagactgctaccattaggccagcacagggtgttgtcttatgccgatcaaaatccctagctgacaaatgggccggcgaactcgacggccaaggtattggggtcgtaagatggtttgctgatgcggcaatcagtcgtgacttgaaaaaaaattattatcaatcctttgttcaggtatgccaaggtatagttggacttctttcagataagcatggttctatagttacgtatattgttcgtccgactgataatcatatgcgtagcgtaagaaaaattatctggttatttatgcgtgacgcggcgactggacttccaccggcgacgcttgtcgctaataacgaatggcatcacttacttagcacccgagttcaggcactcattgcaatcctcgttacgaattttggatttgaagcagcacaaaatcttggccgcaggctcgccaagacgaagcttgaggctcgtcccttgattgcgatgcctagccttacagccgctatcgatatgatttttcgtacctcgaccgtacataaggttaagggcgaaagtttagaggctgttctctatgtggcgcaaaaggggcacgttcgggcattgttagacggcaccagcactgaagaaggccggatcggctatgttgccctaacacgagcaagaaatctcttcgttcttggcgtacccgacagctgtgtcgcggaattcgaggctgaacttcacgcggcaggcctgcagagggtcggattcagagaacagcccatcgaaccgcttagcgaaagttaa

SEQ ID NO: 75220 - DNA, 1989 bp, Komagataeibacter intermedius AF2
atgaaaatcgaaactatatcaatacgaaattttcgatgctttggtcccgaatggacggaagtgagtctacaagagcaggtgactgctttcgttgggggaaacggtgcaggcaagacaacgctttttcaagcgctttcccgtctatttggtgtaatgaggacggataggactgttacaaaaaaagacttccatatcgctcagaacgaggaggaactgcctgacggacggtgtcttgaaatcgagtgcatgctcggtttccctgagttggatgatgaagaggacgaagacgccagctctgttcccgattttttcaaccaaatggctgcatcggagcctgatggaccgctaaaggtgcgtatccggcttgtcgccagatggatggaagacggtacgttggacggcacggtagaagaagatatcagatggatcacgacactcgacgacgaatttgactgggacgcttgtccaaaggtctccgccgttgatcgcgcgagtatccaggtcatctacgttcctgccctgcgcaacgccaccgaccgtgtaaccgagcttctaaaaggtcgcctctggagagcggcgctctggtctactgaccttggcgctcgcgcgacggaaggcgccgagcttatccaaaaacagtttgagcaagaggcgccagcagacttcatcattaagcgcctgacgcacaggtggcagcaggtttacgagggcgacacggatacgacccctaatcttcggctgatcgaaagcagaatcgaagaactggtgcggcgcgcggaatttgttttccatcctgacgaagctggtcgaaatcgggtccttgccgatctcagtgacggtcagcgttcgcttttccacattgctctgacggctgcgacgctagaaactgaacaggcagcgcttacactcgctgcaacggaaagcccgtttgatcgggaaaagctccgccgcacccacctgactctccttgcgattgaggagcctgaaaacagtctttccccgttttttctgtctcggatcatgacgcaggcacgggaaatcggagaaatggacacggctcaggcgctcatctcaagccatagtgcgagtatcctctcacgtattgaggcggacgaggtccgctattttcggcttgaccgacagacgcggtgcgcctccgtgaagcagctaactctgcctgaaggcgatacggaagcaagcacctatgtgcgcctcgcagttcgctcttaccctgaactctactttgcacggttcgtgattctggctgaaggggattcggagcagattgttctccctaggcttgctgaagtcagaggcgtgcagcttgacccttcttttgtgccgatcgtccccttaggcggccgctatgtctcacacttctggagactgttcaccgatcttggcattccctacgcaacattgttggattttgaccttggtcgagcccatggcggcgccaacatgatccgaagcgccttcgctgctctcaaacagataggccgcgatttcaccgcaaatcccctcatcgttgatggcacgatcgatctcgatgatctcgacgatctggttgatgaagatgttctggacgtctgggaagataataactggcttcaagccctcaggcatgaagccgttttcttttccgatcccatcgacctagattttgcaatgctggaggcgtttccggctgcttaccaacatcccaatccgggcggccgaggtcccaggacaacggaggaggcgattgccgagaaaaagacggtcgtcctcaaaaccaacgggaagccgggtatctacaaaggcgaccagtgggacgatagtttcgcttggtatccgtatcttttccttagtcgaagtaagccggaaacgcaccttgccgcgttgagcaggatcacacgtcaagacctcgcccgcggcgcaccaccggaattgcgcgcccttatcgatcatgtacgagacgttttgtttcccaagccggatgaagtgtga

SEQ ID NO: 75221 - DNA, 1578 bp, Komagataeibacter intermedius AF2
atgactttcgatgcattcacgaagcatatgctggatcatttccgtcttgcgatccccaacgcttatcgtccgccaatcgactacagcattgcctttcccacacgacgagacttcgacttattcctaaaaaggcacggtcgtccggatgtcagttctgatcggtttgaacaagcgatcgcccgcaccccactgccgtttgaaaaaactgttgaaaagctgtgcacaagagagttgcttcgagcttactgggatgaccagtacgccatgccggacggagcactggtttctttcgcaatgatcaaccgcctcgttgattacatgctgcgttcgaactcaaggatcaagcgcgctctgcgcctgacctatccctttgtttttctggatgaattccaggacacgacctatgcccagtatagtctcgtaaatactgcattcagaggaagccgttctatcttcactgctgtcggagacgataagcagagaattatgggttgggcgggagctatgaataatgcgttcgatgagtttgttgacggctttaatgctgttcgccatgcccttctcaggaactggagatcacacgaggcgcttgtcggcattcaacaggtcatcgcacgacagattgatcccgacgttgaagaggtcgaggcccgaggacagttggaggtcgacggcgcaacggcagcgatttggcgttttgacaaccgtgagcaggaaacgcagatgatagcgcgatggatcagaagagaagtcgacgaaggccgcgttgcaccgcacaatgttgccatccttgtgcgtatgcgcgctaatagtgttgaggacgagcttgcacccgttctgcgtgatcacggcctgacattacggaatcttgccaggaacgtcggtgaaattgccatccaggatttgttagtcgagcctcttacggaagtaattcttccacttctaaggcttggggcaagtgcccgtgcaccagaagcctggagcgcggcgcaagatcgcctgcaagcattggcaaacgttagctcggacgacgaaaccgtgcaggagcgattacagcgcgagattggagagttctctaggaaccttcgacagataatgcgtgacgagccgcttgatacggcagtggctaaccggctgttcgcgcagaccttggacttcgtcggggtggagcgtctgcggcaagcttatcccgaatatcggcgcgatgctgattttcagcgcgtgcacaacggctttcggatccttttgcgagactgcgtcgagaacgctgtgaattggaatgatgttcttgatcgcttcgaaggtaaaaatcagatcccgctcatgacaattcacaagagtaaaggtcttgaattccacactgtgatctttttcgggcttgatgcccaaacatggtggagcctttcaccggagcgtaatgaggaactcaattcatttttcgtcgcttttacccgcgccatgcaacgagcgttttttgcgtgctgctccgagcgagggaagccgattggctggttagaaaagcttcttttaccagctggtgtaaagcaggtcgatggagttgatatcatcactccgtaa

SEQ ID NO: 75222 - DNA, 1485 bp, Vibrio owensii CAIM 1854 = LMG 25443
ttgtcgaatgggcgtcactccagactatccaaacttcttaaagccctaaatcgtaaacagctaaaacagtgtaaaaaagacaatgaactacaccctcttgaatccaagctgaaagaattcaacgaatccttggctggtaacgaaaaattaggtatcaaggatgccaataaactcattacagaaaacctgactaatgcaatcggacactacttcgggcaaaacaccagcatccaatttgcagaaagtgattttactaaaatcactgaaagcctgaccttgcttttctttcctgacttatctgtagaagatcaggaactattccgtgagctgagccaaaatagcttgggctataacaatctactttatattgcttcaattttggcggaactcacactagatgatgaagatgaagagcaaccccttttcaaattgctgcttatagaagaaccagaagctcatttgcatccacaattgcaaattagactgctaaatcatctcaaatccgtagctaatgaaaacaaaagtgttcaggtcattgtgacaacacactcgacggttttagcctcttcagttgaacttgagtcaatcattcatttatcgaagtcaccagagccaatagcgacacctctacgcacctgcgggttgcctacagctagcagccaattcatcaatcgatggctagatgtaacaaagtcaaacctattatttgcaagcggtgtaatccttgttgaagggattgcagaacaaatgataattccgactttggcaagaatagctctaaaagggcaaaaggaagggcgaaaaagccttgaagatcttgggatctcgacaattaacttaaacgggatctactttaagcatttcatgcaattgtattgcaacattgacaatgtagatgatgctaaaggaggactcgcaagtaatagcattccaataaggtgtgcggggctcaccgacttagacccaccaaaagtaacaaaaaaacacgttccagaccctgaaaataagggggaaactaaagaaatagaagaaaacttcatcccatatgaaggcaatatgaaagctgggactaaccatgctatcaaactggttgattccatcaataagtcaactaatgcacggctatatgtgagcaagtacaagacattagagtatgacttagccatggagggaaacaatgcagcattaatgtccaaaataattgcatctctgtggcctaagcccaaaaaaggagaaagctctataatcaaagattttacagcaatgtccaaagtagattggactaaaaaaacaccacaggaaattgccgaggcagcccatgaaattcttaaaagaattgatgatgacaatattggaaaagggatgtttgctcaagttttaaccgatgaaatccaatgtgatggttctaattttactgttcctgaatatatcaaaaatgcaattttctgggcttcatcgatagatgttgcaaaggaagagttatga

SEQ ID NO: 75223 - DNA, 1758 bp, Vibrio owensii CAIM 1854 = LMG 25443
atgaaagttgagttcacccatgaacaacttgagtatgtgaactccagcattgaagagcacactttcttggaagcctgccccggaagtggcaaaaccgaggtcgttgcagcgaaagtagctaaggaaatcgattcttggaagataaaaaccggaggactggccgtgctctcttttgccaacagtgcaactgatgagttaacaatcagggtatcaaagtaccttcctcatggtcagggtatgtacccccatttcttaggtacttttgatagttttatctacaagaatattgtatctcctctagccacagagcttactggatatttaggggaaggtggtgacgcgtcaatacgcatcattgaacctagcgcaaatttaggctttagaacaaaatatggtattgcaagccgagggaagataaatgctcatcattattctttcgatctaatcaatgaaactgtagcttttgaaacaggaaagcctgaactagataaagtacttaattctgtgactctaaaagattgggaatttaagcaccttttggagaccaaaaaaaggatgctaaaaggtggttttgccacttaccgagatattgaatgcttggctatagatgccctttttgacgataagtatcagcactttgttgagttatttgtaaagcgcttcccactcgtcattattgatgaatgccaagatctctctgatgaacagttaactattcttcaagtacttgcaaataaaggaaccaagttacatttcgttggggatctccatcaagctatctatggctttcgtgacgttgacccagccaaagtacagcagttcgtaaaagaaaaccacttcactaacttaccgctgactagaaactttaggagttgccagaacatcgtcgaactttgtgccaaattgacagggcgaaacgacattgttggaaatgtatcatggctagagccaagatgtttggttgttcaatacgacaactgccccactgagctgatagatacctttaaagaaaagtgtaacggctttaacgacagtgtactagtctcgagaggccactcgcagattggaaaatttcaggcctccgttatccagcctaataacatccaaaaattggctctttctatgaaactttacaatcctaaagatatggaagcgctaagccactcattgaaatatttttcagagtttctccgataccacctcagcgaaagctgcaaaccaaacagcctcaattgtcctcaatctatcgactcaaacctatcttggcgaaagttcttgtttgattcattaaactacttgataaacaataacttaaatagcattgaagttaactggtcgacttggacaaagaatgcaaaaacattaattcgagatcttccaagacaggacttctgttcagaagctattgctaacatattagctcccttactcgagttaaatttaacctctccatctggctcagccaaacttgaagtagcttcatcattgggctcaactactacatcattaatcccgtataggaagtcaactatccatggagcaaaaggggaaagtcatgatgttaccatagtcatatcatctgctcgtgcaggaaatgaatctcactggaaaaattggattaaaaaccctgatagtgaggcagctagatttgcttatgttgcgtcatcacgcccaaaagaatttttgatttgggccgtcaaaactcttaagcaaccagaaaagaagcaactggaagctgttgggtttaccatagtttaa

SEQ ID NO: 75224 - DNA, 1920 bp, Pseudomonas fluorescens
atgaagctgtgcagtctgcggatatccaatttccagtcgttcggccctcagcctgttccgatcacattcgaagacataacttacctcttgggcccaaatggcgcgggcaaaaccgctgtcctccaagcgctgtgcaggttatttgcattcgagcccggattgcgtcgcgtccgcccttcagactttcacgtcccggtgggcctaagcgatggtgaggctggtacgaccttatggctggaggccgagttttcctttccagagacagctgacgatgaggacaacgacacggttgctccgcacttcgatcacatgcgtctccaggctacgggcgatgtaccgcgggttcgctaccgactcaccgccacagtcgacgacgaaggtgatgtggaagagacactcgtctatgtcacgcaggcggatgccgatggaaatccaatcgtcagctccatagtacccaaacatcagcgcaaccagatccacctccattacatcccggctcgtcgtgatccatccgaccatatcgcctatggcgcaactgcgttgctaggtcgtttgcttcgtgccacacagtggggtggcgaccgaaatacggtcaaggatttgaccgaccaaattaccagttgcctggccggcaatgcttcggtcacagcgcttgggcaaagcttaaatgcctcatggaaaggtctccacaaaggagctttctttgccgagccgaagctcactttcgtcaattctgacatcgaggtgctgttgcggcacatgtcggtgtcattcacgccgggccatggtgagaatgaagtcgacttttcacgactgagtgacgggcagaaatcaatgctctacctctcacttgtgttggcagctcactcgattaaccgtgacgtgagattgggtaagaatacggccattgatccagcgaagctaaaaccacccgccttcaccatactggccatggaggagcctgaaaacagtctgtcacctcattacttgggccggatcgtgaacgccctgaaaggatcaatcggtgtggatgcgcaggccctaatcgcgacacatgcgccttcgatgctacgccgggtcgatcccgagaatattcgctacctacggctcggatcgaaccggtgctctgtcgtcagcggcatcgcgctgccagccaaagaagatgtcgcacataaattcgttcgagaagcagtccaggccttccctgagatctacttctcacgtttggtcgtgctgggcgaaggtgacagcgaggaaatcgtccttccgagaattctccaagctaaaggcgcgcctgtcgacgaatccgcagtgaccatcgccccgctaggtggccgtcacgtgaatcacttctggcgtttactttcccaattgggcaccccgtacatcactctcctcgatctggatctcgcacggtatcaaggaggctggggacggctaaaatacgttaatgaccagctgtcgctttttgagccttccaaggttttgccctatacattcccagtctgggatgacgcaaatacccgcattagggaaaaaaatgtccccatcactgggtcttctgagacggtcttcgatcatctggaggctagaggggtatttttttcggcaccgcttgatctggacttcgcgatgctcaccgccttcccaacagcattcaatgctattgctatggaggcgaccccagaaagccagaaggcggtgcttggcaaaagccacgaaggcgccggtcaatacactcttcaagagcaatcgtggttcgatgcctatcaccactacttcaagctcaacagcaaacccgcagcacacctctcggcccttgcgagcctctctgaccctcagctgttggctggcctcccacccgttctggatcgtcttgcgaatgcagtcatagcagcgttagaggagtcaccggagtga

SEQ ID NO: 75225 - DNA, 1680 bp, Pseudomonas fluorescens
gtgattcaccctgaccgctggatgcactcaccggggctcactctcgaagcgaatgcgtggcacgccattaaggacactgagcactcgcttgtccttctggcggggcctggcgcaggcaaaactgaggtactggcacagcgtgcggactttctcttgcgcacaggcagttgccggtatcccaagcgaatcctagcgatttccttcaagtccgacgcgagccgcaatctcaaagaacgagtaagccttcgatgtggctgggaacaggccacccggttcgacagctttacgttccactctttcgccaatcgaatcgtcagtcgttttcgcgttttattgaccggcccagacacgctcaaacccgactactcgattggcaaagaggccatccaaggcgagcaaatcaccttcatgcagctccttcccatggcgctcaaaattctgcgtatgagcaagatcgcccgaaacactatccgtcagacctacgctcacgtgtttctcgacgaattccaggactgcacctctgatcagtaccagctgatcaaacttctgttcgagggaacgccggcgcttctgacagccgtgggcgacaccaagcaaaccatcatgggttgggctggcgccctggatggcatattcaagatttacgccgatgacttcgtcgcccggccattacggctctaccgaaatttccgatccaaaccgcgactgctccgcatgcagaacagcgtcatccgggacatcgacccttcggccctcatgcccgacgaaatgatcgcgggagacgatggtgtgatccgtgcagggaatttctcctcgagcgccgctgaagccgtttccctggcgaacctcatccagaaatggatcgaggtggaaaatttgcgaccagccgagatcgccgttcttttccgcggtgagatccatttgtatggcgaggaactgatggagcagttggcggctcggaacataccctttcgcaacgagaatacccttcaggatttgctcaaagagcctgcagccaggctgatgatcgactacctgacctgcctctacacgcgaggtgccaacaaggcatggtctcggctgatggatctcttcgcgccgttcgacgatgaaggcaacagcgacagaactcacaagtcgttcgagcgctgttacaagcagcatcaaaaacaggtgagagcggctgcgaaaacagcggcccctttcacagattggtgggagctggcaaaggcatttttcgataccttgggccatgccgtaatgacgactctttcttctgactacgaaaccaagcgacgcctgaaggaaatcatccgcgatacccgtgaccacatcacttcccttctgcaggtagatcccgacctgaccagagccctcgctcggttctccgacgacaacgctgtccgcttcttatccatgcataaaagcaaaggattggagtttcattcggtgatcatcctcggagtcgagcagcaatccttccgtggcaaaataggagaagaacggcaggtcttcttcgtcgcagtatcacgcgcgaaagatcgtctgatcattaccactgcgaatcagagacggcgcccagtgggaatctcggcgggcaaaagatgggatatcgcaagacagccgcacgtggccttcgtcacatacgtcaccgagcatctttcgcccaaacagccgtaa

SEQ ID NO: 75226 - DNA, 2106 bp, Enterobacter ludwigii
atgaaagtaagtcgtgtagcgattcggaacttccgtcgattggaaaatgtgcagattgacattgaagagaaggagtccatttttgttggtcccaacaacagtggcaaaacttctgccactgcggtttttcgttgctttctggggggacgagatttcaagatctacgacttttctgtcgcccggatagcagatttagacacatttggattgaccggagatgagacgctccttcccaaaattagtcttgacctttggttcgctatcgatcccgaaagcatcggttttggtagagttttcacattattgccaaatctttcggatttcacgaatgtagggattaggctgtcgtatgaggtctctgaagtaaggaagttatacgagaattacaacgctgcctatcctcccaaggaagatggaacgagctctaagtcgctttcgcaatatctatctatcgacggaaatcttggccgacattttacggtttgttactactcactagacgagaagattcaggagggagcaccgtctgagatcttgtcgagttatcttgatcctgacgaaggcaagcgtcttcttaagcagctcatacgtgttgagttcgtggacgcgcagcgcaacattaacgatgacaacagcagtcgcagtaataggctctcttcggcatttgctaccttctaccaaaagaaccttgagcaggttgaccatgccgctgatgctcacagcgtaatcgatgcgaataacaaacagctgactgatcactatgcaaagcaatttgccccactgatcaatctcatcaagcgccttggtgtgccgtcaattaatgatcgcgaattgcagattatatcatcgcttagccccgagactgctcttcgggggaataccgaattgctttatattgaccctagccggaagcatgaactacctgagctctataacgggcttggattcaaaaatctaatttatatggccattcaggcgcgtcacttccattctcaatgggtaatgaccaccgagaacagacctctgtgcctgatgattttcattgaagaacctgaagttcatctccatgctcaggtacaacaaacttttatatccaacatttggcaggtaattaatcaatccgctgaggtggctggagaaccgaatctcgtaccgcaacttgttataaccacgcattcctcgcatatcatggaggctgtggattttgagaaagttcgctatttccagcgctgccattgtgagggtgaaacagaagctgctagcattcgcaatgcgtcaatggttcgaagcctccgcgctttccagccgaatgtggagacaattgatggtaaggttatcccaccatcagaatcgctagccttccttaaacgttatttacgtctaacacactgtgacctatttttcgccgatgctggcatccttgttgaaggcgctgttgagaagttgttaatgccgaccatgattgagcgtgctgcagagcgattacggactgtgtatctcacagttttggaggtagggggagcgtatgctcaccgtttcgagggtttgcttagcttccttcatattccctatcttgttatcacagacattgattcagtttcacctaccggttatcccaaagcctgtcgagcggatgttgctggagcaaaaacgtccaacgcgtccctaaagaaactttgtgggctgacaacaattgaccaactgatcgcattgacttgcgcgcagaagcaacacaacgataaggatcgttgcatcgcttttcagacagatgttttggtcgaggaaaatgatgccagcgagatgttacgtccgcgcacgttggaagaagcaattgtatatgagaattttgggctccttcgatctggtgctttatctattggcattactgtccgagcgtctctcagcgacgcttaccaagatgtttacgatatggttcggtcggataatttcaaaaaaactgattttgctatggacatcttggcttgcgctgagcaatggattgtccctggatatattgccgaagggttgaaatggcttgagtcgcgcctattacccccgctaccagttgtggtggatacaaaagcctctatcgcggcgggagaatag

SEQ ID NO: 75227 - DNA, 1839 bp, Enterobacter ludwigii
atgaggacatggatagaaagcgaagcggatattcaagtccgtgcatgcatcgatggccatcgtagttttgcgatgatagccggcgcaggcgcgggcaagactagttcactggtagatgctcttggcagggtccgggataatgaagggaatatccttagaaagcatggtcaacgcattgcttgtattacctttaccaagcgtgcggttgaggtcatcaagaaaagattggggtttgatgagttgtacctagtttcgactcttcatggatttctgtggggcttaattagccatttccacgaaaatattcgtcaagcgttatatgaaagccgtattccaaatcttatagacaaggctatggaagatgataacggcggtaacagtaaaaaggcacttaaagcccgcgcaaaaatagaacgactgacagaacagcttgcccttctcgaagcagtcaatcattttgactattctgacactagcttcagtgattacgaaaaaggacagattgggcatgatgatgtcatagaaattgcaacctacttgcttggaaataatcaaacacttagacggatcattggcctacgttttccttacatcttcgtcgacgaagcacaggacacatttgagggaatcgtctcaggactcaatctcgtctgtgcgggtgatgaacttcctatgattggctattttggtgacccctggcagcagatttatgaccgaagtgccggtgattttgcgccaccagacaaaggtaaagtcatcaagaaagctgaaaactttcgctgttctaaaagcgttatccgacttctcaatgcttatcgtggagatgttgagcagtatgctgctggcgaaaatgctgaatgtgaaggtagtgttgaatttttgctaattaaagcagaagagccaacagaaccacgcaggcgctattcagaagaacagattgagcgggcgctagctcgtatggatgctgctgtcgaaaactggggttgggcaggtcgcgacgatgtcatgaagctcttcctggcacgtcaaatgatcgcgcgacggcttggcttcgctgatctcaatcgcctcttcactggagactatgcctcatcacgggctcaagatgcttttgaggaagggacgcatttccttcttaaaccatttctttcgacgatttgccctctcataacagctcaaagccaaggtgacgatcgaaaaattattaatctacttcgtagagatagtcctgctttcgcgagcgatggattaaatgcggaaaagtcactgaaagtgatgattgatacttcgaggtctttggttgagcagttgcatgctttgtgggataccgagacgattggaacgctccttcacttttgcgtcgagatgcagataatccagccctcagaaaggttgagtgagcatcttgatcgacctccacgtactgagcctttcaatgaggagcttcacagtttcgacaaaggagactggctcgcagactcattttttaaaatggccacagggggagtctcccgctatttcgaatatcttaacaacaataccgcctatagcactcaacatggagtgaagggcgaggaatatccaaaggtattggtcgtttatgatgatgtcgaagcagcatggaaccaatacagctttagtaaaaccctaactcctctcaccgctggggagccctctgatcggcaacgctctgtaactcagaagctcgtgtatgtctcgttttcccgtgctgaggaggatctacgtatagtacttttcacagctaatccagagggcgctcaagctgagctaattggaagtaaactattgtcgcctgatcaaatacgaattatggcctga

SEQ ID NO: 75228 - DNA, 2199 bp, Enterobacter cloacae
atgtatatatctttcctaaaaataaacaacttcaggaagtttggagagactgaaaacattattggttttgttaaatctcatagtgaatcacccaaaaaagatttagttgcttcctcaacaactctagtgattggaaaaaataactctggtaaaactactgtaaccaaagccttagaacttttgcactcggactctgagaaaattactgggcatgattttaattataattattcaaaaaaaattcttgagaaacatttaaatgatgattttagcatagcaccaaagatatcttttgaaatagaagttatattagatgatgaagagcatgatcttatcggcgagtttagaccttttatcgatgcaaaaaaattgttaactgatggggtgcgaaaggcgaatgttatcattgagtatgaagtaaaagtaatagctgattatcagtctaaaatagaagcgcttaaaaaagactgtttaagctgtgaaggtgattttgaagtgacctttagaaaatatctcgatatattatctaaaacacaattcaggagaaggataaaaaactaccagaacataagtatcgagaccttaacaccgaggaattttattgatttgagggttatttcggctgcaaaaaatattcatgataaaagattacttacaaaatcattcaataaaataattaaatatatgtacgaatgcgatgagagtgaatacaaaggaataataagtctggttgatggaaataatgaaagtctgactaaaaacattaaagttaaacatcagtcaggagttgaaagaatcctaaaaaaaataatatcagacaaagatataggaatcgaactccgatccgaattaacattcgataagcttatgtctgacctgataatttatgaacataaagatggagagtttcttgtccctgagagtcagtttggtctgggttacgcaagtttagtaagtattcttggtgagttaattgattacacgaatcaaagcttgaaggaaataggtcagagtagaatcagattattatgtattgaagagccagaagtttttatgcatcctcagatgcaaataaattttattagacatatccaagaggccttaaatgaaattctatcttcgcatgttgcagaactaaattcgctgaaaagccaaatactaattacaacacactcatctcatattttaaatagtgtgattcacagtagtaatacttttgatgatattaattatatttacttaaaaaatgggaatgctgcgagtgtattattaaaggataatgatatagcaaatacgcaaaaaaaatcattgcaattcgatttcattaaaaaacatataaaacatcaaacaccagatttgttcttctctgatgcaataatatttgtcgagggcattaccgaggagagggtattgaattcatatattgaggatgacccagttctaaatagaatgcatatttctgtttttagaattgatggagcacatgcgaaagtatacgaaaagctaattaacaaattacaaataccatctttgattattactgatatagattttaaaaaggaggctaagaaaaatgataacaatgcagctgaaattactgtgactgtagatgttgcggcgttagtagaagaacgcgctgagaaggttgaacaaatggatgaggaagatgaagaactcgaggatatggatgaggaagtagatgcgataattggtcaaatctcggtgctaaccgatgatttaataactacaaacgcaactttgcgtcattttttcaaaaataaaaagatttcagcaatcaatgatttttatgttaaagataatttaatggttgtatttcagaaggatggtgttgccataccaagagaaaatcccgaagtcatttattatgctaccagttttgaagaagcattaattttaaaaaattacgataatgaattgctcttggatattcttaaaaaagttataaaaaaagaagttttaaatatacttggtgatgcaaatgatgcttgtaatatagctcataattcaagggatctacagaagctactaacccgcaaaaaaagtagtttttctaatagccttattttttctttggttacaataaatcaaaataaacctgaactacctgattatattttaaagggatttgagtggctaacgttaaaattaaaaagagaaggcgtagcgtatgaactttga

SEQ ID NO: 75229 - DNA, 2046 bp, Enterobacter cloacae
atgaactttgaacttgataaacaacaagcagaaatcgaaaaaaaagtcgaggccgaactttttaaacttataaatgatgctgaatctttctatttcatatcaggcgcaggttcaggaaaaacgcatgctcttatttctggtgtaaatagatttataaaggataattactcgcagttaatactaaatggtcaaaaagtactatgtattacatttaccaataatgctgcagatgaaataaaacataggttgggcgataatgatttagtgataacgtctacgattcattcatatatttgggatgttgttaaatatcatagggatttattgcttgatgagcatgttatatatttaagtgaagaaattgcaagaattcataacgacattttcaaatttgaatcgagcaataaaactgtattaaaggtaaggtgtttggaagagtctaaattgaatgcaattatagattgcattcttgaggataaaagtaagttttatgagtctctgaaatcagcctcaaaattctggatatatttagaatcaatcactgaagaagatgtttacaattatctaaaaggaaattatcaagaattatcgactgtttttaaaaagttagtgagatctcaagagtttaaacggtgtatatgtaagatagaagaaaaagatacccagtacagtacaataaaatatttcaatacaaaaaatatcgaggttttatataaaaatattattgggcataacacattgctagtttatgcgtcacggttgctttcaaaatacacattactttcaaaatgtatcatcgactctcatccacttgttttcattgatgagtatcaagatacagatgaaggtattataaatttatttttaggtgcatacgaaatctcaagaaaagagaataagaaactatgcttaggtttctttggtgatcctatgcagactatttataaggaaagtgtacataaagaatcagaaagtctaaaaatacttgttaagaatattaatcgcaggtctcatcaaaatatagtttcatgcattaataaaattaggggaggaggtcaatatattaatcaacaacctataaaaatatataatgaccactcctctccatcactaattatcgagaaagaagaaaattacacaaacgattatttgtcatctgtaattattgagcacaaaaacgaatggggcataagtgacacttctaagcttgcatgtttagtactcaaaaatgaaatgctgtctcagctttttggttttgaaatcctttttactaaaatgctaaatatttatcaagcagaacatgtaaaaggatttgaaatgattggggcagagtttttatttaaagaaacaaggtatgcaggtcctttgccagctctcctccatgatttgttaatgcccctctatctcttaaagagaaaagcggagttttccgtgtcagatttttttaatcaaaaagaaatccaatgtcatactttgtcgggtatattaaatactctaaaagtcatagagtcgttaaaaattaaaaacttaactgacttagtatgtcaaatgtcaaatttatatgaaacacaaagctcagaagttaaaataattcttggttataattttgaaattgttacgcatgatgtagaacacttgaaaatggaaattattgagagatgtaggctcaaagatactttaaagctaccgtcattattagatgagttatttgagatcgatattgaacaattctttttatggttagactttatttatcaagactatacaggggaattggtttcatacttaacatgccacgcttcgaagggacttgaatttgataatgttataatatttctttcggattctttcaatagaaaagaaggatatttctcaaaccttttaaattctgatatgaattcacatttagaacctcttttagaatctgcaagaaggttgttgtatgtgtcaagttccagagcgattaaaaatcttaaaatatatttattcactgacaaaaaaatagataaatcgaaagtagaatatttgttcggacataatgcttaa

SEQ ID NO: 75230 - DNA, 2235 bp, Hafnia alvei
gtgtatatatcctttttaaaaataaacaacttcagaaagtttggagagcatgataatatcatcggttttgttaaatcacacagtgaatcaccacaaaaggatttagtcgcttcatcaacaaccctagtaattggaaaaaataactcaggtaaaacaaccgtaactaaagcactagaacttttacactctgactcagaaaaaatcacaggtcatgattttaattatagttattcaaaaatgatacttgaacaaaatttagctgataaatcgcacataacaccaaagttatcttttgaaatagagattattttagatgatatggcgcatgatctcattggcgattttcaaccttttattgatgcaagaaaatccttaattgatggagtgcgaaaagcaaatatcattattgagtatgaggttaaaataaaagcagattatatatctaaaattgaagagctcagagaattttgttcccgcaacactcataatccagaggctattttcagaaaatatctcgacatattatctaaaacacaattcaggagaagaataaaaaactatcaaaatataaacattgatacattgacaccaaaaaacatcatcgatttgagagttatctcagcggcaaaaaacattcatgataaaagattgctcacaaaatcgtttaataaaataataaaatacatgtatgaatgtgatgaggtagaatataaggggatactagatttagtcgatggtaacaatcaaagtctaacccaaaatattaaaataaaacatcaatcaggtgttgaaagaattttagcaaagataatatcggataaagatatcgggatagagctcagatcagaattgacatttgataaactaatgtcggatttgataacttatgaacataaagatggagagtttcttgttcctgagagtcaattcggtttaggttatgcaagcttagttagtattattggtgaaataattgattacacaaatcaaagtttgaaggaaacaagtcagagcaggatcaggcttttatgtattgaagaaccagaagtattcatgcacccgcagatgcaaatcaatttcatcagacatatccaagaggcattgaatgagattttatcttctcatgtagaaagtttgacgtctcttaaaagtcaaatacttatcacgacacactcatctcatatattaaacagcgtcattcatagcagtaatacttttgatgacattaattatatttatctcaaagatgggaatgctgcgaacgttttactaaaggataaagatatagcaaatactaaagagaaatcattacaatttgaatttataaagaaacacataaaacatcaaacaccagatttatttttctctgatgctataatatttgttgaaggcattacagaggagcgtgttttgaattcatatattgaagatcatcccgtcctcaatcgaatgcatatttctgttttcagaattgatggtgcacatgcaaaagtttacgaaaaactaattaataaaattcaaatcccctccttgatcattactgatattgatttcaaaatagatgtaaaaagcagctctactaatatagttgaagatagtggaggcattgatgacgctaatgacattgatgacgctgatgacattgatgacgctgatgacgctgatgacgctgatgacgctgatgacgctgatgacgctgatgacgctgatgacgctgatgacgctgatataaaaaataagatattaggccaagtatctattctttctgaagatttaataactacaaacgcaactctacatcatttttttggacaaagaaaaattacagctttaaaagattattatgtaaaagataatttaatgattgttttccagaaggatggtattggaataccaaaagcatgcccaaaaatcacttattacgccaccagtttcgaagaagcattaattttaaagaattatgacaataatttactattagatatacttctaaaagttataaacaaagaaacattaaatacacttggtaatcctagagatgtttgtaatattgctcataattcaagattgctacagaagttactgagccgaaaaaaaagtgttttttctaataatcttattttctctttagttacaacagagcataataaacctgaactccctgattatattttaaagggatttgaatggctcacattaaaattaaaaagagacggtgtatcctatgaaatttga

SEQ ID NO: 75231 - DNA, 2049 bp, Hafnia alvei
atgaaatttgaacttgatcaacaacaagttgaagtcgaaaaaagtgtcgatattgagctttttgaactgataaaaaattcagaatctttctattttatttctggagcaggatctggaaaaactcatgctctcattactggtgttaataaattcataaaagataattacgcacaattgctactaaatggtcaaaaaatattatgcattacatatacaaataatgcagctgatgaaataaaacatagattaggcgataatgatttagtaataacttctacaatccattcttacatatgggatgtagttaaatttcatactggtttactacttgatgagcatgttattttcttgagtgaacaaattaaaaggattcacagtgaaacctatgaattaccaacaagtaataaaaccttattgaaagtaagaagtttgaaagaactccaactaaatgcaataatagattgtattcttgaagaaaaaaatagtttttatgattctctgaaatcagcctctaaattttgggaatatttaaagtcaattacagacatcgaagtttttaatcacctaaaaggaaactatcaggatttatcaagtattttaaaaaaactagtaagatctcaagaatttaaaatatgcaagtgtaagattgaggaaaaagaagacaagtacaccacaataaaatactttaatactaaaaatattgaagtattacataaaaatatcatcgggcataatacgttattaatatatgcatcacgattgcttcaaaaatacgctttgctttccaaatgcattatagatgctcacccacttattttcattgatgaataccaagatacagatgaaaatattatcaatttatttttagatatcaatgatattgcaaaagaagaaaataaaaaaatatgtttaggtttctttggcgatcctatgcaaacaatttataaagatagcataattcgagaatctaacagcctaaaaaaattggttaaaaatatcaatagaagatcgcatcagaatattgttgcatgcattaacaaaattagaggaagcaatcaagatgttaaacagaggccaataaaaatatacagtgaacagtgtaacccgtcgctaattatcgaaaatgaaaataattataccaatgactatttatcttctataattcaaagacataaaagcgaatgggacataaatgaaaattccaagcttgcatgcctagttcttaaaaatgaaatgctatctcaactccttggttttgaacctcttttcactacaatgctagagatctataatgcagagcatgcaaaaggatttgagatgattggttcagaatttttatttagagaaatacgatatgcaggttctttgccatctctcctgcatgatttattgatgccactttatctcctaaaaagaaaggctaacttttcggtttcagacttttttaataaaaaacccatcccaagttataacttatcagacattttaaactctataaaactcattgagtcattaaatttcaaatgtttaagtgattttattcgtgaaatatctgaaatatacataacgcaggatgttgaaattcaaaatctgattaactataacttcgaccttgttatagaaggtttagcaagtgcaaaagataaaattattgagacgtgtaggtttaaagatactgtgaagctccccttattattggataaattatttcaacttgatatggaacagtttttcctatggctggatttcgtttatcagagttatccagaaactttagtttcatatttaacttgccatgcctcaaaaggtctggaatttgataatgttataatttttctttcggattctttcaatagaaaaaaagggtatttttctaaccttttaaattccgatataaattccaacttagaacctcaacttgaatcagcaagaagattactgtatgtgtcaagctcaagagctataaataatttaaaaatttatctttttacaaataaagaaatagataaatctaaaattgaacatttgttcacacagtgtacgaattga

SEQ ID NO: 75232 - DNA, 1752 bp, Xenorhabdus nematophila str. Anatoliense
atgtatctaggtaagctgaaaatttcgcggtttcgatcttgtgatgatgtgaccgttagcctccgcccagatttaactgtattggttggtgaaaataatggtggaaaatccaatgtcgtagacgcaatcagattgcttactttgccgttgagtggacgccgcgaacgatatccagaggatgaggatgtacgacgctattcgacagtcccaagttttcaaatcgaaggggttttccagggtctaagcgataccctcaaaggtctattgatatctgcagttcccgatcctaccaagagcgaggctaccttcggctatcgatatgaatcgcgttctgaacatgctccccgtggtaagactaccgtgtgggctggacgtttcgacactaatggaccagagcttggttcttctgagttgatcagacacgtttatctccctcctttaagggacgcacatcaggtgctgggtactagcagcggcactagagtgatggcattgctgcgtaatttcttgccaaaagagcgggagcaggatttcctcgctggtgtcaggcgtgcagataatcggcctgagatcttaactacaatcaatacggatatcagtgctgctctcggactactcactaatggagtacgtccgcagatagcggcattggattttggcagcgaaaccttactcgatgtagctcgtgatttgagatttcgtatggccgatactggtttgatacccgaagatattcggtcttctggtctggggtactcaaatttactctacatggccactgtggttgtagagctgaataaggccaaagaggcagacctcacgattttccttgttgaagaacctgaagcgcatttgcatccgcaattacaggtacttgtgcttgagttcctcttggatcaagcacgccaatcagcatcacgtatcattgagccaggaaagcctgaaggccgcatccaaattgttgtgacaacccattcccccaacctgacagcatgggtttctccacgtcacctagtggtcatgcgttcgcggcatcgtgaacaagatggaaaagccatctcagaatcagtgagtgtgcccattgctgaaatagggctaaagccaaagacattagataaaattagccgatatcttgacgtgactcgttccgctttgctgtttggtaacagagctatcttggtggaagggatcgcggaagcactattgttgcccgtgttagcacaaaagcttgtgctagctgatgatttagatgggtggcttaggttcaagggggctgtaattgtgccgattgaaggtgtggacttccgtccatatgtagaggtactgctacggccatatggtgatgcacgtattgctgataggctgatagtgatcactgatgcggacccaaccgtgttgggaaataggaaagttgatctggaaaatctggctgcaacgcatggagctccagatgctttgatcgttctaaccaatcagcacacattggagcacgaaatttttggcgctggaaacgaaagtttcctgaaaagcgtgtttcttcgtttgcatcgtaattcacgtagagactgggaagcgcagatagagggcattccagaacaagatcgtcccaatgcatttcttaaattaattgagacgaaaaaaactcgcaaaggcgatttggcgcaagctatggcttcgcgcattgaggcgggtgaaccatttgttgttccgccttatcttattgatgcaattcgtggagcttcacgtatatga

SEQ ID NO: 75233 - DNA, 1776 bp, Xenorhabdus nematophila str. Anatoliense; identical to SEQ ID NO: 73333

SEQ ID NO: 75234 - DNA, 978 bp, Xenorhabdus nematophila str. Anatoliense
atgggaacacgcagttgggcttcaatgttaacgattaagtctttcatcgagattttgagtcacagacatattgccgaatctgagcctttattcccaattctgatagttgaagagccagaagcgcatttgcatccgaatgcacagaaaacactttatcgccaactctcagatacaaatggtcaattaattttaagtacgcattctccatttttggctgccatggctgacctttatcaaataagatcattggtaaaaacaaaaaatgggattgtggcacataaaatttctcacccaatgaccgatgacgagaaaaaatcaatttcacgtagtatattagctaaaaatggtgaattgctgtttgctaagtgcatgcttttatgtgaaggagtcactgaggagcaggtgcttcccgctatgtttgagatttatgcatcagctactccttggtctgtcggcctttcttgtgtcaatgttggtggaaaagataaatatattcattttgcgttgttgccatttagcttcggtataccaacatgtattatcagtgataacgacattaatcctaactctgggactaaaacacaggatgatgtcacgcaacaaatagaaaaattatcgaaaaaaatgtgtctgtcactgacaaaagatttttacgatatttattttcttgatgatggaaatgattttgaaaaagaattgattgaccacggcttgcttgatgagattattgatgcttttgttttacttgcaacaacaggagataaaaataacggtaaatttagagaagcaaaatataatgaatttaataaactcactaatgaaaagttattagaaaaaatgagtaaggaaaaagcatcttatgctggtttcttagcagatgtgcttttagaaaataaaagaaaaaaaacagttaatgatttattaccacctaatgttcgagctagtttcgattgtataaaaggatggttagcatgttaa

SEQ ID NO: 75235 - DNA, 1896 bp, Xenorhabdus nematophila str. Anatoliense
atgttaaatttatctaaaggtcaagaggccgtagtccacgctgaaatcggtctgcccatgcaggtacttgcagcagcagggtctggtaaaactagagtgctaactgaacgtgtacgttatttaatcgaaaacacacgcaaagatggtatcatcgcgttgacattttccaataaagcagccgaagaaatgcaaattcgtttagctgacctagatgtgcttagcgaacgatgctggatagctacaattcatgctgtagctcagcggattttagatcaatatggtcatactattggcttaccttctgaacttcatatttatgaacgcgatttagatcgaaaaactgtttttcttcaatctttaagagaaagtggcattggtatcgatgatttccttaatgctggagatgaaaaaacgcgaaaaaatcgtgagcgtattattcataattacttagaacaattctcagtagttaaacgagaacttttaacagaagaggaaataaaagaaaaatatacttctaatgagtcatttttaagtgttttgcaagcataccaaggtgccttagtgagaagtggtggcttagattttgatgatattttagtttacgcccatagaattttgatggagcagccatggtgcgcgaatatttatagagctaaatataaacatatatgtgtcgatgaggcacaagacttaaacaaagctcagtatgaatttatcaaagtgttgtgtggagaccagattaagagtgtaatgatggtaggtgatcccaatcaaatgatttatggattcaatggttcatcgtccaattacttatgcaaattatttttacaggatttttctgctcaggttttcgaactgaaagaaaattatcgcagctcaaaggcggtaattagtttagctaataaattgaagccaggatcacaagtagaagctgattttgtattagatggacaatatgaaattcataaatgccaaaatgaagaggacgaagctacttggatttgtaataaggtgagtgaacttctttgtcagaaaacaaatattgaaattgaaggcgatatatcgcttaccaatatggttgtgattgcccgaaatcgattcgttttccttaagctagagaaggtgcttggtgaaaaaggcattccatactcgttgaagaaaagtgagcgtcaagcagaaccatcatctttatttggtagggtgcttgatcttgcaatacgagttcgtcttaatccaaaagattggattgacggtaaaaaactttgtactgctctgaagatatcagttccctctgtctggggtaacgataatttattacttgatatggctgccgccgttcgccactcagcgatttcattccctgatattcaagctgaccttcttgaggaaattcaaggattagacattgaaaagccaaacatacctaaactatatgatcgttttaatacaattattcaaggattgaataatgttaatttgcctaaagaagacaatgagcttgagcgttccttgcaagaactagatgacttcagaaattgctggactaccttcaaaaggaaggggttaggtgaatccctcatgtcctttcgtaatgcgattgcattggggcaggttgcagaaaactatgatccaactggtctaacattaagtacagtccacacaatgaaagggcttgagaaagatatcgtttttctcatgggtatgtgtgagggagtatttccagattatcgagctaataccaagaaagaacttgaagaagagcttaatagcgcttttgtagctattacacgcgctaaacgctggatatttgtctcttatccgcttcaaagagttatgccatggggaagtttaaaatcacagaccgtttcacggtttgtaacgatgttgcaaaaatga

SEQ ID NO: 75236 - DNA, 2295 bp, Bacillus sp. B-jedd
atgaatattaagtttgtggaaattcagaacttcagaaaattaaaatgttgcagaattgaatttacagaggatactacactatttgttggtgcaaataatagtggtaaaacaactgctatggaagctttaataaaattcttacaagagaaaaaatttagtgtaaatgattttacagtaaccaactggttagaaattaatagtatcggacaacaatggaagaaaagtaaagaaagttcacttcagttaaatgaggaagaacttcttgcactaatgcctacactggatgtttggattcatgtaggagacgatgaaattcattatgtgacccacttaataccttcattagactggaaaggtgggcttattggagttagattaaggcttgagccgaaggatattcaaaacctttataaggactttttgaatatatcacaaactgctgaagatacagtggtagccagtaaaataggagatatcgatgatcagcttgtcttatggccgagagatttaaaggactatataagcaaaacgattcaaacacaattttctattcaatcatacctccttgatccgaaaaattgtgtagtacctgaaaatggtatagcaaagcctcaaaatctgccgatatactctgaacgattagatactgaccctttcaaaaatctatttcgcgttgattatataagagctcaaagaggtttaacagataacgcaaatgactcttcacgtggaataagaaaaggtaagctttcagcccaattaagagaatactatgacgttcacattgatcctgaaaaatcaccgacgtcatcagacattgatgcgttgagagcaattgaaatagcccaaaacagctttaatgaaaaattgcaaaatggatttaaagatgcattaagtgagttggaaactttaggctatcctgggttctcaaatcctaaaatatcccttacaacaaaattaaacccaatggatggtcttagccatgattctgctgttcagtttaatgtaattgaagacgatgaccagacgggagattcatctataaggttgcccgagcagtataatggcttgggctaccaaaatttaatttctataatatttgaattaatgcgttttagagacgagtggctcagaattggaaaaggttctaaaagaaataaaacagataacgatgcatactttatcccaccccttcatttagtgttggtagaagaacctgaagcacacctgcacattcaagtccaacaagtttttattcgtcaagcatacggcgtattgaggaatcggtcagaattattagaaccaagcatcaatttaacaacgcaattagtagtaagcacccattcaagtcatattgcctatgagaagtctttctctagtttaagatattttcgtaggcttccagcaaactcaatatatgctctcccaatatcagttgttattaacctgtcaaacgtgtttggagaaggaaatgaaacagaaagatttgtaactcgatatctacaaaccactcatagtgatttgttttttgcagatgcggtaattcttgtggaagggccagcagaacgaatgttagtgccacattttatcagaaatcagtttaagggactaacagaaaaatatatctctctattagaaatagggggaagtcatgcacatcgtttaagaccattaattgaacacttaggtattacttgtttaattgtaactgatttagattcagtgagtccgcaaaataataattctgctatagtaccaaagagaaatcaaggatatacaaccaataatgatactttaaaaacatggttgccacagaagatgagtattgatgagttattaaatcttaacaaagaacaaaaggttaaaaggcatgaggatcagcattttgctatcagggttgcttatcaacatccagtaaacgttaggctggttcaagatgaagtagaggtggaagccctaccatatacttttgaagatgctctggtttatgaaaatataggtatttttagcacattagatggaataggattgattaaaaaatttaaaaatgctctgaatgaaataagttctattacagatttgggagaaaaattatttaatgatctgaggactggaaaaaaagctgaatttgcattagatattattcatttaattgatcctaaggaacttacagttcctaaatatataagagatggactttcatggttagatgtacaactgggaggtattgagcagaacgatgcaaaagagttcgtagaagaagatgtaaaagaagtggtgagtatgaatggctag

SEQ ID NO: 75237 - DNA, 1899 bp, Bacillus sp. B-jedd
atggctagggctgagtataacattgataatcatatggatgaccatgtggatacagagatattaaattgcttaaaccttgaaaagcccaaaagctttttcttatttgctggtgcgggatcaggaaaaacgagaaccttggtcaaagttctaaatgaatttggaataaaatacgaaacaaaaatgagattaactggacaaagagttgcggttattacctataccaatgcagcttgtgaagaggttgaacgccgtttagaatataatccgttattttcaatatctacaatccactcttttatttgggaacttataaaagggtttaacaatgatattaaagaatggaaaataaacaaactagcagcagaaattgatgaattaaaagggttgatagccaaaggtaaacttggagcaaaaataaattacgagcgccaacaaaagattgaaaaaaatatcaagattattgatgaattacctaaaataaagcaattcacttacagcccaaatggaatgaatcaagataaacaatcattatcccataatgatgtaattagcataggtgcttattttttacagaataaacctttgatgcaaaaaatcttggttcgaaaatttcccattctatttatagatgaaagtcaagatacaagtaaagaattgattaatgccctttttgaagtggaaagaattcattatcattcttttactcttggtttgtttggggacacaatgcaaagaatttatgcttctggaaaagaagatttaggacgtgatttaccagctcgatgggtaacccctcgaaagaaaatgaatcaccgttgtcctcctagaattataaatcttattaatagaattcggtctgatgtggatgataaagagcaattatccagaacagataaggctgaaggaattgtccgtctattcattgcccctatagaaagtgatagagagaaaatagaacgagaagttgctagacagatgacatcaattacaggtgatgagaattgggagctgtctaggtataccacccttatattggaacaccatatggcggctaagcgattaggattcatggaattattcgagccattgtacaagtcaaaaaaatataatgattctttgttaaaaggcacatccgaagaattgaatttttttataaatttgatcttgcccttaattgatgctcataaaataggagatcaatttactattgcgagaatactatgtaaatattctcctctaatgacaataattaatgaggaaataaagcaattagtcagagttaaagaaactgacaaagcagtaaagcagttctttaatgaaatagacaaacatatcgacccaacatgtctggaggtattaaggttaattaaagcacaaaatttgtttaatctacctgacacattagctcaacttctcttgagaagtgatcttggtattacaagtaaagatgaaaatgaagctgagaatattggtattgatgattatctagatgaattgctcgcaagttttcatgctcccattagtcaagtaagagcatatggggcgtatttatctggttatgcttcttttatgactcatcagggtgtaaaaggactggagtttccaagggtaatgactattatagatgatagtgatgcaagaggttttctattcaactatgaaaaactatttggagctgaggataaatcgaagacagatattaaaaatgaaaaggacggaaaggaaactagtattgatcgtacaagaaggttgttttacgtagcgtgtagtcgggcagaagagagtttagcaatagtagcttattcaaaaaatcctgaagctgtaaaaactaatgttcttcttagggaatggtttgaggaagaagaagtaataacttattctggcttaggcattatataa

SEQ ID NO: 75238 - DNA, 2310 bp, Serratia symbiotica
gtgcatcttcactcgtatcgcctcaggaactttcgacgcctaaaggatgctcatattgagctggctaacgatatctcaatattcgtaggatcaaataacagcggaaaaacatcagcaactcaagcgatccatgcgttcattacgggtggaagggatcgtttcagcctttacgatttcagttcctcatgctggaaaaattttgatgaaggtggaaatatcgacttggcagccccaatccccgaggatttctcctttccaagcatagatctcgatctttggttagaggttgcagcaccagacctctatctagtgattcccttgcttccgagtacagagtgggaaggtactaaggttggcatacgagtttccctgaccgcgaaaagccccactaacctcattaaaaactttcaagaagctaaagccaaggggactgcgcaggcagcagaactaccgcccgattcgcaatacattccttggcctcgctccatgacggactatctccagcgcgaactccagagcgaatatgagttgcggtacttcattttggatagcaagcaatttgataagaccctccgtgagatcggcgattacgttccagatgaactaggcggagagccaggcggcggaacaattctaaaatctcttattcatatcgacaatctgggggcgcaacgacaccttgctgatcctaatccggaagcaggcggaagatcagaagacctgtcaaagcgtttgagccgcttctacaaacgcaaccttaatcagagacaagacgatcacatagccctccaggcgctgttcaactctgagcaagcgctcaacattcacttggatggcgtatttaagccgatgcttgatcggctcgccaagcttggctatccgggtgtcaataacccgcgactgaagataatgtcagcactagaccccgcccacgtcatgagccaggatgcacgagttcactatcagatcggagatggcgaagacaccgctacccttcctgacagttataacggcctaggattcaaaaatttgatctacatggtcgtggaaattctagactctcaagccaggtgggaggcgatgcataatcgccctccattgcacctgctttttgttgaggagccagaggcccatctacacgcccaacttcaacaggtcttcatccgcaatattcttgaacttctgaaaatagagagcgacgacggaagcatttttggcagtcagatggtcataacgacccactcgccacacatcctttacgagcgaggcttcaagccgattcgctacttccgacgcaaaaaaattggcagggaacagctgacggaagtcctaaatctatcggcgttctaccaatcccaaccagatgaccgtgattttttagaacgatatctgaagctgacgcattgtgacctatttttctcagatgcagctattctcgttgaaggcaacgttgagcgactgctcctccctgtcatgattcggaaaagcgcgaagactctccgctcagcctgcctatgcattttggaagtcggcggtgcctttgggcatcgcttccagtcgctcattgagtttctcggtctgacaaccctaatcatcaccgatattgatagtgttgcccttgtggctcaggcggccgacgatgctgtggatgacgaggaaatcgaagagtttgaggttccagccgacgcggaagactatgccgcagggcaggcccgggacaatgggcaagatccagtcggtgaaccgatggttccagcacctaagaagaaatatggaaaggcctgtttaccaagtaaaccgggtgccgcaacgtcgaatcaaaccctcatcaaatggcttccggggaagctcacaatcgaagacttgcgtaacgcatctgaagcggacaaaactcacgtgcttgaagacgatgcgaaggttcgcgttgcctatcagattgaacgggctatcacttggaatgaagttaccgaaaccctctgcgggcgtacgctagaagaagacttcggcctcgaaaatccggagtggtcccaagccataacgaggaaacctttaggcttgattgtgaaagccagatccgctagtcctgctgctcttgccaaaggtcttcatcagaaggtttcgcggaagagtttcgataaaacgaagttcgcgctcgccgttctcactgaagacgaggaagcgtggcatgttccggcttacatccgtgatgggcttgtctggctgaaagacgaaatacggatcgaactcgaaaccgtgctgcccgacctcatcaacgaagaagatattgtgacaggaggcgagcatgagtag

SEQ ID NO: 75239 - DNA, 1956 bp, Serratia symbiotica
atgagtagccgggcgaacaagccggatacccaagccgacatggacctgcggaactgtcttggaaacgttccaccgcgtagcttcattatgaaggcaggtgctggttcaggaaaaactacgtcgctgattaagggcctgtcatcggtcatccaaatacacggtgataagctgaagaagacccgtcagcgtattgcctgtattacctataccgagattgcggccggagagatttggagggacgtcggcagtgaccctctggttcacgtctcaacgatccacagctttatgtggctgctcgctaagcctttccagaatgatattcgtgtctgggtgtctgggcgcatcgtggaaaaaattgaggcacttgaagaaaaacgggcaacctatggccccagggttcaacagcgcacgaaggataaggacgtccgagatttggagcgcctcagtcggcagtcggaacggatcgctacagtcaaagggttccgatacggaacaggtagcaactacgcaaagggtattcttggtcatgacgacattctgaaactcgtctcctaccttatttccgaacgccctctcttccgaacccttctcgcacgccagttcccgtttgtctttgtggacgagagtcaagacactaccactgcggtcgtgcaagctttgaaggtcgttgagcgtgaacccggagtgacactttgcctcggcttctttggcgatccgatgcaacgaatatacgttacagggactggacaaattgaagcagagcctacgtgggctgatataccgaaatctgaaaatttccggtgttcaactaaggttttaaacctcgcgaatgctattcgccgtgatggtgatgacctcgttcaaacccctggccagcgtttaggtcctgaaggattagttcctacccctgaaggatcggcacatctttttattttgcctgcggacgaaacacgggacgccaatctggttcgtgtacgtgaatggatggcggcaagaaccggtgacgatttttggcgatcaggtgatgatgaccaagagcgggtgaagcttctcgtcattgttcaccagatggccgcaaggcgcttagggtttggagacctctattctgcgctcaactctagagctccgtcagcattcaaagatgggtttttagacggctctgcatggccaatttcatcgtgtgtaaagtttttgatcccgatcgctatcgctcataccaatggccaacaacttgaagtgatgcgattgatccgagagtattcacttcttcttgataaagagtctcttgttggggcgagcgtggcggagcgccttaaagtactcggcgaacttgttgcttcgatcacagcaggcgtagcgggacattccggagcaacaatcggcgatcttctaaaacaagtaaattcctccgatttactagtccttgaccctaggttggtatcgtatctggatcaaaatgcagttctgccatttcagcccgagcccgaagctggcgagaacaatgacgacgatgttcaggaagacgatgaatctgataaggaaatggctgcaatggatgcttttctggcatgccctgctagccagcttttgccataccatacctacatttcggagcgttctcctttttggactcagcaaggcataaaaggcgctgagttcgatagggtacttgttgttctggatgacgccgaaagtaaccatttccaattctcctacgagaagtacctcggtcttgaggagccctcagataacgaccagaaacatatcgatgctggcgaagaaacaactatggatcgaacgcgccggcttttctatgttagctgcacaagggcgttaaaagacttggcggttgttctttttaccgccgatcctgaacaggcagtggctcatatacggcagcttgatctttttgaagatgaagccatccacactcaaggtgttttcgagacggcataa

SEQ ID NO: 75240 - DNA, 2403 bp, Mesorhizobium plurifarium
ttgggggcgctggcagtgcatattgagcttttagagattgccaatttcaggaagttattgtcgacgcgggttgatctttcgaccacgaccacacttctcgtcggagcgaacaatagcggcaagacctcggcgatgcttgcgctacgacgcttcctgtcgccgcgccgctgtccgttcgagatgcacgatttcacgttgtgccattggcccacgatcatcgccgtgggcgaggcatgggtagctgcccgtaacgcggaggaaatcatcgacctgatcgttgatccctgggttagcgcattgccgactttggacttgtggctgcacgtcgaagcgggggagatgcaccacgttcgtgacctcatcccgaccttggattgggaggggggaagacttggtgtccggctgcgctacgagccgaaggatctcgcgctgttgtacaaagagtacatgggcgcggtgagcgatgccgagacgatgagggcggcagccatcgcggccgctgcagcagagaaccccgacgctgatccgcccgctactccgcccaagctgacgatctggcccgagagtctgatcgatttcctaagcaagcgtttgtcgacgcatttcgccattagggcctattcactggatccgggtcagcttgcctctcctgcaaaatctctggcgaggccgcaggtccttccgggcggatctcggccgatcgatggcgacccgttaagcggcctgatccgagttcatgacataccggcgcagaggggcttcggtgaggagcagcaggccgcagaggaggatgatgtccccgtttcgacaagcggcagtcggctatccgaccagctcagaagctactacgccaaacacctcgacccgacgaagggcccgggtcccaaggaccttggcgcgttgcaggcaatagaagccgcccaggacgcgttcgataggcggctgactgagagtttcaaggcagcgttcaccgaggtcgagggtatgggataccctggtgtctccgatccgcgcccgcgcgtttcgacgcgcttgaaagctatcgacggtctcaaccacaatgccgcaatcagcttcgaggtagacgtcatttccgaggacggcgcgacgacacccgtgttgcggttgcccgaggcaaataacggcctcggctatcaaaacctgatctcgatgatattccggttgatgagctttcgtgacgcctggatgcgtgtcgggaaggcctcaaccggcgggacggtgaccacgaccgagcctctccatctcgtcctggtggaggaaccggaagcgcatttgcacgcgcaggtccagcaggtcttcatcaagaaggcttatgcggtgctgcgtgcgcacgaggatctaggtgacagccaaaagctgcgcacgcagctggttgttagcacccactcgagccatgtcgcgcatgagacgtcgttctcgtgcctacgctatttccggcgactgccagcgggtatggccgcgaaagtgccggtctccaccgttgtcaatctgtcggaggtttttggtccgggaagcgaaaccgagcgtttcgtgactcgatatcttcgggcacagcacgcggatcttttcttcgccgacgcagccattttggtggagggaccggcggaacgcacgctcgtcccgaatttcatccgagcgcactacgacgagctcaatcagtgctatatcaccttgcttgagatcggaggaagccacgcgcaccgtctcaagcccttgattgatcacctcggtttgctgaccctgatcatcaccgacctggatacgctggatggaacgggcggcgcctccgtccaacccgcgaaaggcgctggtcagaaaaccaataatgcgacgttgaagacatgggtgccaaagctcaacgaggtcgatgagctgatgcgagctgatgtcgggacgaagacacggcatgaggatgacgacccgctattcgctgtgcgggccgcgtatcagatcccgttgggtctgacgtccccgggtatcgtgggaccggaggtcgcatatccgtatacatttgaagacgcgcttgcgttcgagaacctcagcttcttctccgaactggatggcaccgggctggtccgtaagtttcgcgatgcgatcgtgaatggtggcggggcggccgcgatcggcgagaaaatgtacctcgctctcaagaacggcaagaaggccgagtttgcgcttgacgtgatggaggctgagaacttcgacaggatcgtcgtgccgcgctacatcgccgagggacttgagtggctactcgcacagctcaagagaaagcaggtggagattctgcctctggtcaaggaggcgccgtccccggaagaggtcgaggttaattcgtcggtcgaagagcatgtcgtggccgaagtcgaaggggccgactcatga

SEQ ID NO: 75241 - DNA, 1908 bp, Mesorhizobium plurifarium
atgagtgcggttgacgacaagtttgattccgaagccgacgaaacgatcctcgcctgcctgaacatcgagaaaccgaggagtttctttctctacgctggtgccggttcgggcaagacgcggtcgctcgttgaggcgatccgaacggtgtgtaaggagcagggccggcggttgtcgctatccggccagaagattggggtgattacatacaccaatgccgcctgtgacgagatcaagcaacgactcgagttcgaccctcgcgtggaggtgtcgaccattcacgcgttcgcgtggtcgctgattgctggctacgatggggacattcggcggtggctgtcgaccaggctccttgcggatatcgccgaacttgaagaagcgcaggcgaaagggcgggcaaacagcaaagccgcgtctgaccgggctcgctcgatagaaagcaagcggcgtcgccgcgagaaccttgcccaaattacgcgattcgtttacagccccacgggcgacaaccgtacgcgggattctctaagccacgcagaggtcatcgccatgaccgccgattttctcggcgcaaagcttggtttgcgccggctgctagtgacccgcttccccatcttgctgatcgatgagagccaggatacgagccggaggctcatggacgcgttgctcgatgtcgaggcgggataccgcgaggcgttttgcctgggacttttcggcgacacgatgcagcgtatctacgccgacggtaaggagcgtttaggggaggcgatcccgaaggcctgggccaggccgaggaagcggatgaaccaccgttgccccacacgggtcatcacgctcatcaacaaaattagacgagatgaggatggagagaaacagcagccgcgcagcgatgcggaacagggcgttgttcggctgttcgtcatctcgcaggcgatagctgacaagagcgcggccgaggccaccgtcgctgcacgaatggcggagatcaccggcgatccgagttgggcggagggagccgaagcgatcaagacgctggcactggagcacctgatgtccgcgcgccgctttggcttcgaacagttcttcgagcctctctatgcggtcgagcgcattcgcacgagctttctccaagggacaggcgcgggcgttggacttttcacccgagagatattaccgctggtcgcggccctgcgcgcgggagatcgatttgccgtcgcagcaatcgttcggcgcacatcgccactcctcgagcgcaaagcgcttgaagctgccggcgagaagcaggttgatattctcagcaaggtcagggctgcctgcgatggcctgctggctctggtgaacagagatgagaagccgaccgcgcgttcggtcttgcgctatgtcgccgaagttaacctcttcacgatccccgaggtgctggtcccgttttccgccgccgacgccgtcgtcgcggaagacgagattgacgcagccggtgatgctggcgaccaggaagaggaagtcgatatcaaaagcgagttgggcggttggcggttggcacttgaggcgcccttcgaccagatcgagcgatatgatcgctacgttcgtggcgtctcgcagttcgacactcatcagggggtaaaagggctggaatttccaaggataatggttgtcgttagcgacgatgaagcccgtggtttcatgttcgcctatgacaagcttttcgcgacgaaggccaagagcaagacggatcttgagaatgaagcggccgggaaggagacgaccatcgatcggacgcggcggctgttctatgtgacctgcagccgcgccgagcaaagcctcgccgtcgtttactacactgctgatccgacgctggcacgcgacgcgatgatacggcaggagtggttcgagcctggcgagatagaactaatcgcctaa

SEQ ID NO: 75242 - DNA, 1695 bp, Mesorhizobium plurifarium
ttgaaggacgtagtcataaggttccaatccggactgaatgttattgtcggccccaacaacatcggcaagaccgctgtcatcgacgcgcttcgctcgttgttgcccggcgcagatgatccttatcctcgatttgacgaagacgacctccatgcaccgaaggagggcaaagccacaggcgagatcgttttcaaatacacttttcgggacctaacgctcgacgacgaagccgatttcctcccggctctcaaacaagatgccgatggaaagacgatcgcggtcattggcatcgcatatggtagctcggaccggacaggtcgccttcgcccgagacggtggtgtggcgaccacgaagatgtgggcctaacggcaagcatcctcgagaacttacgaagcgtctacctgccgccactccgcgacgcctcgcaaggattgagaccgagccgcgctagtcaactatcgaggctcctgcaactcctgactgacgatgccggtagggcagagatcgctgacactttgaagaaactggacgacgaacttaggaaacataagcttatcgtcgatactcaagaggcagtcagctctcgtcataaatcgatgttggggaagacgctggctcaagagctcgaggttgggcttagtgccagtgattttcaaaggctggccgcacgactttcgcttctcgttgacgcgttcgaaatcgagcgaaacggtcttggttacaacaatctaattttcatggccgtggtgctgagtgaacttgccaagaacgccgacgctgcgtttcgcagtctaatcgtggaggagcccgaggcacatctccatccgcaacttcaggccgtccttctcaaatacctgtcgaagattgaatgcaagccaggcgagagggaggtgcaggttttcgtaaccagtcactcgcccaattttgcgagcatcgccaagctggactcgatcgcatgtctcgttaacgtgggaagcaaagttgaagccttccaccctcgttcagtgaaattcgagaaaggcaagcgggagaaactcgagcgctatctcgacgtcacccgagccgaattttttttcgcgaggcgcgttatatttgtggaaggagctgcagagcttttactgacgaatgttcttgccatgaagttgggagtcgatcttcgtgatcacggtgtgagtcttatcagtgtggaagggctgaatttcgattcctttcttccccttttcggcaagaacgctatcaaagtgccggttgcagtcattaccgacgcggaccctcaaaaagtggaagtgccgggaggtgatccgattgcgctctatccggaggcggctgatgttgttgaagtgtcggacaatacaaaggccatgatgaaactggaagatgattatctgaaggttttccatggagttaaaacctttgaatacgaccttgcgttgcaccaggcgaatcgagccgtcatgatctcggctctgaaggagatacatcctaagatcggagctggtttggaagtcgcaacagcagcggcagcaagcgatgccgcgaaggcgcaagccttgtttagaggcatgtttgagcgcgctcagaacaacgttcagaagggacgctttgctcaggctttggttgagaaactattggagcccggccgagaggttgtggtcccagattacatcagaagagcaattgaccatgcttgcggctga

SEQ ID NO: 75243 - DNA, 2421 bp, Mesorhizobium plurifarium
atgcttgcggctgaccggatgggcttgtctagccagcagaaagatatcgttggcttgccacttggggccgtctgcgtgactgcctgtgcggggagtggcaaaacccggaccgctgttcaccgtcttcacgaaatgcggacgaaactggacgatcctcacggaattgtggctttgctctcgttctcaaacgttgccgtagataccttccaccgggactattcggctgtggcgcaattgaacctgacctcgctccgaagtggcgtggaggtggatactgtagatgggttcataacgagccacattctgcggcctcacgcataccgaaccatgggtgcaaaccgcagtgcctacttggtcagtggtgccgagccatttctaaaaaacttcacggtgtgggacgggacgcgtgcatacccgacagctagtgttggcgtcagatttgaaaacggtactttcgtctactctgtaatggggggctatgctcctgtccaaatcccggcgcaggcggctgagactgcaatcgagaagctgggtagggttggcgcctatactcacagcatagggcgctattgggcctatcgagcgctaaagcgacaaccattcatcctgaaggcactcgctaggagatatcctcacatcgttgtcgatgaggcgcaggacatcggatcggaacatcaggcaatcttcgaattgctcattgatgcgggtgtgcacatctccctaattggcgacgtcaaccaaggcatctacgagttttccggtgcggacggcaagtttctcagcggctacggcaaacgcgctggcgttgtttcgagagaactgacgacgaactatcgttcggtgccgaatattcaagacgtcgccaacaagctatccggtcaaagagataaagcagatagagtggcgccagcagcgctgagcggtgcttactacctgacctacaagaaggatgggaagcaggcgctgctttcggcgtttcgtagtatgctcaaaggcgcagaacttgaagagagtcgtgctgcagtcgtttgccgatcgagcaaatgggcggaagagtggggtggcggtggcgaagccccaggtcagggtgttgtaaagatgttcgcccgctcaacgatataccgtgattccatgcaacgatatgatgatgcatttagaggagcattcaatgcaatcgtgggtttgttagctgaccagcatggagatcttcctcataagatggcacagccaatgcagtatcccgaattgcgactgttgcgccaacgcatctggaggttcgttcgggacccgcataccggtctgccttccggcaaaatgattgccaatgaagggtggcacaaagcgcttaaggaacgcgtcaaggttttgttggtcgaattggccaaggagttcggtctccaaagtggagaaaacctaggcaacaaacttgccagcaaagggctgccttcgacacctctcattagcgttccggatttggcagacgaagtcggccgaccattgcgcgtctgcactgttcatcaggtgaagggcgaaagcatcgacggggttatgtatattgcagacaaatcgcacgtgaaggcgctgctcgcgggtacaaaagaggagatcggacgaatcggctacgtagccgtcacacgcgcccgcaatctgttcgtactcgcaattcccgagaactccgccaccgaattcgaagcgggtcttagagatcgaggcttcaaaaaggccggcttagttaggcttccggcgataggcaaatcatcaactacgatgcagcccgtcaaacgtgctgtgtcgccaataggtgaacctcaagtttcctctgcgggtatgccggtcaccagcggggaacgagaaacgaaggatccaagtcaaaataccgagatgcctttctacgtttttgggtacggttcgttgatgtgggatgattggcaggccaagcacggcggaaacgttggtgtgcgggcctcgttgagcgactacagacgggccttcaacaaaccctcgacagttcgatggggaacgagtcaggcgccaggaccgaccttgaatatcgagcaggagcaaggtgccgtatgtgaaggcctaatctttgagcttcctggcaacaagcgcaaggcggtaatgatggaattggaagctcgcgaaggaaaaggttttgagtttcctgaactagctgtacgagctcaggacggccacgaaatagtggcggtcgtcccaatatacaatggatcaaataagatatctgtcaagaatatcactgaatttgcaagtatggtattgagcgcctctggcaaggagggtggctgcgtcgaatatgtaaagcacgtcgctgcccacttggaccaattggggattaatgatccggcggtcaacgaactttccgacgcaatcggcggaaagcaaacgaagaacattgaataa

SEQ ID NO: 75244 - DNA, 1785 bp, Klebsiella variicola
atgcggatttcccgaattcggttaattaatttcgccaacttctctgacgttgatgttgaaacgggtgagagtattgttattgttggtgaaaacaaggttggcaagagcaattttattcgcggcctgcagctgattcttgacccagggttgtctgagcgtgaccgtcaactgggttttgaacatttttgggatggattgggcgaagaaaaattgggggagaccatcgaaatttcagtggatcttactgatttcactgacgatccccgattgatggcccacctgaatgactgtgtccttaatccgggacctccgatggtggcccgtcttacctatcgctttcagcccaaaaccgggttaaatcgagctcctgagtcgttaaaagattatgagtatgtgatcttcggtggcgctgatcctgacatgcatattggtggtgcgtttcgccgtatgttacccatcgatgttcaaggcgcgttgcgtgatgccgagaaggatctttcaagctggcgtaattcacccttaagaccacttattgaagaactatccgcatctctggacgacgagactcgtgaggagattcaaacccaggttgatgaggctcagcaggaactggctaatcatgatgaggtggcagcaacagccgaacgaattagcgaacggttggttgctatcgcaggtgagcaacatgccgttccgctatcgttaggacttgcaccgactcgcgttgatgcgctactacgtagcctgcgcttgctgcttgacagtggcattcgtggcattggcgatgccagtctggggacggctaatctgatttttctggccctgaaaagcctcgaacttgatcgtcttgtcgatgatggagaacgagaccatacgtttttcgtagttgaggagccggaagcgcacctgcatccgcacgtacagcgtctggtgtaccgttatttcctgggtactgatggggggaatgatgatgaagggacgccgctgacaacgatcctgaccacccactccccacatattgccagcgtcacgcctgtcagatctatcgttctgctgcgttatgactcagaggacgagaaaacaattgctgtttcaactgcgaacgcaccgttttcgcggcgggacgaagatgatttgcagcgctatattgacgtcacccgtggtgaaatattcttttcacgtggtgtaatcctagtggaaggagatgccgaacgttatcttgtcccggcatttgccgatgctcttgatattcccctcgatatgcttgggatcacggtgtgctccatcggtggaacaaatttcactccgtatgtgaagctattggggccacacgggctcaatattccgcatgtgattctgacagatcgcgatcctatagcgggtagagagcctctggttcgtagaagacttatcaatattttaggcgtacttgagggagatgttgaccatgatgatatggataccgatgaggtgattgcacgtgctggggagtatggatgcttcgtcaatgagatcacactggagcctgagctgtttaccggtggattggccgaagccatgcagtcggtaattgagcgggaattgtcgctggcgcaagttaccctagatcggatacaggcatgggtggatgacacggaccagcttgatatcgtccggttgttgaaactgattgagcgaattggcaaagggcggttcgcccaggcgctggcaccttcggtgtcggaggataattgcccggattacattcgtgaagcactggagtatatctgcgatgccgtcacgtag

SEQ ID NO: 75245 - DNA, 1818 bp, Klebsiella variicola
atgccgtcacgtagtgtcagtgcagcctacttagctcaggctgccgagttggccggaaatccgggccagttagccgcgtatcactcccagggacactgcgtggtgctcgccgggccagggagtggtaagacaaagacgcttgtactgaagctggcccgaatcctggctgaggatgttcaagctccacgtggtgcggcatgtatcacatatagccaagaatgcgcacgcgagttaacccgtcgtctcgaagcgctggggctcagagaggcaccgaatctctttattggaaccgttcatgggttctgcttgcgccatctgttgatgccctatggacgacttgccgatctgccaatcccatttccgctgtcagtagtgtctcagcgcgagagcgaacggttacttcgacaatctggtgaccgtctatttggcgcaaaccatccctataaggctattgatctcggacggcatcgccgttcggtgttgaatcgcaatagcgttgcctggagtgcagaggaggagctcgctgcatgggccgaggcctacgaagcagcattgcgccagcaagggctaatagactacgacgatatggtgatattcggccagcgtctgatcattgagcatgattgggttctgcccctagtacaggcgaaatttccgatccttgctgtggatgaatatcaggatttgggcgtggcgctccaccgtatggttaaacgcctggctttcgagggaggcgtacgcttatttgctgtgggtgatgcagaccaatcgatttacggtttcactggtgccgatggtgcgttacttctagaactggcagacaggagagacgttgaaacagttcggctccagttgaactatagatcaggggcgggcatcgtcaatgcatcggagatggtgttgggtgaggttcgtggttatcgagcaaacgacccgaaccgccagacaaccattgcgttccagctgtgcccggatggtttggtggatcaggctgtccatgctgtcgcgcagattattcctgctgcgttggccgctaagccgggtcgaacgctgggtgacatcgccattctgtacaaggactaccgtgccggcgatgtggtggccgatgcggtgacagctggcggttttgattacattcgtgtggacaccgcagcaccttatcgcaaggttaccttgacgagctgggtggaggattgtgcggcatggtgtgctggcggttggcgtattgggcaccctcaactgcgcggattgatagaccgttatatagcatttcatcgggcaaggctggatgatgcatgcgcccggcgtaaggggcaggaattaactaggctgctttgggcgcttcgtgcagaccgacatcctgcgtgcgattttgtcgcatctttgcgcaacgatctcgttgattccctgctggcaactgagccgacgctttctgatcaggctgagcaactagatcgcatgactgctgcacttgccgaaggcggtacgttagcgatgttggatatcacgagcctaggtggtcgtgacggttcacctgagcacctcaatttgctgacacttcactcagcaaaaggttgcgaatatgacgtggtcatcatggtcggcttggatctggggaatttgccgtggcgcaatgaggcgccagagaagctgcgtgaaagccgtcgtcttttctatgtagggctgacccgcgcacgggacgaggtgcatatgctgtattccggttttgttgatggtcgctacggccctatgcgtctagggcgttccccatttctggatgaactggaggagcgaatgcgaggggccggtttacggtag

SEQ ID NO: 75246 - DNA, 1980 bp, Streptomyces albus
atgttcatcgagaaacttacgctggagaacttcaagtgcttcgggccgggccgcacctccgttggtcttgattcgggcgtcaccgcgttcattggtgcaaacggctcaggcaagaccgctgcgtgtgaggcgttgttgcgcttgttcggggtctccgcgaaggagcgagccgtacatgtagacgacttcgccgtccctgccgacgagactgttgccccggccagccgcgaactgatggtcgaggtggtgctcgtgttccctgagcttcacagcgaagcgaaggacgaaagtgaagcagaggccgtttccgagacacccgggagccagggcgaggcaccccgggccgtcccggagttcttccggcgcatggcggccaacgacgaaggcgacttgaaggtccgcgtcgtgctcagggccgaatgggtggacgacggcacggtagaaggggccatcaccgaaacccgggaagtcgtccaaacacttgcagatgattacagcgaggacgactgcgtgccgctgactcctgcagagcgcagccgtattcagatgatctacattccggcatcgcgcgacggcgtacgtcaggtgacaacgctcctgaagagccgactgtggagagctgcgcagtggtcaacgggcctgcgtgacctggtcagtgagaacgcgagtgaagtcgcgaggacgttcaccaacgaacccgcagtgcaagccgtcgaaggcgcactgaccgcccgctggcaggaactgcacgatgctggtgtccactctgaccccaaactgcggctccttgacagcgacttcaaccagctggtccgcggctccgaactcgttttcgagcccgatcggaacgctcagccgcgtccggccagcattctgagcgacgggcagcgctcgctgctgcaccttgcactggtagcagccgccctcgacgtcgagagcgaggtgtacgacggccagcatcaggacagcttcactcttgaagccgtccatctgccggccctgaccctgatcgtggtggaggagcccgagaacagcctttccccgttctacctgtcgcgtatcgtcacgcaactgcaggcgctgagtagtagcacagcgacgcaggccgttctctccagtcactccgccagcgtattgactcgcatccgccccgaggatgttcggcactttcgcacggaagcaactacctcgactgcagcggtccgcgcgatcaccctgcctgaggacgccacggaggccgggaaatacctgcgcgaggcggtacgcgcccacccggagctctacttcgccaagtttgttgtgctcggggagggcgacaccgaagaactcgtcattccgcggatcgcgcaagcccgcggtgtacacctggacccgtcgttcgtcgccatggtccccctcagcggtcgacacaccaaccacatgtggaagctactcaacgacctagccatcccgcatgccaccctgctcgatttcgactacggcaaggagggggccggaccagctcggctccgtgatgccttcagccggctgatggacaacgggctggacccgctgaaggagcttcacgggtacgacaacgtcgacgacatccacgacggcctctccgcggaggcactgcaaactgtactggcccacctgcgcaccttcggcgttttcttcgccacccccctggacctcgactacagcatgctgatgtcgttcccgtccgcctatacgcacctcgaaccgggcgagcgcggcccgggctccaccgaccccatgcccacggtcttcggggagaacggcaccgaaccggcctactggggcacagacgtaaagatcgaacggttgcgctggtatcgctatctcttcctttcccgctcgaagcccagtacccatctgagggccctcggtcgcctgactgacgccgagctgaaatcagacgcgcccaaggtccttgctgcgcttgtgcgatacatccagcaggaggctggcctgtga

SEQ ID NO: 75247 - DNA, 1926 bp, Streptomyces albus
gtgagcggtccgggtgcaagccgcgccaagagcccgaacgccacaagcctggtgccggccgatgcgtggcggccgatcgggatcgaggacttggagccggtggcttgggaagcgcttcgggacagcggcaatgtggcggtcgtggccgggcccggcgccggcaagacggagttcttggcccaacgcgccgcctacttcctgcaaaccggtatctgcccgtggccgcagcgcattctggcgatctcgtttaagagggatgcggcagtcaaccttggccgccgtgtgactgcacgcgttcccgaacatggtggccggttcgtctcgatgaccttcgatgcgtttaccaaaagtctggtcgaccgcttcgcggcggcgctgcccgctgactggcgcatgaatgatgagtacgagatccgcgcggcgaccggggtggaggtgaggagcttcctcaacgacctcgctttcaccgcgccgcaacccctgacgcgggaagtcgcccggctccagcccgcgcgtttcatgaccgacctcgtcggccgctggcgcttgccaacgacgatcccgatcggcgtcgagatcgacgccacgtcctacgccgtgcgcgagtggtggcgtgcccgctacctccggccgggaaagccgcagctcgacttcgtcatgatcaatcggcttgccgagctgcttgtccgtgaagtgacgcaactcaggcgcgctttgcgtatgacctatccgttggtgtttgtcgacgagttccaggacaccaccggcgcgcagttttccttcctcgcagcggtgttcggagaaaaagccgcggtgactgcggtcggcgataccaagcagcggatcatgggctgggccggagcacttccccgggcggtgcaacgcttcgccgaagctttcgatgccaccagctattcactggcctggaatttccgctctagtgacgcgctcgtcgagctgcagcatgtcatcgccagcaagctggagcccaacacagtacgggccacttccaaggccacggcagaggacggtcatgatccagcggcgctgtggaccttccgcagccccgaacgagaagcgaccttcatcgcagactggatcgcccgggacatcgccaaatcggaccgaggaccggcggacttcgcactcatcgcacgacagaagatcaaggactttgagccgctctttcggtcccgccttgctgcccattgcatcaagctccgcaacgatgacgcccaggtcggcaagatgcggctgcaggacctactcaaaagcgagacggcccgtctcctgatgggggtattgcgtctggcccagcacccccagggtttcgcctccatttggcaggacgtctcgaccacactggagcgcgtacacggagccgcagatgacgatgtggctcagcgccgtgtcggcgagcacctgacacaggtgacaggaaggctgcggacctggctgcggtctcactctccgatgacaacgccggccgcggacgtggtgcaggagatgctggacctggtcgacagcgctgcgctacagcgatacatcaagtccgccgtgccgggagaggacttcagcctcgtcaccgacgcattcgccgcacgattggaggaggcgtccagcagtgccaccaactggggggaggcacttgacgaatttgagtgcgctgatgctgtcgtattgctcaccgcccaccgcagcaagggacttgaatatcacaccgtgttctttctgggcatccatgaaaggcagtggtggtcctaccagaatgacccgcgcgagggaacgtctaccttcttcgtcgggttgtcccgggcagcccagcggttgatccttactacggatcgagtcgactcgaccggccccctcgccgcccttttcgcgatgctcaaggaggcaggggttcccgaagtcgcccaggactag

SEQ ID NO: 75248 - DNA, 1956 bp, Streptomyces albus
atgcggatcagtcgagtccttgtcgaaaactacaggaacttccggaagctcctgattgatccgtttccgccttccgcggtcatcgtaggtgagaacggcgtcggtaaaacgaacttcttgcgggctttgcgtatcgtgctggaccccgatctgcctgactcggcgcggtggcttcgtcctgaagatatctgtgaagcctctgcagccagctattcagatggcgtcagggttcgcattgaagtcgacatcactgatttcgcaggggagctcgcagcagaagcgtcgctggacggctgcttcgtcagccttgacccactaactgcccgcctaacctatgtatttgagccgctggcctccgtggcggaatctgctggaaggcagctaactcgggacgattacacgtgggatatttcggcagggattgacggagaccgcgatggaaagcggattcgtcgcgacatcaacttcacggtcttgcaagcattgcgtgatgcggtaggcgacctgtctaggtggcgagactctccgctgcaagacctgctcgaattgcggcgtccgcagcaggctgcgttgactagcactgctgaggaggtcgcgacggccatggaaactctggcccgggagccggagatcggtcggctcgctgaagagttgtcgaaccgtctcacgtctatggcgggtgagcgaaccgatatcgctccgagcttcggttttgcctcgagcgatccggaccggcttattaggtctatccggctcttcgtggatcgggctgggacgcgaagtgtctcggatgcatcgactgggaatgccaacattctctaccttgccttgcttctggaacgttctcgactccgtaaggagtcaaatgcaatcgttgacacaattttgggtgtcgaagagcccgaagcgcacttgcaccctgtcttgcagcggcaagtcttcagtcaccttcttcataacgaagcgtcgctgatggtgacaactcacagcccgcacattgcggcggtgtcacgattggattcgttgatcctcctgcggaagaccgctgacggatctaccgcagcgtcttatacgtcacgtgccgatttctcggccgacgaaaaagaagacttggaacgctatctcgacgttagtagggcagaactgcttttctgctcagcggcgatcttggttgaaggcactgctgaggtttacctggtccctgctcttgctcaggccctagggttcaacttggatgcctacggggttattgttgccaatatcggagggacggatttcctgcccttccgccagttgctgggcgaagactctctgaatattccccatgtgatcctgactgacggagacccaaccaacaagaaaggcgaataccttcactacgggttgagtcgggcagccaagctgatgcatggtgctgccgtcgatgagttcactcagagagtggaagagttcttggccaaggatcctgagtccgccaccctggatctgagactggaagccgccaaggtgggcgtatttatggggccgaagactctggaagtagacgtggccccgttgctgggtccgcacatggtcaaagcgcatgaccagttcaacgatgtttcggagaatctcaaggaaaagttcaaggtggctgtcgacgggctgaacgatggggactcttcacatcagaagcaactgcttctccggatcgactccatcagcaaaggccgctttgcccagcgcttggctcaccacgtagagcaggatggattggcgagcttccgtgatgcgatgtgtggacaggccccttcggagttgttgccgtccggaaacgcctacaggtttagcgagcagttgttcacggactcgacctacggatacttgatcagtgccctggacaatgtgtcccggcaggtcaggaaccatggcctgttcgaggtaaagccggcgcttcctggcccggaggcccagtga

SEQ ID NO: 75249 - DNA, 1875 bp, Streptomyces albus
gtgaccaaagatctaagggtccgtccagttctcgcgcgcgagatactggcgctcaatgaagaccagcaacaggctgtcacgcatgacggtgatctcgtagttctcgctgggccgggatcgggcaagacgcgcacgctggtggctagagtcggataccttcttgaaacggcgaagtcgagcagccgtggtgtggctgcaattacctataccaaccacgccgccagagagattagtgagcggctcgcaaggttggggatctctgcgagcggcagattgacggctggaactctccactcttggtgtttgtcaaacatccttcgcccctactcaaccctagtcggcaggtgccatccgaatcggctgactgtcctcgacgacaaatccaaggagtgggtgaacctcctggaagagtgcttcgagcgcgccggcgtaatgcttattgccaagtatgagatccccgccttcacgaaggcgcgacgtcgcctcgcagtcggagatgccggagagcccggcgatccgatggtcgacgctgtgcggatatttgagaacgagatgagcgacagaggttttatcgatttcgatctgatggtctcaagctctctctcgctactcgtggagaatccacgagtagctcaacttgtcgctgcgaagtatccgtatattgtagtcgacgagtaccaggacctggggccagttctgcacggactggtgacttttctcaatgaggcggctggcatccaggtctccgccttcggcgatccagatcagaccgttatgggtttcactggtgccgacccgcgatacttgaatgagctcacggaaaaattccaccctgtcacgctaaaggtaaactatcgcagtgggcgagcgatcatcgcagcgagtcatgctgtccttggagagaagcgtgaccatcgagctcgcgaggaccgcgaggaccatggagtgatcgagccgatcgaggttcgtagcgggctgcgtcggcattcgcagatcgtggtccagaagatttctgagctcactgcttcgggagtgccggcacacgagatcgcagtgctctatccgcgtaagggtccgctgcttacatcgttgcttcgcgagttttccgtcggatctgtcgattatattcatgagcgggatgggctacttccctccggtccggtagctgatttcattcgtgcatgtgccgcaagagttgtatcgggttaccagccgtcgatcggcagggagtcatccgcagacgctgttcaaacggttggcgagctcgctgctacatacagggcccttcgacgggacggcgggctggaggatattccgcacaggttcgtatccaagcgaattgcctcccttgttcggctgaactcatcaagagagatccccgcgaccctagaatggcttgatgggctggttgaaaatctagagttgagtcgactcgcgcaggctagtccgcgccgcctcgacatcaacagcattgaagacttcaaagaatgctgtatagacaacgctctgactcttgtcgatatttcggcgggcgagctaaggactggaaaggtcgctctcactacgtatcactcggccaagggtagggaatggcaagttgtgattcttccgggtttggtggatggaatcatgccgagtagattctgggatcgaaagaggaagctatttccagagccgccgccgggccggctcaagcaagacaggctgacgttctatgtgggccttacgagggcgaagagtgctgccatcctcctatacggcgaccactgggaaacggactggggcgggaggaatacgctgggggtttctcgttttgcccgtgatgtgttgactcagctatccgcctctggggattcgctgagccctcctcgatga

SEQ ID NO: 75250 - DNA, 1917 bp, Pseudomonas fluorescens
atgtatttacgtactttagatattcacggtttcaaatgcttcggcgagcctttcacgattgaattccacgatggtctcaatgttctggtgggtgagaacggagccggtaagacaggtgtcattgcagccattcgccagctcttcaacgactccgaatctggcaaacgcttgatcaacgagagagattttcatcgggggtttcatgaggcagcagtagcggcacaaaggattcatatccaagcgaccttttctggcctggatgagaatgacgctatagctttcagggattggtgcggcaacgaagatgaggcaaaactcacatttaccgcgctcaatgtggaatctcgggggcggttcaaaagccagctttacggcggttacgcacgagctacagcgctggaaactgaaatccttgaccttattcactgtatctacttaccgccactgcgtgacgcagaaacaaagctccgggatgggcgtcagtcccgtctagcccgacttctgaaggcgctctgccgcaaggaacttgatacagctcgtaaggagggtaaaccgcatccgttggaggagcgagttggcgcgttcaaccaagagctttccgcaagcgacgactacgcaatcaggcaagcgaatgaacgaattgggaatagcttgagggcagcattagggatgcagctgtcccagaacacgctcattcagttctcggaagtgagcttttcgcgcatcgttgaaggtcttcgtttgctttactacccgaacctagcagcggccgacgctacgcagttccggtctctggaagaaaacagtcttggctacaacaatctgctctacattgcttcgattctggctgagctcacgctagaagttgaggaagagcggggggaagaaacctacttgcggcttctgttaattgaagagcccgaagcccaccttcatccccagcttcagatacgtctactgaagcacctcagctctgtggctaaagaaaaaagtatccaggtaattgtaaccacccattccacggtcatttcatccgcagtgtcagttgatgaaatcattcatctctcgaacaaatgcaccccggtcgcgatacctctgcggacgtgtggactcccagagcccagccgaaaattcatcgaccggtggctcgatgtcacgaaatccaacctgcttttttcgaaaggctctattttggttgaaggcatagcagaagcgatggtcatcccagagctggcacgtagagtgctcgctcagtacggcgacggcgaaaacacactggaggattacggtgtgtccgtcacaaacctaggcgggatctacttcaagcatttcatgcagctcttctgcgacgtgactgatgaaagcgcaggggagaacttgcctgtacgctgcgcgggtttaaccgacaaggatccaccccaaacgatcaaagttgatgttgacggtgggaaacaggtggcagttgagtacacgccgcacgacgacgatttgagggatggtgagaaccatgctctcgcctacattgccaagattggacagtctcagttcggccgcctttacgcaggtcagtacaaaaccttcgagtacgatatcgctatggagggcgcgaacctacgtatgatgctctccctagctgccgatctctggcctgcccaggaaggaacggtagctccagagctgcgagaaagagcgaagcttgcttttgacgacatgaaaagtcccgagcgagcaggacatgcggctgagctgttatatcgcatcgattccaccagtattggaaaaggaatctatgcgcaggcttttgccgaagagcttgagaagcaggaaggcgaattcgtcgtaccagcctacatccgtgatgccattctttgggcttgcggactcgaggagcccccgctcaatgatcaagctgactga

SEQ ID NO: 75251 - DNA, 1755 bp, Pseudomonas fluorescens
atgatcaagctgactgacgagcagaaggcttatatcggcgcacctatcgatcagcatgtgtatctcaacgcttgcccaggcagtggcaaaactgaggtcgtcgcggccatggtggccaaggtcgttgaagagtggactcgcttccctagcgggatagcagttttgaccttctccaacagcgcaacggacgagctcaaaaacagattggttcgctatctaggagagccgctggggtttcctcacctagtgtccaccttcgatagctttgtccactcccggatggtcgcaagcatcgcaagcgaggttactgaatttccagggaaggatggggacagtcggatcaggatcttggaaaacaaggccgacatattccacactcgaaaaaaaatctgtggccgttcggtctccgcctgtaagtataactacgacctagagaccaaaggtttcacgttctcgaccggcgagcggactagagataaacaactcaatgacgctccaatcactaatgttgccctggaagatctgatcaacacgaagaagcgcttctgggcagcaggttttgcgacatacaaagatgtggacatgattgccctggcggcgctcaagaggccctctcttaaaagctatttccagtgccttgcgaagcgatttccactggtcattgtcgacgagtgccaagacctgtcagcagagcacctggcgatggtacggaagctccatggccttggcgttaaattccatttcataggcgatttgaaccaatcgatctacggattcagaaaatctaatccagataatgtaaaggcgctcctcgccgagctcggtttcgctgagctgccactcacagcgaattggagaagcgggcaatctatagtggatctctgcagtgatttggtgcgaattaaacggatctctggcaatcccgaaatcgcgccagttaagccgcttttgctgcagtatgcgaaatgtccttcagagcttattcctaaaatcattgagctcaccaatggttatgaagatgttgtcgttgtcgctcgcgggcacagcaccttgcaacggtttcgcagaggcgacagcttcaagggcgttgaaatgctggcactggcatgcgttgctgccagtaatggaagcaacaaggacttgaacgtcgcggtagcactattcgctgaatggttggcggataggctctccctgcaagccacaagatcaggcccccattgtccggtagcaatcgagtccaagctcgactggcggaaatttattcatcaatgcttgaagcacttggttgttgccggcgctgcagatacgaatctaacgtggaaggagtgggcggcagtagcgaaaaaaaacctgcgtaatttgcccgatcaggctttcgtgttggatgaaatcagcggtgatcttgagccgcttagggggctggagcttcgatcacccgcaaagcagggtggcatcgcactttccgtccgccttaaccaagcggtggctcagcaacctgtcgcagatgttctacgctacgagaccatccatcaagtcaaaggcgagacgcacgatgcaacggtggtcgtgtcatcgcttcaaaaaggcattcacctttcccattggaaagagtggctggccagccctacatccgaaggcgcgaggttcgcttacgtggcgagttcacgcccacgccacatgcttatctgggcagtgaagaatctgaaggccgatgagattaaaacgcttactgggttaggggttgaactcgtctga

SEQ ID NO: 75252 - DNA, 1923 bp, Pseudomonas fluorescens
atgaagctgtgcagtctgcgggtgaataatttccaatcctttgggcctgaaggggaagaggttacttttgaggacgtgacctatttactaggccctaacggggcaggcaaaacagcaacgcttcaaggcctctgtcggatgttcgcgtttgaaccgaatctgcgacgtatccgccgttctgacttccacgtcccggcatctgaggaaaatccacctgagcaaagggagctttggctggaggccgatttcagctttgaagaaacgcaggacgatgaggacgcagataccgttccagagtttttcaatcagatggccctacgcaccttcgacgatgtgccacgagtacgctttcgtttagaagcgacgatgtacgaggacggtgaaatcgaagagcgttttctgtttgtgacaaagacagacgatgcaggcaaccctacatccaccgcatcagttccgaagagacatcgagacaaaatccaccttcattaccttcccgcacgccgtgatccatctgaccacgtggcatatggcgccactgcccttcttggtcggttactgcgggcagccaactggaatgacgatcgcgaaactgtagcagaactgacggagcaaattaccgagtgccttacaggcaataagtctgtgcaagcgttgagtgatagcctgagcacagcttggcaaaaattgcacaggggcgacttctttgcttccccgcgattgacgtttcaaaattccgaaatagaggctttgctcaggcatttatctgtttcgttcagcccaggtcatggtgaaaaccaggtggattttgtacgcctgagcgatggacaaaagtccatgctgtatctgtctcttgtgttctcagcactagcgattgggagggaagtcagatctggcaaaaacacctcatttgacccccataaactcaagccaccagcgttcacgatccttgcggtagaagagcctgagaatagcctctcacctcattacctgggtcgtatcgttaactccctgaaatcctctgtaggtgttgatgctcaagcgttgattgcaacccaagcgccgtcgatgctgcgtcgagtagagccggagcacatccgttaccttcgacttaacagcaatcgacaaacccgagttacgaagatcttgctgccgcccaaacgcagtgatgcttacaaatttgtgagagaggctgttcaggcgtttccggaggtgtatttcgcaagactggtcgttttgggtgagggcgacagcgaggaaatcgtcctgcccaggatccttcaggctaagggggctcctgttgacgaatttgcagtaaccatcgcccccctagggggtcggcacgtgaaccacttctggaaactcttatcggcaatcggtactccctacatcacccttctagatctggatactgggcgccatcagggtggctggggtcgtataggttacattcgagatcaattcgatgcgcatgcacctcacctcaaccttccacaagattggattcggcatgcctgggacgatcccgagcgacctataaagtcccatcactttttcaacaactgcacagttagtttgttcgcagaactcgaaaagcgcgatgtattttactccgcacccttggatttagattttgcgatgctagctgcctttcctcaggcatatagagcagaagcgtttccagctactgcaaaaaaccttacatcagtgctcggcgaaaaccatttcaaccccgggcaatacgatgacgtagagcaggcttggttcgctgcttaccacaaactattcaaactgagcagcaaaccagctgcacacctggacgcgcttggaagacttactgatgagcaactccttgcctctcttccggaatctctcgaccgactagccgacagggtgatagcaaagctggaagaggcgcctgaatga

SEQ ID NO: 75253 - DNA, 1683 bp, Pseudomonas fluorescens
atgatcaatccagatcggtgggctccttcccccgggattcgcttggagcaaaatgcttgggaggtgatacgggagtgcggaaggtcagtcgtgctaacagccgggcctggagcaggaaaaactgaagttctcgctcagcgtgctgacttcctactgcgcaccaacaactgccgataccctaaaagaattctcgctgtatcgttcaaaacagacgcgagtcgtaacctcaagcaacggatacaaatgcgttgcggcgtagaacatgcatcacgcttcgatagcgtgacttttcacggttttgcaaagcgagtcatcgataaatttcggcctgtattggtggaagaagcactagaccaagattacgtaatcgggcccgagtacgtcgcgggaaaacaaataaccttcaagcagctcttacctttcgccttgaaaatcttgaaggacagtgaggtcgcccgcaatgcgatacgcacgacctattcccatgtgtttctcgatgagtttcaagactgcactggcgaccaatacgaactcatcaagctcctattccacgatacctcgacaattctaaccgccgttggtgataccaagcagacgatcatgggttgggcgggagcattggatggaatattcaaaacctacgctgacgatttcgctgcccgccctcttcgactattcctgaacttccgctctctacctcgtttgctgcgcatgcagaacgatgtgatccgagagattgaagctgccgctgtgatgcctgacgatctcgtggatggtgacggcggggacatactcaccggtcacttccgaaactccgctgaagaggctgaggctctcgcagaaatcattcagcactggatagttgaggagcgcattccacctaacgaaatcgcgatcctgatgcctcgccagatagaggaatatgctgaagcgttgatggagcaacttgcgcgaaaaagcataccgtttcgcaatgatcacgagctacaggatttgcttaaggaacctgcagtaggtctagtggttgactacctaacctgcctatacgagcccgggcagtccgaggcatggtcgaggctgatgtcgcaacttgctccgtttgaagacgacgacagtaaaagcagcgcaccccagatattcgaagaattgtttcggtctcacaaaagacaagtcgccgccgacagcaaaacccccactccgtatgcttcctggtggaagctcgttttggcactgctaaagggattgagcgcatctgacctagcggccttctcgcccgactaccaatcgcgccaacgtctaactgaggtcgtacacgacgtccgagaccgtatccgagcccagattgccgaagagccgaatctactcaaggtattggcgggattgtccgatagcgactccgtcagactcctgacaatgcacaagagcaaaggattagagttccactctgtgattctccttggagttgaaacacaggcgttctggggcaagcttgcagaagagcgatgcgtttttttcgtaggcgtttctagggcaaagcagaggctcgtgctgactacttctgagctacgccctcgacccaagagttcaaagaagcgatgggacgagcgaaggactcagcacggcgagttcgttagccacgttgcgaggcatcagacctgctcgctgcatgcgtggaaaggctaa

SEQ ID NO: 75254 - DNA, 1794 bp, Pseudomonas sp. W15Feb9B
atgcagctcacgcgcgttgctatacgcaatttccgcaactttaaggatcttgatgtccccctcagcggcaacctcgttgtcgtgggcgaaaaccgtgtcggcaagagtaatctgctctacgccctgaggctgattttcgatcccggtctcccagacagtgctcgccagcttgggcaaggtgatttttgggacgggctcggtgagcctctagaggacgaaaaaatcacagtcttcgtggagattacgggctttgaacaggacgtcgatttactcgccgttctgacagactttcgtttaaacgatgatccggacaccgtgcgcctcacctatgagctcaggccaattccaactttaggtcgtttcccagcctctgacgaagattacgagttcatctgttacggcggggaggtagaacggaaacggttcggccatgatgttcgccggcgtatttcgatggacgtgctgccagcattgagagatgcggaaggcgatctagcaatgtggcggcgttctccgctgcgccccctgatcgaacgagctttcgcggaggtggggcgtgacgagctcaccgaggtgcaggcgacgattcgggcagctaccaatggattaaccgcgtttgactccgttcaagcgcttgagcaaaacctgagctcgatgtatgcgtcaatgagcggacctaaacaggatatcgaaccccgcttgggctttagcaccatagacattacgcgcctctatcgaaacgtaaagttgctcatcgatggcggtttgcgaaccatcagcgaagctagccttggctcggctaacgtgctgttcctgagcctcaaaacgctcgagctgcagcagttgatgaatgaaaatcgccgtgatcactccctgcttgccattgaagaaccggaagcacatctgcacccccaccttcagcgatccgtatatcggcaccttttcgaggagctcggaggcgaaggcaatgaagatcggctgtcgatcttgttaacaacgcattcaccccacataacgagcgtcgcgccacttcgctcgatcctgttgttgcgcgaaaccccgcataacggaaccgtgggacgttcgtcggccgccataaatctgagtgacaaagaggaggaggatctcacccgatacctggacgttacccgagcagagatgctattcgcccgaggaattattttggtggaaggcgacgctgaaaaattcctgctgccagtttttgccaaatcccttgggcatgatcttgatcatctcggaatcacgatttgctcggttgcgggcaccaatttccagccctacgtaaaatttttaactgcgcttgagatcccattttcagtaataactgactgggatccgagaggtgggaagaacccccttggcttcaatcgagcgcttgaactggtgaggaccatattacgcattcgcagcggtagagagcccaatcgcataatcgccgggcttaaggccttgagctatggggattttgagatccagtgcgacggatacggagtgttcacgaacatcgatacccttgaggttgatctgttcgacgacgatttcgttgcccctatcctcgccactttgcgcgaccagtccctaagtgttgaacgttcgacgtgggtcgatgattgggaacaggatccaaaaacactcgatattgagaactatctcaagcttattgaggcggttggcaagggcaggtttgctcagcgattagcctctcgcatcagcggattagcgccaccacgttacatagaatcggcgatcgaatacgtggtgcaacgtgtctga

SEQ ID NO: 75255 - DNA, 1788 bp, Pseudomonas sp. W15Feb9B
gtgtctgatcgcacagcatatctaagtgctgccgaagggcttcgtgctaaccctggacaatgggctgcttatgagtctcgtggccattgcgttgtccttgcagggccaggaagcgggaagacaaaaacgctcactaccaagatggctcgactgcttgctgaggatgttgcagaaccacgcggaattgcctgcattacattcaacaacgaatgtgcccgggaactcgaaaatcgcctgagcgatcttggggttgaggcaggcggtagggtattcatcgggactgtgcactcattttcgctgacccaaattatcctcccgtacgcgaaagtcgccaagctggggctgccggatgaatttactgtcgcagctaagagcgagcgtgctcaagcgctgcgcatcgctctagaggcaattggcgaaaaccctgaatcgttaggggcctgggagtttcgcatgaacgactaccggcgaaaaatacttgatcgcaatagtcgtgactggctggaaatggatcctggccttgcgcgcttggcagaggcgtatgaagaacaattgcgcgtcatgcacttgatcgactatgacgatatgccgctcctggctttgaaagcgcttcgcgaaaatgaatggttacgaagtgctcttctggcaaagtatccggtgctcatcattgatgaataccaagacttgggtagtgcgctccatcgcatggtgctcggcttgtgcttcaccgcaggattgcggttattcgcggtaggagatccagatcagtccatctatggtttcaatggagcaaggccggatttgcttcgtcggctttccgagcgacccggtgtcgaaacagtccgtttacgacttaattatcgctgtgcgacgcggattgtagctgcatcagggactatcctcggggaggcgcgcgattatgaagctgtgtcgggcgcaccgcctggagaggtgtattttcaccctctatggggcaggtacgaacaccaagccacgacgctcatcaacgaacttattccgcaagcgctggccaggcatcctcagcttcgactaggggatgtggccattctctacccggcagcatggctcggggacactttgattcccgcaattcagcaagcaggtttaccgtatatacgaacggataataacgctctctatcctcgctcgagtcggctgatgcagtggttggagcaatgcgccaaatggtgctgcggaggatggcacgctggtaccccgctcttctcgcggctcgcaagcgacggacggcgtcttttttcagagatcatccagtcggatgagcagaccacagactttcaccgacagctgatcagcaagttatgggcaactcgggacgagacgacatctctgctgcaatggcttgttgaccttcgtacccatctacttgcgcccttgggcgggaaatgctccgagctgagagacgaattgacgacattggcgcaattcatcgatcgcatctcgcctggcggcgatagccatggcatgtgtcttggtgatttggctggccaaggcgaagggccaggcagcctgaacttatcttcgctccatagcgcaaaggggcgcgaattcgccttggtttttatgtttggaatcgacgttggaaggcttccgcgcgctggcgacatggagcgagaactggcagaagcacgccggcttttttacgtagggctcacgcgtgccaagaccgagatccatctggtccacactaatgggcgtgcctctgaatttgttagagagctgcaacaacgcattgaagctggcacctga

SEQ ID NO: 75256 - DNA, 1887 bp, Bacillus pumilus
atggatattctgatagaagagatgagaataaggaattataaatgttacgaatcggttgatgtaaaatttaaagaatcttcactcattttaggtgcgaataactcaggtaaaacgtcattattagaagctttaaaattgtgttttacccgttatagtaaagtagatgaagaattgattttcgttagaaaagacgaagaattaacaaaagataaaaaaataataattgatgtcttaatatcttctgttcatgaacaatttaatgatgcatggtttgatctgtttggagctctgattattgaagatcaattcgatgacaagcagtgtgtggcattaagaactattataaaatacaatttccaaaaaggagagtatgatttagaaaggaagtccttaaatgtttggccaaaatctaatgaagttcatgattttgaggattttaattcaaattctgtaactagcgaagtagttgaatctattccagtattctatttagatgctaaaagagatatttcagctgaaatgggagataaatattcatactggaataaacttgtgaaagatgtcaatttatcagatgacaatttaaatatattagaagagagtttaaatgaaataaatgacaatatcattgagaatagtgatgtcctcaaacacttatctactaaattaaacaatttaaatgatgttttagatactggaagtaatagtgtcgaaattaacccagttactaggaagattaaagatttaaatagaggtatggagataaggataaatgataaagattccgaatcgttcttaattaataatttaggtatgggaactaaaagttgggctacatttctaacactggcagcttatattgaatggaagagtaaagagatgagtgaaaatgaaaaaccgtttcatccgttacttttactggaagagccggaagctcacttgcatccacaagctcaaagaaaaatatacaaacaaatggaaagtcttcaggggcaaaaagttattagtactcattctcctattattgctactcagcctagtttggaagatttcatccatgtttacaagagaagggattcatccagtataaattatataaatctaggtgatttaaatcaaaacgaaaaaagaaaattaaaggaagaagttttaaaatcaagaggtgatattctatttgcggatacgattatattatgtgaaggagaaacagaagaacaagctctaccaaaattttttaatgaattttttgatcatgaaacttttgaattaggtaccaatattgtaagtgttaatggatatggaaattacaaaccatttataagaattgcacatgatttagatattgatttatttattcttagtgatggtgaattaagagtgataaaaaaagtaaaaagtgattataaagatgtttttaaaacttctacagatgaagatttaaaagttcatataaaatttttacctaatgaagctgattttgaaaaatatcttattgatcaagattataaagaagaattatcaaggattatagataatttaaaaggtaaggaatcttttatagagagctatattgaaaaaaatagtgggaggaagaatgggaaacgaaaatctacaaaagagaaatgtgtgtcctgtcagcagtttatatacaaagcagaaattaaagattacagtggtgaggctggctttaatcaagctttattagattgtttagatgattgtaaaaccgaatactctgccataattggtgaagagattctaaaaagacaagggatagatagaataccacagatcatccaagagttatttgaatcgattgcaaacaaaaaaggttacagtattaaagaagaatttaaattaaataaaaatcaggagggaaaatcgtga

SEQ ID NO: 75257 - DNA, 1839 bp, Bacillus pumilus
gtgaagctaacagaaagtcaaaaagaaattgtagaatttctagatggtccattacttgttacggcaggacctggtagcgggaaaactagagttctaactcaaagaatagccaatatcttagagaagcgtaaaggaaaagtactagcattgacttttagcaataaggcagcagaagagataacggaacgagttaatagccaaattctattagaagatttgaatagagtccaagttgaaactattcatagttttggattagatatcattactaacaaagggcatctaattggattacctagtagattgtctgtaatagaagagacaaaagacaaattagaattaataaaaagagtcttcttagatgctaataattctatgccggatgataaaacgttaagagaaacacttagaagaatacaaaaaaataaacagcaatttatttcacctgaaatgattgaaaaaaaggtagacaacatagggtttataaatatttatgaaagttataataacttattattaaataatcgagtaatagattttgatgatatattgttctactcttttaaaatcctagtagaacgaccaaaagtagcttcaaactatactagactttataaatacattttagtagatgaagcacaggatttaaataactcacaatataaaatacttaaagcactaacaagaaatttctttaatataatgatggtgggggatccagatcaatcaatttatggatttaatggttctgatagtaatataatgatggggaaattcactaatgatttcaatcccacgatttattcattaaatgaaaatttcaggtcaacatcaaaaattattgaggcagcaaaaaaacttcaaccaaaatcaaattcacgagcagttttcccgttagaaggagttttagaagttattccttttgaagacgaagttgaagaggctgagtggattgttgagaagataaattcaataaaaaataatggtagtccatggttggatgatgaagttaaattagaaaacatagcaattatagggagaaataaatacctttttaaaaatattgaagaaacttttaaaaatagtaaattagactattcttttgggaattcaacaacaaattctgaaagtgaaacgatagagatgaaaatatttgaggctggaataagagtattaatgaacccatatgatgatttgcattatagtaaagtaaattcttatttatctagagtagataatgaaaacgatgaatttcatttagaagatttacttaacaatgaagaggtaaataatttagatgtaaatgtgaagatatttagttctataattgaagcatggaatgtattgcatgagaataatgataacttcttaaaagctttaagaattattgaagaaaatctcaatgaaaaaataaatgatgaaaattttttgttcttaattcaaaacgatataaacttatggaagcatcgatgggaaaaatattgtaaaagtacagtaaaaggagataggagcttgtcttactttagaaaccaagtatctttgggtaagatgaataatgatagtagttcaggagtctcttttttaactgtacatatgtctaaaggattagaatttgatgtggtttttataatcggattgacacaggggacttttccggattaccgcgtaaaaacaatagctcaaaggcaagaagagttaaataatatgtttgttgcagttactagagcaaaaagggaatgttatttaacttatccaaaaaataagatgatgccatggggcactactaaaagacaacagccttctgaatatctatatacaataacaaaatcaaatggataa

SEQ ID NO: 75258 - DNA, 1893 bp, Sulfuritalea hydrogenivorans sk43H
atgcaggtcacacgtatccatatcgagaattttcgtggtgtgaaggacgcgaccctcgatttcaccaagcatgcggtacttctcggggacaacaatactggcaaaacaacagcgctagaggcgctcgatcttgcccttggtcccgaccggttaaacaggacaccgccggtcgacgaacacgacttctaccagggaagatacgcagctaactccaagaaatcagtgctaggagatcaaggcgaagtcggactaaaggcaccagacgtcgagaacggtgaagctgacgcaacggaaaatggtgctggcgcggtggctccagccgaagatcaagcgctgaagataagggtcgacgtcacaattgttgatctctccgaggagcagcgcaatcgattcggcgactacatcgagttctgggacgacgaagcgaagaagctatatcaggaagcaactccagaaggggttgatgctgactcgatctctcctgcgttgcgcgttacctttgtcggagaatacaacccagaagaggatgacttcgagggcaagtcgtttttcacgctaacactcgcagatggctgcgcaccccaagcatttacgaaaaaggataagcaagtctgcgggttcctgtatttgcgttccatccgcacaggctcccgggccctgagcctcgaacgtggaagcttgctggacatcatcctgcggctcaaagaagtgcggccccagatgtgggaagacgcaatcggaaaattatctactttctcagtcgcagaagacccgagcctcggcctttctggagttcttcaaagcatcaacaatgcattgaagaagtacgtgccaagggaatggggcatcgaaccacacctcaaggtctcgaacctcaccagggaccatttgcgaaaggtgatcactgctttcattgcaaccggcgatggaacgcacgctgccccgttctaccgacaggggaccggcacgatcaatatgttggtgctagcaatgctttcgcagatcgccgaggacaagcaaaacgtcatcttcgcaatggaggagccagagactgccataccgccctacgcgcagaagcgcatcatccatgaggtccgtaagctggcatcacaaacgctattcacgtcgcactctccttacgtcttggaagagttctcactggaagaaactgtcatcttgtcccgcgactccgccggaatgttgaagcaattccaggtctcgctcccggacagcgtcaagctcaagcgctaccggcaggagttcaggaccaggttttgtgaaggcttgctggcccgtcgcgtcctaatagctgagggtgcgaccgaagcttcggcatttccggttgcctgccggcgcctagctgagcttgatccggcgaagtactcctctatggaatctctcggtatttgtgttgtcgatgctggcggcgagggaagcatccctgatatggcgaagctgtataaggaaatcgggaaacggacgtttgccctgtgcgacctgcaagacgctgcggccctagcccaaatcaagagtcaggtcgaacacgtctacatgcacaacgagaagggcatcgaaaacctcatcctgaagaacacaccacaggaggcgatggagaggttttgcgacttactccaatggcccacagacctggcggggaagtttccgaatccaaaaggtgacgtcatcaacgcactcatggcgtacttcgcgaagaagaaaggtgactttggaattgcggaatacctcgcccaatgtaatgaggctgaaattccgatatggatcagagaatcttgtgtccatctaagggaactatgcatgccaccacccgtgcctgctgaagcggccatagtgataggtgatatcccgggcggtgatgacgatgaaactctctga

SEQ ID NO: 75259 - DNA, 1806 bp, Sulfuritalea hydrogenivorans sk43H
atgaaactctctgataagcaaatcgaggttctcgacaccgagggccatctcctagtgatcggcggcccgggagcaggaaagacgacaatctccatcctcaaggcggctaaggtcgccgcatccctaaagcctagtcaggaaatcttgttccttagcttcgcgcgagcaaccattagccgagtcatcgaggcaatcgaaaacgaacacgacattccgaaagctatcaagtcccgaatcaacgtcgagacctatcattcgttcttctggcgcatcctgcagactcacggatatttgctcggtctcccgagaccgctatcgatcctgactcccgccaatgatgcaattgcactatcggctatacgaagcgagtacaaggccgacggcaagctcagcaatgcggagaaggccgaaaagaagggcaagctgcatgccgaaaggcttcggctggccagagccgagggtagagtgtgcttcgacctattcggcagccatgtcgccgaacttcttgagcgaagcacacgacttcgtcaactgattgcagctcgttaccccattgtaattctggatgagttccaggatacaaacactgatcaatggcgagtcgtgcaacagcttggccttgcgggcacgttgatcgctttggcggatcctgaacagcgcatttatgactggatcggcgcagatccagcccggctcgaccaattccgcgcaacgttcaagtacaacgaaattgtgctgcaaggtgagaaccatcgcagcgccggaaccgaaattcttctctttggaaatgatgtcttgacggggaagttttcgaaaaatatgtacctcggcatcgagatcaaaacctatccctcgaatgagaacgaagcatgcactgcgctcgtcacccagacgtatgccgctcgcaaaaggctcgtcgagttggagaagaaggagtggtcactggccatccttgttccaacgaagaagatgacccgcgccgtttcggatgtcttcaggaatccgctcgcgaagatgcaaccgattaggcactcagccatagtcgatctcgacgcagccatactgggagccgagctcgtctcattcatgttgcagccgccgagcctgtttcatctcgatggggtaatcgacctcttgtgcaactacttccacggtaagggcggcgactctccgacgaaatcagctcttcagcaggcggcaggcattcgtaaagcgtttggcctctacgcggagaagaaagctgcgggcaagccgctgcccaaaaatagcatcattgtgccgctcttgcagacatacgaacaactgagagcaatcgccctcacgggagatccggatcaagactggcgatcggtcagaaagatcatggaaaacggtccctgcatccgcttgaaagaagttgccatcgaagtcaagaatctccgcctgttggagcgtggaacacaactgcgccaagagctttcgcaggactggcggaccttcaggcgatacgagaatgccctgaacatcacaagacaggcttttgtacgcgagcacttcgctactcagtcaaaccccgaaattggcgtcattgtcatgaacatgcacaaggcaaagggaaagcagtttgacgaagtcatcatctttgaaggttggccccgttacgtaaaaaagaagatcgtggctaatccagaccgaatcgtgagagcaaatttgaaagacaacatcgatgatcaggccagacagaatcttcgagtcagcatcacacgagggaagcagcgaacgacgatcctgaccccgcaagaggatccttgcgtaatttttatgtag

SEQ ID NO: 75260 - DNA, 1905 bp, Comamonadaceae bacterium A1
atgaagctccaaacgatccggctgtcgaacttccaatctttcggtgaggcgccgaccgaggttgcgcttgaggagattacctacctcatcgggcccaatgggtccggcaaaacagcggcgctgcaggccttgtgtcgtttcttcgcattcgatccatcactgcgccgaatcctacgctcggactttcatgtcccattcaacgaggaggctccacccgccgagcgtcagctctggatcgaggccgactttctgttcccagaactcgtcgaagacaaggacaacagcactgttgcacctcatttcggccacatgcgcctttacgaagttgatggcactcctcgtgtgcgttttcgccttagcgccaccatggggatggatggggacatagaggagaacatggtctatgtgttggacatcaatgctgatggttcgccactgaccatcgcacaagtgccccgatctgaacgcaaccatatccacgtccactatctgcccgcacgccgtgatcctgctgatcacattgcctacggcgccaatgcattgctcgggcgcatgctgcgtgcggtgacctgggatgccgagcgaactgtcatcaagggtctgaccgatcaaatcagcgacagcctggcggcaaatccgtcaatcaatgcgttcagcacaagcttgaaaacggcatggagcgctttgcacaagggcagcttctttgcggacccaaagctcacttttgtagcgtccgagatcgagtcattgttgcgccacatgtcggtgtctttcactccaggccatgacgagcagctggtcgatttctcgcgactgagtgacggccagaagtcaatgctgtatctgtcgcttgtgctgtcttcgcaggccatcggacgcgctgttctggctgaagaagacaagtcattcgacgcagtcaaattacgcccacccgtgtttaccgtggtagcggtcgaagagccagaaaacagcctatcgccccactaccttgggcgaatcgtcagtgccctcaacagcatgacgggcgacggcgacgcacaagcactgattgccacccacgcgccgtcgatgctgcgtcgcgttgctccggaacgcatccggtatctgcggctaacccaagagcgaacatcgcgcgtcacacacattcagttgcccgaaagcacggacgaagcacacaaattcgtgcgggaagccgtccaagcatttccggagatctatttctcgcgcttggtcgtcttgggcgaaggcgatagcgaagagatcgttttgccacgcctgctgcagatcaaaggcgcgccagttgatgaatcagcagtcacgattgcgcctctggggggcaggcacgtcaatcacttctggcgcctgctctcggctttgcaaatcccatatctgacactgcttgatctggatgtagctcgttacgccgctggctgggggcggatcaagtacgtcaatgatcaacttggaaagtttcggccagaacagaagctgcccaaaggccacggcatcccaaagtgggattcaacaacagacatggttcgggattacgacaactatcttgaggagcttgaggaaagaggcgtgtacttctcgtatcccatggacctcgactttgcaatgctgctttccttccccgatgcctacggcgtcgaagaggatgagccggatgaatcaacgatcaaggctgtacttgggaaaagccatcatgacgcaggccagtacagtgaagatgaactgaaacttttcagcacctatcaccagcggttcaaactcggcagcaaaccggcagcccacatcgatgcactggcccaactgacggatgcagaattgctggcaaacatgcccgcttcgctgagaaggctggccgatgccgtcatcgccaaactggcggagctgcccgagtga

SEQ ID NO: 75261 - DNA, 1677 bp, Comamonadaceae bacterium A1
gtgattgccatcgacgcttggcagccttcagatgggctgacgctcgaaccgaatgcgctgcttgccgttaaagagcagaagcgttgcctcgcactcacggctgggcctggtgctggaaagactgaaatgctggcgcagcgcgcagatttcctcttgcgcacaggcacctgcagatatcccaagcggattctggcgatttcgttcaaggttgatgccagcaaaaatctgaaggaacgcgtgcagcgccgttgtggtgctgatctcgcttcacgctttgacagctacaccttccatgcctttgccaaacgcatcattgatcgcttccgtcctgtactgaccggcaaggatgcgcttgagccaggatacatacttgggagcccgaagatcacgcataagcagattgagttcagtgatctgctccccctcgctatccagattcttcagaagtcaaagcttgcccgaaacgctattcgccagacctacagcgacgtcttcctggatgaatttcaggactgcacagacaaacaatacgagcttgtgaagctcgccttccaaggcacaggcatccgactgacggcagtcggcgacaccaagcagaagatcatgggctgggccggtgccctcgatggcatctttaagacctttgcagccgattttgcggcgactcctctcaacatgtaccgcaactttcgctccaagccgcgactgctgcgcttgcagaacgaagtcatccgcgtgcttgacctcgcatcggtcatgccggaagagcaaattgccggggatgaaggagaggtcctcacctggggcttcgaagacagccgacaagaagctgcgcacctagcagatcgaattgccgagtggattgatcacgaacttgtcccgcactcggagatcgccgtactgatctcaaagcaaccggatctctacgccaaccatctgattgcggcgctggaggccaaaggcatcccctaccgcaacgaacaacaattgcaggacatcaccaccgagcccgcagcgcgcttggtggtcgattatctgtcttgcatttacggtaagcgtgagcccaaggcatgggtgcggctgatgaacttgctggtgccttttgccgatgacgaaatccaagccaacacccgccgggactttgatcgcctgatcaaagcacagcgcaagagcgcctcacttctggagttgattgatgagccctactcaggttggtgggagtcggcgcgaggatttttgaacaagatcccccgcgaaaccttggtagcgctctcgcctgactacgaatcgccagatcggctgaaagaggtggtgcgcgacaccaaagcacgtatcgaagagctgctcaaaattgagcccgagttgcctaaggcgcttgaacgctttgcggatgacaaagcggtgcgcatcctgaccatccacaaaagcaagggcctggagttcgactcggtcatcattctaggagttgagaatcagacgttttggggcaagcccgacgaagaacgctgcggtttcttcgtaggtgtttcgcgtgcgaagcggcggctggttgtcaccatgagcaagcaccgggaaaccccgccttccaatccatatcgctggcaggaaaaacggactccacaccaggagttctttggttacgtcatgccgtttgtgagcaaagaaaatgaagagtga

SEQ ID NO: 75262 - DNA, 1698 bp, Acinetobacter baumannii
gtgaaaatctcaagtgtaagtttaaaaggttttcgtaattttaaagatagtattatcaaatttaatggtgatacattaatcattggagccaatgatgttggtaaaagtaatctacttcatgctttaagactcttattagataaaactttatctgactcagacattgaaccaacagagttagacttttatatctcaccttgtgaggctatgaatattctagaaataacaatttgctttgaagatatacaagaagatgctgttttatctattttaaaaggaaatgttagtagtgaagctaaaactttcttacgatatcaggctgttaaaaataatttaagttatcaaattttaataggtccttctttagaaaatcttgagctaataaacagccgtttttatttgaaatatgtcaatttaaaatatattcaatcccaaagggacttacagcgatttattcaaaaagaaaaacgtaagttacttaaactatctcaatcaaatttaaccgaaagtcaaagagaagaagacacggatttgttaaatgaaattggttttgacttaaaagaaataaatgaaaaaataacccaattatattatgtagatcatgcaactaaagaagtaaatgaagaactgaagaaattagcatatcatcattcggaatattcagttcaattggattctggagctattcaagttagtgactttatagacaatcttcaattgggtgcaaatgtacatggttcaaatattcttcttggaggggatggtagaaataatcaaattttattagctctctggaaagcaaaaagtattgcagaacatgatattaatcatgaagttgttttttatgctgtagaagaaccagaggctcatttacatccccatcaacaacgtaaattagctaactatttaatagaagaattaccaggtcaagctataatctcttcgcattcacctcaaatagcatcacattttttacccgattcaattattcgtttattagtaaaaaattatagtacagtggctgctagcggaggatgctcagactgtatttctgaatgttgggatgaaatgggataccgtataagtataattccagcagaaagttttttctctaatggtgttttcttagttgaaggtccttcagaagttcttttgtatactgctttagccaaagctttagaaatagatttagattactataatatttctatcttatctgttgatggtattgcttttgaagtatatacaaatattctaaatgctttagaaattccttgggtaatgcgaactgataatgatgtgtctaaagtaccaagaaagaacgaatggcaatatgcggggatcaatcgctgcttaagagcaataggattagcagaatggccacacagtacaattagtattaatcatatagatgttataaatgataaaagatggaattcttttcatgcttcaataagagataaaggagtatttatctcaaacgttgatttagaaacagatttaataaattcattagaagcaagcattcttcctattttagataaagataataaacaagatgcaataaaatttatgcaacaaaaaaaagcaatacgaatgtctaatcttttaaaacaaattaaagaaaagttaattgacttagagaatgataatttaacagagcctttaaaatacttaaaatcattaataattggataa

SEQ ID NO: 75263 - DNA, 1626 bp, Acinetobacter baumannii
atgaagactctaaacttaacgcaacagcaaatagaagcaattgaatattcttccaatctagttgttttagcgtgtcccggtagtggaaaaactactgtgatgaaagaaaaaataagaaagagtattcctaccttgttatctcatcaaggtgttattgctatgacttttacaaagaaagctagtgcagagttaaaaaaaagatgtaaaagtaatggctttattacaaagcaaagcttttttggaactattgatagtttctgtttagaagaggttatttaccctttcttatctcatttatggggtgggcatcctaataaatgtaaaattattactgaactaggtgatcttcagaaaaaattttttaaacagccttatatggcccctactttggataatattataaatgatgaaataggctttactactctatataaacagaattttttgtggattgattctttagcaggtttagcactatatattttagaaaaatgtactgcagctgttcggtatattaaggctaaatataaatttatttttattgatgaataccaagactcttcaagggcccaacatgaactttttatgaaatttattgaaataggtttgattggtacagcagttggggatgttgatcaatctatatatcaattcagaggaagtgatcctaaatgtatagaagaattaaaagctaattcattatttaaatttttaactatcgatcaaaatcatcgttcacacatatcaattataaattatgcatcaagattattaaatcctacatatcctacagagccttgtgaagaaattagaatcttcagaggagttcttgcaggaaatccaactcaagctgcaaagaaaatttccgaattaattaaaagaattacttcatctcatgagtctgttaattattctgatattgcaatcttggcatatagaactagttcattaaactatatagctagaggactggagcttgattatcgtttatatacagatactccccttgaaaaaattgaaacaccagaagcagcattaattagagatatattggcattccgtttcggtaaaataactactatgcaagaaatctttgatatgcactttgcatattcaaacttatcaaaagggagtttattaaaaattaggaaaatccttctagaaattaaaaatttagaattaactcaagtaagaaacaagagcattgaaattttagctttgtcaggtgttgagtctgattgtcattcagagctcgatgctctaacctcgacattaggtagtgaaaattatattaaaaattttatgcctattctaacaaatgaagtacagctaatgactttacataaatcaaaagggttagaatttcatactgtctttcatattgatttagatgattggtcatttccatatagagaatatacaggaagtttcgatgaccctcctgtatacccccaatataagcaagatttaaatttacattacgttggtattactcgtgctaaagaatattgtttacttgttcaaactactaaacggtttaacaaacaaggtgtagagaaaaatactcaaccatcagattttttgacgcttcctcatcttgaaaccttatataaaaaatttaagtag

SEQ ID NO: 75264 - DNA, 2064 bp, Bacillus sp. OxB-1
ttgcatattgaagaaattcatatacaaaactttcgattacttaaagacgtgagaatttccctagaagagaaaacaacagttatagtcggtagaaataatagtgggaaaacatcatttgctgagctattcagaaggctaacaactgaaagcttgcctagttttaaattggaggacttttccttagaggtccataatcaattttggaaagcatatgaaattttgcagaaagaaaatgatgaggttttgattagagaaaacctacctactatagaaattactatttcaattaattatcgaaacgttaccgcaagtttcggattactttcagaatttgttatcgatttaaatccaaactgcacaaatgcacttattaatatatcctaccaactagattcaggaaagatacaatcactatttgaaaatcttgatcttaaaaccgtaggttccgaagagaaacaaaagaatttattttttcgaactatgaaagaacgagtaccaaaattatataaggttatcctcaatgctgtagatcccaacgatccagcaaatcaaaaaagtttagagtggaaaaagtttcaaaatttacttcaaggcagtttcattaatgcgcaaagggaattaggagacatgacaagtaaggaaaaggatatacttggaaaaatacttgaaggcatgtttaattccgcaaaatcagactcggcaaatgcttatgatcaaggcgtagccgaaagtttgaatgaagctgtgaaaggaattcaggaaaaaattgatagtgattttaatgaacagctaacagggttattaccgacattttcattatttggctacccaggcctaccagacccgaagctactcacggaaacggtgctaaacgtagatacattacttagagaccatacaaagattcgatacactggggtaaatggtgttcatttacccgaaacatataatggtcttggtgctaggaacttgatcttcatcttattgaaattattggagttttataaggaattcatagcgaaaaaaattacacctatttcgcaaataatatttattgaggaacctgaagcgcatttgcatccgcaaatgcaggaggtttttgtttctaagttaaacgatttaataagaattttctccgaaacgtttaacaatggggtatcttggcctgtgcagtttgtgataacaacccactcatctcatatggctaacaaatctgattttagttccatacgttactttatggcgtctaaatcaaaaacattttattcgacgaaaataaaggatctgaaagttggtgtgaagggtactttaggtgatgatgtagaattcttacagcaatatatgacgctaacaagatgtgatttgttttttgcagacaaggcagtattgattgagggaacaacagagaggttactacttccgacgataattgaaaagttagatgtaaataaccctaatataaatcttggtagtcaatatatatccgttatagaggtaggaggagcatacgctcataaattttttggtttattagaatacctagagctgaaagcattggttataactgacatagatacagtagatagcaaaaatcacggtgaaaagtgtaaggttgctgatggggatgggacgagcaattattgtatcaaagaatggtttaattcagatgttagtccgaaggatttacttgagaaaactagagaagaaaaaatcaaaggaaaaatagcaattgcttatcaagtgcctgagaaagatgttcttttctgtggacgtagctttgaggatgcttttattttagcgaatcccaacttgtttggaatttatggtaatactcctgaaaaacagcttgaatatgcttggaaaaaagcaaaaaatattaaaaaagtagaatttgcacttgaatatgcattagaaaaaaaggaatggaatattcctaagtacattaatgacggcttattatggttggcttccaatgaattacattcaattacaaaaccgtcaaaggcaagattagatgatgttttcgaagaagttgcggctagtaaggaggattcttatgactga

SEQ ID NO: 75265 - DNA, 1758 bp, Bacillus sp. OxB-1
atgactgaagtgcttaataaaaatccagctgaagaagcagctgaaaaagcaatgaaagaaatttttaaatgcttgagtcaaagtgaatcatttttgcttgaggcaggtgccggtgcaggtaaaacatattcgttaatacaagcattaaaatatttagtcaaagaacgcggagaatccctaattagtaagggacagaaaattgcatgtatcacatatactaatgttgcatgtgatgaaattaaaaatagggtagacgggcaccccgcggtactagcatctacaattcatgctttttgttggtcaataataaaagacttccaatcgcaactatgggaagaacttcttcatattgaaagatgggccgaaatgatcgccgagtctaacattagaaataaaattaaaattgagtatgacttaggttaccgtagtgtagatagcgaaaagatttcgttggggcatgacgatgtggtttcattaactgcaaaattcatgaactatgataaattcatcaaaatattgagttctcgatacccggtcttatttattgatgaatatcaagacagtgacaaagattttattgattctattctcacacatataattgataaaaaagagcaaactttagtaggtttttttggagatggttggcagaagatatatgggaatgggtcgggatcaatagaaaattcaaatataacatatattgataaacacgcaaacttccgatctgaaaatgcaatagtagaagcattaaacaaaattagaccagatttaaaacaggcaataaaggacccccattcaactggatcggtgaatgtgtatcacacaaatggatggaaaggtgaaaggcagaaagggagccattggaagggagacttacctaccgaagttgcacaaagggcccttgaaaaagttagattacacttgaaagaagagtgggactttaaacctaaaaaaacaaaaattttaatgttgactaataatgtattggctagggaacaaggatatagtgggattgcgaacgtttttcggagaagtgaagactatttaaaaaagggaaatccatatattgacttctttgttagtacgctagaacctttatctatagcatttgaaaatagtcggtacggagacatgtttaaggtattagatagacgttcagcaattattcaatcaacaaatgataaaacagagtggtatgaagcaatgtcatcattaatccaattacgggctacaggaacaataggagaagtggtaagccacctaaaagacacaagacgcccacgattatcagccattatggagaaaatggaaaagaagttggagcaatacaatccgacttgtgaagaggaaaaagtttcttcaatggaacggataaaacagttaaaaaaagttccttatcaagaagttgtagaattagctcgttatattgaagagaaaacacctttttccaccaaacatggtgtaaagggggctgaatttgaaaatgtgttagtagttttcgggcgtggctggaatcattacgactttaataggtttttagagtactcagtagatatcgaaaaaatttctatagatcaaaaagacttttatgagcgaaatagaaacctattttatgtcgcggtttcgcgccctatgagaagattaacactattatttacacaagaactttcaaacgattcattatcaaagctatccgaatggtttggggatgataatatctactccatgggagatagcatattagatgaaaactga

SEQ ID NO: 75266 - DNA, 1905 bp, Pseudomonas aeruginosa; identical to SEQ ID NO: 72778

SEQ ID NO: 75267 - DNA, 1677 bp, Pseudomonas aeruginosa; identical to SEQ ID NO: 71997

SEQ ID NO: 75268 - DNA, 1905 bp, Pseudomonas aeruginosa; identical to SEQ ID NO: 72778

SEQ ID NO: 75269 - DNA, 1677 bp, Pseudomonas aeruginosa; identical to SEQ ID NO: 71997

SEQ ID NO: 75270 - DNA, 2142 bp, Chryseobacterium sp. StRB126
atgtatatatctaaagtttcactcattaactacagaaatttcgcgaatgctatttttcaatttcacaaaggtattaataccattattggagaaaatggctctggaaaaacaaatgtttttagagccataagattgcttttggaagacgcttcaatgcaatttgcttacaaactaaatgaaggagattttaataggcagttgggtaaaaataaatggaaaggacattggataatcattagcatagaatttgacgaacttaataatgaagaggctatacaatctcttttcattcacggtgccggaattgcggaagaagattatgtaaaaaaagctacttacaatttattttttcgaccaaaagcagacgttagacaaaaattatctgaactgaaagaaggagataaagctggtttacaaacaatcttgaatgatattaccattcaagataattatgagactttctttacaggaaaaagtacagccgattttaacgaccttgaagtttacaaggagcttgtgggtgatttcgaaaatgtcatttttcctgcatcgattgatgcttctaaatttggctcaagaattccacatcaattgtcagttgccaaagaaatatcctttacgtttattcaagctttgcgagatgttgtaagtgattttcataataatagaaccaaccctttacttacactattaaaaaataaaagtggagaaattaaagaagttgattataagccaataagtgatttagttaatgatttaaatgaaaatattgaagcacttcccgatgtacaaaacataagagcagatattaaatttaccatacaagacgcggttggattaacttactcaccatcgtctttatccattaaatccagtgtcccagatgaagcagaaaagcttctacagtcgttaaaactttttatcggcgaacctgaagaagattatgaagggggaatacacgaattaagtttgggaggtgcaaatcttatatttcttaccctaaaacttttagaatttaagtatagaaaatctaaagatacttttgcaaatttcctgattatagaggagccagaagcccatattcataatcacattcaaaagacactttttgacaagttaaattatgtcgacacgcaaattatttattcgacacattcaacacaaatttcagaagtcagtaacgttgagaacataaatattcttgccaagaaactcaattatgctgaagtttatcaaccttcaacaggtttattacctgaaaacattaaccaaatacaacgctatctagatgcggttaggactaatttactttttgccaaaggtgtaattttggttgaaggagatgcggaagaaattttgataccgattatggtaaaaaaagtcctcggtgtaggacttgatgaattaggaataagtctaataaatattcgaagcaccggttttgaaaatgtggctcaacttttccatagtgatagaattaagagaaaatgcgcgatacttactgatttagatgacgctatttgtgatacaacggaagttgaaggcgatacagatgaaattataaaatataagaagaaagttgccggatcgcaaaaaaaaggtttggaaagaaaagcgaaacttgatttgcttgaaacaggtaacatatgggttatggcgttttacgccaaacatacttttgaggttgattttgtaactgaaggaaataactgggaagttcaaagaataataaaacaagtgtatgtagataaggctactcgcgaccaagcaaagctggatttggaaaatactaacgtagctgtatctggtaaacgagtacttacaatggcaaagcaagaaggcaaaggttggtttgcaataatgcttggcaaacatattttctttaaaactattattcctgagtatattttggatgcaatctttttcgctaaagacaggtattcttcacatataattgcagacattattgagtttagaataaacgaaaattttaaggataaaaataccttagattttgcttcttgccgtgctcaattattaaaatatcgtaatgcagaaatacctttagaagatttagtaatcgacttggatttggtaattcccaatgatcaaatattaaccatcattgaaaaattgaaataa

SEQ ID NO: 75271 - DNA, 1812 bp, Chryseobacterium sp. StRB126
atgtttatttgggaaaaaggtagcatcaacgatgaacagcaaaatgcaattttagaagataaaagtgtgcttcttatagcctgtccaggaagtggaaaaacccgtactttaacttttaaaattgcatatgaacttagcagattaaaaacagacaaagagtttgtaattgcaataacctatacaaacaacgctgcggaagaaattaaagaccgtgtagagctgttaggagttgatactactcaattatggattggtactatccactcattttgcatggagtggattttaaagccttaccatttgtactctgatagactaaaaaatggttttaaggtttgtaattcatttgatactgaaaagctgttgactgagatatgtaacaaatacagtaatccaaaagttactttttatgactttcagtattatgccactataaatggaacatataaatttacctcaaaaaatagtaatcagaataatcatattaaggctatacttaaagagtattttttaatattagaaaaaaacaatcaacttgattttgagcaaattcttttttatgcttatgatttaatgaagtcaaaaccggtaatcagttctattctttgcaaattatttccatttatattaatcgacgaatatcaggatactaaagaaatacaatatcacattatttcaaagatattatgtgccaataagggctgttcaaaaactctaattgttggtgacccaaatcaatctatttataattctttaggtggttatccaatggcaaaaaaagaattagaaaaactgttaggatttgaattgcagcaattgagcttagataaaaattacagatcatcggaagctataattaattattttgactattataaaacctttacaacaccaattatatctttcggaaataataaagattacaatagtttaatcacttataatttttcggtttctgtaggtaatttgattgaagaaattgcgaaactaattttgtttaatgtgcaagaagttggcattagtcctaatgaaatttgcattgtagcaccacaatgggtacatattgcaagcataactagaaagttgatgattaggcttcctgattacaatttcgatggtcctggaatggcacccttttctcgtgatattgaaaatttttggttcaaaattgcaagaatagttctaacagagccatctccttttatgtatgttcgaaggctccgatggagtaaagaagtattatatgagtttgaagccgtagggattgacataacaaaaatctcaaataaagaatttttaaaaatttgtaattctatagaaattgatgaaaatgatggtttgacatatttacggtttttctttaaccaaatttgtaacaaattaaaaattgacattagtaattttccattactgaaagagcaccatacttcattttttgctagttctgaaagtcgtatacaaaggcttattgatgaaggaaatccttttattggagatattgaaaatttcagaaaagtatttaggcaaaaagatggcataacagtttcaactattcatggcgtgaaaggggaagaatatgacactgtaattggtttcgcattgcttgatgattacatacctcattttaacgacacaaatggttacgaaaattcaaaaaaactactttatgttttagcttccagagcgagaaaaaatttgcacctgatttcagaaacatcaagaggtataaactattataatccggacggaaaaagtcctactccacatttattagaatatgattatgaatattcaattcttaacataaactga

SEQ ID NO: 75272 - DNA, 2139 bp, Chryseobacterium sp. StRB126
atgtatatatctaaagttagcctcgtcaattacagaaatttcgcaaatgcaaatttctatttcaagaaaggaattaataccatcataggtgagaatggatctggaaaaacaaatgtttttaaggctataagattgcttttagaagatgcttccttgcaatatgcttacaaacttgccgaaggagattttaatagaactttagataagaataaatggaaaggtcattggattataataagtattgagtttgacgaactcaatgatgaagaagctattcaatctttatttattcacggagcgggaattgctgaagaggactatgtaaaaaaggccacctataaccttttctttcgtcccaaagctgatataaggcaaaagctgtctgaattagccaaaggagataatgctggaatgcaagctttactcaatgatatcactattaatgataactacgaaactttctttacagggaaaagtactgctgatttcaatgatccggaagtatataaagagctggtcggtgactttgaaaatgttatttttccttccatggtagatgcctcaaaatttgggtcaaaaatcccacatcaaatgtcagttgctaaagaaatctcttttacattcattcaagctttacgggatgttgttagcgattttcataataacagaactaatccattatttacacttttgaaaaataaaagtggtgaaattaaagaagtggattataagccaattagtgatttagttaacgatttgaatgaaagtattgaagcacttcccgatgtacaaaatattagggatgatattaaatctacaattcaagatgctgtaggacttacttattctccgtcatcattatctataaaatccagcgttccagacgaagcagaaaaattgcttcaatctttaaagctatttattggcgagcctggagaagaatatgaaggtggcattcacgaattgagtttaggtggagcaaatctaattttcttaactctaaagctgttagagtttaaatatcaaaagtccaaagatacttttgctaattttttaatcattgaagagcctgaagcccatattcacaatcacattcaaaaggctttatttgataagctggattatggagatacacagattatatattcaacacattcaacacaaatatctgaggtaagcaatgttgagaacattaatattttggctaaaaaattgaattatgctgaagtatatcagccttccacgggattaggatctgaaaatataaatcagatacaacgctatttagatgctgtgagaaccaatttgctttttgctaaaggggtaattttagtagaaggagatgctgaagaaatattaatcccaactatggttaaaaaagtttttggagtaagtctagatgaacttggtattagtcttataaatattagaagtacaggttttgaaaacgtagctcaactttttcataatgatcgaatacaaagaaagtgtgccatactcacagatttagatgatgctatctgtgacactacagaagttgtgggtgatagtgatgtattgaaaaagtataaaaagaaagtggccggttctaaacaaaaaggtttggctagaaaggtaaaattagatgcgtttgaagttggcaatatttgggtgaaggctttttatgcaaaacatacttttgaagtagattttattactgaaggaaatgaatgggaagttaaaaaaataattaaacaagtttatgtagatcaagatacacgtgatactgcaaagacagatattgaagacgctgacgtttctatttatggcaaacgtgttctcacgatggcaaaacaagaaggaaaaggttggtttgctataatgttaggaaaacatatttcgtacaagactatacttcccagttatataatggatgccattttctttgctaaagaatcatccccaaatatcattgcagatataattgattatcgaattaagaaaaatttagaagataataatgcattagactttacaagttgcagagcggaactactaaaatatcgaaaaggagaaattgaattgaaagacttagcttttgactttgaccttgtactgccagacgaccaaattttaaccctaatagataaactgaagtag

SEQ ID NO: 75273 - DNA, 1806 bp, Chryseobacterium sp. StRB126
atgtttatttgggaaaaagacagtatcaataaagaacaggaagatgcaattcttgaagataatagcgtacttcttattgcttgtcccggaagcggtaaaacgagaacccttacattcaaaattgcttatgagttaagcaggttgaaatcagacaaggaattcgttatagccataacctacactaatagggcttccgatgaaattaaggaacgagttgaattattaggcgttgatacaacacaattatggataggcactatccattctttttgtatggaatggattttaaaaccataccatctgtattctgaaagattgaagaacggttttaaggtcatcaattcctttgattcagagaagattttaaccgaattatgtgccccctataagaaagagaaaataacatattatgattgtggtattcttgccaaaccggatggtttttacttaacctgtcttgatagtggtaaacataattcattaaagaagattcttggagaatattttaaagttcttgaaaaaaagcgacaaattgattttgagcaaatcttattttattcttatgaaattctcaaatcaaaaccagttatagctaatattttgtgcaaattatttccgtttgttttaattgacgagtatcaagataccaaagaaatacagtatcatattatatccaaaatattaagcgtaagcaaaggagcttcaaaaacactgatcgtaggtgatccaaatcaatctatttacgattcactgggagggtatccgatgccgaaagatgaattagaaaaattattaggatttgaattgactccattaagccttgacaaaaactataggtcatcctctgctattattagctattttgattattataaaactttcgataccccaattgtagcctttggaaatggaaaagattattcaagttcaatcacatttaactcttccgtttcagtagataatttaattgaagaattggctcagttaatattgtataatgttgagaaagcagggattagtcccaatgaaatatgcatcactgcaccacaatgggtacacatagcaagtattacaagaaaacttatcattcgacttcctgatttcagttttgacggaccagggatggcaccgttttctcgggatattgataatttttggttcaaggtttcaagaattgcattgacagaaccatctccttttatgtatgtaagaagattaaggtggagcaatgaaattttaaatgaacttgattccacaggagttgatgtttcaaatatgactagtaagaaatttttaagaatttgtaattctttggagattatcgagaaagatggattaacttatctaaggactttttttaatcagatctgtgaaaaactgaaaattgcattacccaattttcctttgttagatgaacatttcaattcattttttgcaagttctgaaagtagaattcagaggctgattgatgaaggaaatccatatattggtgatattgaaaatttcagaaaagtattcagacagcgagatggaattacagtatccactatccacggcaccaagggcgaagaatacgatacagttataggttttggcttgttagatggctatgttcctcattttaacgataataatggtcttgaaaattcaaagaagctattatatgtcttagcttcaagagcgagaaaaaatttacatcttatttcggaaagaaatagaaatgtacataagttttatgctccggatggaaaacccccaacttcacatttaactgattacaatttcaaatatttagataccctgtaa

SEQ ID NO: 75274 - DNA, 1821 bp, Paenibacillus sp. VKM B-2647
ttggatgctgttcgcctatgtcttgccagagggggaaagcggtcttccccgtttgatgaatatgattattatactaatgaaaacataagtaatcccaaagacactgagggtatacaagtacaattcttgtttcaagaagaaaaaccgaacgaatggtcagagaccctcatccgaaaccttggggaattagctcaaccagttgcatgggacatgaaccccgaggaagcaatttatactgtgagggtaagtgtaacatcaaaatatgaggaagcgagaaatgatttttacttgaatattgagtttttaaaccctgaaggcgaacctttgcctccaagaaatcagactaatacaagttggtcaaacttcattcaggagaccccagtattctatctatcagctctaagagatattaaagagtcctttggagcaagatctcagttttggggaagctttctaagaaatattaatattccacaagataaggtagttgaaattcaagatagtttgcagagtttgaatgaggacatctttacaaatgacgagagattggagggattaaagactacacttgaaaatatacaagaagtgatcgccctcggagcaggtgatacagtctcaatacaggccttacctgtacgcatttgggatttattgtccaaatcccaaattgtattaaaaggtcgaggtggaaatgtgagtttcccgctacaacgtcatggacaaggaactcagagtttagcagttttattcttatttcaggcatacatagacgttttattaaaatctgcatattctcgaacagctaatgcaatacttgctttggaggaaccagaagctcatttacatccccaagctgttagagcactagcggatcaagttcaaagaatagattgccaaaaaattattaccactcattctccctacttctttcagaatcttgatttattaaatatcagagtatttaagaagaatggctcagaaacaagggtccattacttaaaggagtatgtttcaactagggttgtagcccatcatgggttggaacgtttcgtagagtcgaaaaagggcaagtttcattataaccttagttcttcagagttaaaagcatacgccccgttaaacgaacacgaattgaatgctttggaaggaatgaacagaaattccgagcatttcgaaaatataagtgagttctatttaaaatcacagcaaattttagataaagatgaaagaacggacttatacacttttgcccaaaggacaagaggagaattattctttgcaagagggtggctattagttgaaggacagaccgaatacattgtattaagttatttctcagaagttataaataaatcacttgataccaatggtgtaaccataattgattttcagaataatgggtcacctggagcattcgtaaaattagctaaatctttatcgtttacttggagactattaagtgatagtgatgatcaacttgagggtacattatctcaaatcaaaaaaacaggttattctgaggaagagacaaacagattggtgaaaatccttccgtggattgattttgaaacttatttggctaatgagggctttataaatgaatatgaggcaatactaggtgataaggttcgtgaagtaacagtaccgcggcatagtgctgagtaccctattcatattgcaaatcttattaagaaagacaaggttggtaacgcattaaaatttgttgaatacttaaaaaatcataattttgatagtagaagaatacccgaattattaagacagttgattaatgaatgtgtaggtgaggctaatgcaatataa

SEQ ID NO: 75275 - DNA, 1932 bp, Paenibacillus sp. VKM B-2647
atgcaatataaggaagccataaagagaaatattgaattgcttactgatgtccagaaagaggctgcttcctgggatgagggacctttattagtcttggcgggtcctgggtcaggaaaaaccagggttctcactttgcgaattgctaggttacttgtagaatctagcgatgataactttcgtatactaggacttacgtttacaaataaagcagcagatgagatgagaaccaggatacgcgaattaattccagggatggataaaagattataccttggtacatttcattctttttgtgccgaggtgcttagaaatcatggctcccacgttggggtaaaacctgattttacgatttattccgaaaatgaagacttagatgaaatcgtttcagaagtatacagttatttattaagacagggcaagattaaccccttaaacgtttccaaggttttgcctattattcaatatttaaaaagcagacttattctaccagaatcagacttgtcttcttacattagtaatattgaggacaggcaagctatagaaatgatttacatgaactacgagcaaaaacttaaggacttgaatgctctagattttaactcactcatcatgaaatcctacgagttatttaggaaatacccttttgtagccaagcattatcgaactatctatccatatatttgtattgatgagtttcaagatacaaatcagggtcagtacaacttagttcgaagtttaacactaggaaaacataataatttatttattgtagcagatgatgatcaagtaatttaccaatggaatggtgcaagtgcatcgagagttgaagagttccgaaaagacttcaatgctcaagttatacaactacctgagaactttagatgtccaccagaagtagttcaactggctaataacttgattctatataatgtaaataggagcaaagacaagaagcctttactagcaaaaaaaccaatacaggattcgtttgaagtaaatttagagtactttcctgactatccaacagaagcagattgggttgccgaaattatccaagaaacatacgctctaaatcagaataagacggtagcagtcattgcaaggaatagaaagctaatacagcccattttcgaaaagttaaaagctaatgagattcctgttgttattgggcaaaggaagaatgagttcgaaagtacacaactatcatgggtgcattttattctgcgacttgcacataaacgaaacgataaaaagttcttgaataaggtagtttcaaactttagcttgttaacggaaagtaccctaaatgcagaggagataatcgcctggagtaaagctacagacggagattatttgaggggttttttaattgccgtgcagaaaggaattttaactgacggtcatttattgaagtcacttgaattcgacttggttgaagggaaagactttttcaggtttattgaagtttgctttggatggcttgatgagcatatggacataagtcaaaataaggaggatgtactttattatgacgaaaaaagggtttgggacgatttacaatcttcacttctatcgagatacgacagggaagagctaacattgggcatgtttcttcaagagctggatttgttatccaaggaagcagaaccagatggttcaactgttcaatgtctgacgatacacgcatcaaaaggaaaagaatttgattttgtgtacctagttggtatggtcgaggatgaattgccttcatttcagagtaagaaaaaaggggatcacagtattgagatggaggaagaacgtcgaaattgctttgttgcaattacaagagctaaagagattctaacaatgacttactcggaaaggtataatggttgggttaagcaaccttcccgattcctttatgagatgggtgtgcttcagcaaaatgattaa

SEQ ID NO: 75276 - DNA, 1779 bp, Jeotgalibacillus campisalis
atgtatatcagcaaagtgaaaataagtaattttagaaatttcaaagaaacagaagttgagttggggaaacaaatggttattgttggggagaataaaataggaaagtctaactttatacatgcgctaagactggttttagatccaactttatctgaatcgaaacgtgtattacagatttcagacttttgggatggcttagatcttccgttaaataacgaagaaataaaaatagatattgaacttactgggtttgaacaagatgataaattaaaatccgtgctttctgaatttttagtaaaatctttaccgttaactgtaggcttaacctataagttttttccagaagatgaaaacggaaataaagtttataacttcaaagtttatggaacaaaaacagaaaatatttttggttatgaacaaaggaaatggttacctcttgaggttttatcagggttaagagacaccgaaagtgatctatcaaattggaggaaatctcctttaagacctttaattgaaagagcaatcgaaacgacagataagcaagaattagagaacgttgctaaggaaattactcgttcaacagattctttaaaagaattggacgaaattggatcgttaactgaaagaataaatactcaattagaaaatattgtaggagatagacattcgatagaaaccagtctaggtttttctcctgctgatgcttcaaagctttaccgtgcaataaagatgtttattgatgatggaaatagaggaattaatgaggctagcttaggatcttccaatttactttatttagtgctaaagcttctttctttagagctatatgtagatgaaaatgaacgtgcccatacatttttagctattgaagaacccgaggcacacctacatcctcatttacaaagattactttataaatatttgttgaatcacgataagttgatagttgagggttctcaagaacagcacaaaattcatagtgtttcaaatattttaacgacgcattcacctcatattgtaagtgttgctccattgagatctatagttttattaaaagaaactcacgaagaagatcaagctacaaaaatagtctctacttcaaaaatttctttagatgataaagatgtcaaagatttggagcgctacattaatgttacaagaggggaggttcttttttctaaaggggtaatattagttgaaggagacgctgaagaatttttgttaccttccctgtcagaattacatggaattgacctggataaacatggaatcactgtgtgctcggtatctggaactaattttcttccatatatcaagcttttggggagaaaaggattagatattccttttgtaattcttactgactatgatcctaacattaggaaacctcttattcataatcgcttaataaaattattaaattttatagatgaaaatcatgaatataaagaattaaaaactggggatttagttacctatggagaagaagttggtatttttacaaatagccacactttagagattgatctatttgatacaatgcctgaggaaattttagaaacgttaattgaattgacaacaaataagaaagcaattgaaagagcacaaggctggaaggcagcaagtagcattaatggaaataaagacagttatctttctgacatagaaagtattggaaaagggagatttgctcagagattagcgactaatcttacaaagaaatcagttgttcctgattatgtgaagggagccttagattatgtcattgctaaggtttga

SEQ ID NO: 75277 - DNA, 1827 bp, Jeotgalibacillus campisalis
atgtcattgctaaggtttgataagcttctttatagagaagcagccaaagatttagaaaataatgaagcacaaaaaaaggtttatgattctacagggaattgcgttgtacttgctggtccaggtagtggaaagtcgaaaattcttacattaaagttagccaaaatattgaatgaagatatagaaccacctcaaggagttgcttgcttaacttataataaagaatgcgcaagagaactaaaagagaagttaaacaaattaggtatcaatgaatcatccacaatttttattgatactgtacattctttttgtttaaatcacgtgattagaccttacaaacatttagtgaacactaatttaccaaagaaaattaaagttgctacttcaaaggaaataaaggatacaatgcttcaaacattcaatttaactattggaaagaatgaaaagcatacatcaagctggtcaacagcatttaatgtatatagaagaacctttttagaaagggaatcttctgaatggcaaactaacgacagcgatatagcacaatggattcttaattacgaaaactcattaagacatcaagggttaatagattatgatgacatggttttaaatgggttgtggatgattaaggaaaatcaatggattcaagagttacttcaagcaaagtttcctgttatagcagttgatgagtatcaagatttaggggcatctttggataaaataataagagttctctgtatagaaaatgacactcgacttctagcagttggtgatccagatcaatcaatatatgggtttacaggagctcaacctagtttattaaatgaccttgctcaacaatcaagtgttttaaaagttagactaaaaaagaattacagatccaaaaaaaatattgttaaggcatcgattgcttcattattagaagaaagagattttgtttcaagtagagatggagacggaagtataatatttcatagtattagggacggaattgatgcgcaatgtgattatatttgcaaagaagtaatccctaatattcttacttctgatccttccaatacgcttggagatattggagtgttatacattgataaaaatgatggtgatctaattgctgagaaagtaacaatagaaggtttacaatatattcgagtagatggaaatgctccttataataaaaatcagctaactgtttggatagaaaactgtgcaatgtggtgttctggaggatggttaaaaggaagcccaaaattttctgaaattgagcgtactttcggttccttttttttaaattcaaatatttcggagtcaaaactagaaagtaggaagttaaatctattcaaatttttatttagatgtagagatgttaaacttaaactaagtgattggcttgatgaatttaacgatagtattgtttccgaattattagatttctttactgaagagccagatatagtaaaagaatataataaattaattgtatcagcaaaaaatggacaactaaaagattttaaaatatcttctttatctcgccaagtaggatctaaaagtcatttgaatttatatactttacacagttccaagggattagagtttaagtatgtaattatgtttggtttggaacatggaaggattccttggttgaatgttcttgaaaataaggtaaatgagtcaaggagattattttacgtaggcctaactagagcaaaggatgaaattcatttattatcctcagggtggtattatgattactatggtaggtatcaaaattatggaccatctaaatttgtcttagaacttaaagaatttgtagataacaatttgtaa

SEQ ID NO: 75278 - DNA, 1953 bp, Pseudomonas aeruginosa; identical to SEQ ID NO: 74520

SEQ ID NO: 75279 - DNA, 1668 bp, Pseudomonas aeruginosa; identical to SEQ ID NO: 74521

SEQ ID NO: 75280 - DNA, 1794 bp, Acinetobacter baumannii; identical to SEQ ID NO: 71916

SEQ ID NO: 75281 - DNA, 1782 bp, Acinetobacter baumannii; identical to SEQ ID NO: 71827

SEQ ID NO: 75282 - DNA, 2307 bp, Halomonas sp. KHS3
atggcagaaaaagccccagattttctttcgtccggagacatctcgcttcggtttatagaactctgccagtttcgtcggctgggcaaaatccggctggaaattgacaaaaaaacgaccatcttagttggcgcgaacaatagtggtaaaacctcggttctagccgcccttcgccatttccttgcggatcagccttctttcggagcattcgacatcagtatctcgcaatggccagaactgcgagctttagggagaaattgggaggcgctgaccgaagacccattaacagtagctggggccgaagagctttgggaaaagcagttccagataattcttgcggccatgccaacattggatctctggtttgatgcggagcccggcatgtatcactacgtcgcaccattcctttccaagctcagttggaaaggaggggccgtcggtgttcgtctgcgattggagccagctgcaagcattgatgatctaaagcaactggcttgggcctatcacaatgcgcgtttaccggtaaaggacatgggggcggactcgctagcatggccaattgacctgctcgatttttggttacgtgagccatctaagctcggccatgttcgcgcctacaagctaagtgcagataataatcctgtgacgagtcctgcgacttacgctactcagacactctctggagatgccaatccaattgagcgcaagcacctatctagactcatacgcgttgacttcgtagctgcccagcgtgggcttggaagtgaagaagcagattctaggtctgtttcggggccgcaccgagtcggaatgttttcaaaccaacttctcaaatttgcccagcagcacttaaacgtttccagcactggacacggtcaccgtgcggatcttatcaaagccgtggctgaggcacagagagatttagatgggaagattcatgacgccatcgccgattcagttgaggaagtgaaggaacttggctatccgggcttacatgatccccaagagattcgcttccgaactcgcattcagacggcggatctgctcgatcatggcacagctgtccagtacagtatgcaaaaggattcactagaagagctccttcccgaacattctattgggcttggttaccagaacctccagtcccttagctaccagctagtttcctttaaagctgctcggctccagcctgaaaaaggttctcctgaacccgttcacttggtgatgattgaggagcctgaagcgcatcttcacgtccaagtgcagcgcatctttcccgaaaaagcgcacaaacttatcagccctttgaagagcgcgtccggccttaaaagccagctgctcatcagtacccattctagtcatcttgctcatgcagagaacttcgaccgactccgatatgttcgtcgcatagccaagagtgcgacgaattcaatgccagcgaccgaagtggtcaatcttggacaggtctttggtgatgacaaacagacccgtcaattcgcggaacgctacttccgtgtacagcatacggatttgttgttcgccaacgcagctgttttcgttgagggtagtgcagagcgaatgcttgtgccgctctttattgagcgagattttaaggcattgaggagccaatatgtttcctttttggatattggtgggagccatgctcaccgactcaagccactcgtcgagaaactccgtattcctacggtcatcattactgacgttgatccctctgaagagaaggagggcaaacccaagaaaaatggagagcctagtaaaaggctcatcgctgttgcgaacacgggacaagatgggcttcactgcggtaaccaaactcttcgtgtatggcatccgaagctggaacaactggatgattttaagaacccgactgaagctcaattagtatggagtgaggtagcagattgccttgtgcgtttcgcctggcaattacctgtagaagacgctggcggcagctggcccagcacgtttgaggactcactagtcctgacgaatttgcattggtttaagagcctgatggatgaaaaattcgatgaggatggtgaagagattgaagcaccgaagggggcacttggctcggtggcaaaaagggctgctgaaaccgaaagctttccagaactgctagttgcacttcatgcgctgatgcacagttcattcgataaaggtgagttcgctgctagtatttttgaaatgatctcttcggatgagccgatcgtggctccaaagtatatcacggacgcgctggcctggttggagcagcagcttgagccaatccaggagtcgatgatatga

SEQ ID NO: 75283 - DNA, 1950 bp, Halomonas sp. KHS3
atgagtgtgatacctgttgttgacgacaacaaccgagatgctggggttgtcgaagaaatttgtgggtatctcacagaggaaactccgcgcagttacttcttatttgctggtgcaggttctgggaaaacgcgtacgctcgtagaggtgctacgtcggatgacaggcgttttggagcatgagaaaggtaaccgtttttcgcggagcttgaagatgtatgggcgctcgatacgcgttatcacatatacaaagaacgctgtctcagtaattaacgggcgtctaggcaacaacgacttagtagttgtttctactatccacgctttttgctgggaactcattagcggattcaacgatgacattcgtacggcgcttatcgctctcgaggaagctcggttagaaaagaagacggcggaagctctagcgaagccaagaggaataacggcggcaaagcagcgggatctggacgaaatcaagaaaggtatagaagggttcagagagacgaatgtgtttatctaccatccggatcgcgagacgtatggccccggtgcacttgctcacaagcacgtcctcgatgtaacagcatggctccttaagaatgtgcctacgctccagactatcctcaaagaccgtcatccagtgatactcattgatgagtcacaagacacgatgaagggtatgctggatgccttgatggaacttgcggagctaaggagtagtagtctgactctcgggctgctgggcgattatcggcagcgtatctatactgacggtcattctgaccttcccagtttggttcctccggactgggcgacgcccgagctgcagatgaaccatcgtagccagcgtcgaatcgtcactctcatcaacagaatctgggaagcgaagcttgaggggcgggcccaacctgcaaaaggcgtggaacagtgttccaggaccgagaagactggtggggttgttaggctctacgtcggagacactaagcttactccggaagagaaagttcatggcgaacagtggtgcacagaccaaatgcgaaaggcaagcggtgcagctgcctggagcaacggggagtatcagctactcgctttggaacacaaactggttgcaacgcgaggctcttttctcgatgcatttggtgcaatgaacttgcttgatccgaatgctgccgcaccctcgggtagtggtgaaaacagagggcctgcagcagtgcaagttttattgaatgaacttgctgagttagagacctgtattagtgccgatggtaatgtagatgagtttaaggtcacagaagtttttcggcgctacggccttctcgatgatatgccagtagatatggctgcgcgagaatgccgtgccaacgaaatgcttcaagctattgagtgttttgccgctgcctgtgaaaacccgatttcgactgtgcgggatgtgcttgaaccagtcttaacagcaagactgttcgcggttgatgatcgtcttttatctgcttttatggacaaatcacctccaccaccagtgcccggtaggggcgaagatgagtccaggcaggaccggatgcgtcggggctggtgcgcattgttcgcttctccctggaatcagttgcaaaagtatcgctcctatctttctggacaatcagcactggcaacccaccaagtcgttaagggctctgaatttcttcatgtcatggtcgtgatggacgacaaattagctggaggcaatcagatttcctatgacaagatttttggcggtactaagcttagcaagacggacacagaaaacctagaaaaaggcaaagaaacgaccatcgacagaacactgcgcttattgtacgttacttgcagccgtgctgaggagtcacttgcacttgtgctctggtcatcggatcccgcagcagccttagtaagtattaaggacagcggctggtttactgaagaggaattcgcagcgattccgtag

SEQ ID NO: 75284 - DNA, 1761 bp, Bacillus subtilis
atgcagcttaaaagcctaactatagagaattttcgaaactttgaaaaagtaaatgtagatttaacaaatcaaaatgtttgttttggaatgaatgatgtgggtaaaacaaatttgctttatgctatcagattcttattagatagagatattcgtaaaaatggctttaaagaatcagattattttagaaatgaaagagacagagtaataagaataacattaggtgtcgatttatctgatcgtctaaaagatgaagattcccagcatataatagccaaagtgggaggggcaaggtcaagtaatgaattagataactttttttttcaggtagaaggtacttatgatattagtgaagaagttggaatacctaaaatttattggggaagtaatttgaaggatttggacgaaataacccaaaatggaatatatagcaatttggataatttatttaagatcgtatacgtagatccaacaatagatttagaaaaaactttctcgaaaaatagaagacagctatttgatcaaaacaaattggatgagaatgatattacaatttccaatgagattaagactttaggaatagaaatgaacaaaaaaattagtagtatgggggttattcagtcttttcaagatactataacagaagagtataaaaaattgaaaaaggaaaaaataaatattgaaatgaaatcagaaataactattaatggatatttcagcaaccttattccatatataaaaaaagaaaatgatgataatatttatccaacttcaggagacggaagaaagaagattttagcttactccttgataaaccatcttattcaagcacaagaaggaaataaaattattattcatttagttgaggaaccagaaaatagtttacatagatctatgcaaattgctttatccaaacaattatttaattctaaagtatataaatacttctttctatcaacacattcttctgaactattgtacgagatggataacacatcgttaataagaatttattcagaagatcggataaactgtgattcatatatttataatgttagtgaagaatataaaaatgtaaaaaaagaacttaatagagcattgtcaacagctctttttgctgaaaaagtacttttagtagaaggtccttcagaaaaagtattatttgaaaaaattttagaaaatgtatatcccacatatgagttagatggcggttacatattagatgtaggcgggataaaatttaaaccatatgtagatgtattgaaaggtttaaatattactcctatagtaaaaaccgataatgacttgaaatccaaaagggataataaaacaatttttgatttaataggaattaaaagatgcttaaaccttattaatgatgaagagaaatctattgagccagttgagattgaatattttgaaaatgatgcgcaaggaaaaagggttccgaataataaagtgaaaaaacaaaagataaaagataaaaagttagaattatatgtgttatttcaagacacaatagagcattttaaagaaaataatatatatttgtcaaaaatagatttagaacacgacctctatgaagttattggagacagaatggaagagattttaggttcaaacccaataaactaccttcaagatcataagctacttaatatgattgaattaactaatgaattaacgagaacagattgtaacaacataattaatcatcctttatttgaatctttaagaaagttggtgccaaatgaagttgattga

SEQ ID NO: 75285 - DNA, 1542 bp, Bacillus subtilis
ttgattgatcaggaagatagaactgcaattttagaaaataacgatgatatagttgtttcagctagcgcaggctctggaaaaactacaattatgataaagaaaatgggaatagagcttgaaaaaataacagaccacagaacgatagcagctattacatttactgtgaaagcaactgatgaaattaaaaaaaaagcagtaaaaaatattaagaaaccctttgttgttatgacaaatgattcttttattgagaatgagataattagaccttttattaaagatgcatttggtaaagattacggaaatgattattctgttgaatatggaaatgaatttaaatttgacaattattcatctggactaaaccagttgagaaataataatattttaggtagttttgaagataataaacgcaatttcaattttaaagttgctaatgatattttagaaaaatcattagctgcacaagaatatattaaagcaaagtattcatggatctttatagatgaataccaagattctgatagagacatgcaccgtttttttatgaagttaaaaaataagctaaatataaagttatttattgttggcgattcaaaacaggcaatttatttatggcgtggggcaatgagtaacatatttaaattattagagaaagaaagttttagctcttatgaactcgtaaccaattttcgttgtgataaagaaattgaaaactatgcaaacctatttcataattcgcagtattatgtacacctatctgagaacgtagagaatgtagtttttaaggaatacaacaattttagtaattattatgagcgaaagaattttgttggttttatagatgaattcaaaggacttattttagaaaaaactcttgagctagataaagaagtaacaataatcgccaattataatgatgatgctaagaagataacggagctattaaatctagaagggtttgattttgtttttattcctaagaccccaattgatgaaggcattcctaatggatacttattaaaagaacttgcattattttcaaagaattcaacatacacaatctatgattttttagaaaaaacccatattgatgaaagagttcgcacgagatatgaagttaataatattattgggaaactaaagaagaatacaaatccagacatagttgaagaagtagtttctagcttagccaattatttggaaatatcaataggggaagatgaaatcgaaaagttctgtgaaagtatttgtgatagtaaatatgatatggctttcagattaatagaatcaaaacataaagtaatgacggtttttgcttcaaagggattagaatttgagcaagtaataagcttttcacgctattataaaatttataaagatgaaaatttgcaaaatcactatgtatgtattacacgggcaaaagaaaagtttattatgttcattgatgataaaggatactacgattttgttttagaagtagcagacagcaatggtattaaaaatatagaaaaactaattagatataaggaaagttgtaattag

SEQ ID NO: 75286 - DNA, 1761 bp, Bacillus subtilis; identical to SEQ ID NO: 75284

SEQ ID NO: 75287 - DNA, 1548 bp, Bacillus subtilis
atgaagttgattgatcaggaagatagaactgcaattttagaaaataacgatgatatagttgtttcagctagcgcaggctctggaaaaactacaattatgataaagaaaatgggaatagagcttgaaaaaataacagaccacagaacgatagcagctattacatttactgtgaaagcaactgatgaaattaaaaaaaaagcagtaaaaaatattaagaaaccctttgttgttatgacaaatgattcttttattgagaatgagataattagaccttttattaaagatgcatttggtaaagattacggaaatgattattctgttgaatatggaaatgaatttaaatttgacaattattcatctggactaaaccagttgagaaataataatattttaggtagttttgaagataataaacgcaatttcaattttaaagttgctaatgatattttagaaaaatcattagctgcacaagaatatattaaagcaaagtattcatggatctttatagatgaataccaagattctgatagagacatgcaccgtttttttatgaagttaaaaaataagctaaatataaagttatttattgttggcgattcaaaacaggcaatttatttatggcgtggggcaatgagtaacatatttaaattattagagaaagaaagttttagctcttatgaactcgtaaccaattttcgttgtgataaagaaattgaaaactatgcaaacctatttcataattcgcagtattatgtacacctatctgagaacgtagagaatgtagtttttaaggaatacaacaattttagtaattattatgagcgaaagaattttgttggttttatagatgaattcaaaggacttattttagaaaaaactcttgagctagataaagaagtaacaataatcgccaattataatgatgatgctaagaagataacggagctattaaatctagaagggtttgattttgtttttattcctaagaccccaattgatgaaggcattcctaatggatacttattaaaagaacttgcattattttcaaagaattcaacatacacaatctatgattttttagaaaaaacccatattgatgaaagagttcgcacgagatatgaagttaataatattattgggaaactaaagaagaatacaaatccagacatagttgaagaagtagtttctagcttagccaattatttggaaatatcaataggggaagatgaaatcgaaaagttctgtgaaagtatttgtgatagtaaatatgatatggctttcagattaatagaatcaaaacataaagtaatgacggtttttgcttcaaagggattagaatttgagcaagtaataagcttttcacgctattataaaatttataaagatgaaaatttgcaaaatcactatgtatgtattacacgggcaaaagaaaagtttattatgttcattgatgataaaggatactacgattttgttttagaagtagcagacagcaatggtattaaaaatatagaaaaactaattagatataaggaaagttgtaattag

SEQ ID NO: 75288 - DNA, 1797 bp, Dehalococcoides mccartyi CG1
atgttcctttcgcgtattgagattaacaacttccgtaatttcgagcatctggatgttaagttaggacgcacaacagtagttgttggtgagaacaatgtaggcaaatcgaacctacttcatgcactccgactgatattagatcctaaactgcctgacgccgcgcgacagctaaaagaagaagacttctgggatggattgaaacaaccggtaacgaataagttagcattggaaatcgcggtcgaatttcaagatttccaagaagataaaagtatcttagccgtcttgcaatcctatcttgtcaaaggggtcatccctgataccgctaggctcacgtatagatttcgtccaagatcgcctttaccaaaaggaagggatgtaacaattgaggattatgagttcgtagtcttcggcggagtcgacgaaaagaacagagtcggttatgacgttaggaggtggatgccgatcgagctcttgcccgctttgcgcgatgccgagtccgacctttcagcttggcgtgactccccgctaagaccattgattgagcgcctacaaataccgcccgccaaattggacactgtcgctggttcaattgaccaagccaccaacgaactcatgaaagagaaggatgttcagactctaatcgcaagtattgagagtcgcttggtgaagatgattgggggtgtaatatccgttggcccttctctaggttttacacctaccaatccggaccgtttgctcaggtctctcagaatgtttggagatggtacatccaagagaaatgtctcagacttgagtttgggaattaacaacattctctatttactgttgctgtctcttgagttagaacgcaaagaagctacatccgaaagggcaacaacgatcctggcaattgaagagccagaggctcatcttcacccacacctgcaacggctggtctttagagacttcttgcgcaggaagtcaccggttctgttgacaactcattcacctcctgtagcaagtgtcgcgcctctaccaagtatcttgctgcttaagcaagaccaaaataagaagagctcggttggcagttcagcgctcgaagctaaactgtcggagcaggatgttattgaccttgaacgctatctggatgcgacccgagccgagatcctgtttgccaaagggattatactcgttgaaggggcttctgaaatgttcttgctccctgcatttgcctcgcgatttgggactcctttagatgagcatgggattaccgtttgtagcgttcacggaacagattttgggccctacatcaaactcttgggctctggtggtctgaatttgccttttgtagtagtcactgacggtgactggtttgagtcgaccaaaggtgaaactataagcagaggtttccgacgagcaatagaaatcgttaaaactgctggttacccagaatcacctacgttggaggcgctatataaatctcgtaaatggccggagatcaacaagatagtttctgagcgcggagtcttcgttggcaaacgcacgttggaagtagatctcttcaatgttggttatcaaccggagcttacaagtacctttgtagagttgggagcttcgctacaaatgttggaaagagctaaagaactagcgggtatgaaagcgccaatgactgccgaagcagaggaacagttgttaagtgacatcgagcgtattggcaaaggtagattcgcccaacgattcgcggcaaaagttgatgagaaaagatgccctgattatatcaaagcttctttagctcagattgttaaggtactatcttaa

SEQ ID NO: 75289 - DNA, 1839 bp, Dehalococcoides mccartyi CG1
atgccaactatacgcctaaatcctttagaagcttggaccgcgtcgtttaacgatgagcagcgagatgctttcgaattcgatgggcattgtgctgttcttgcaggcccgggcagcggaaaaactaaagtgcttgtggctagggtagcacggctactgggatggagagcaacgggaccgcgtggtgttgcgtgtgtcacatacaacaatgaaactgttagagaaatgcgaaagcgtcttgctcagcttggatatgagcaggatcacagacttttcatagggaccgtacatagtttctgtttgtcttgcgttgttgctccttttggtcatttgttcagagatgatcttcccatcaagctaacagttgcgagcactactaaacagcgtaaaacattcgaattggcggtaagtcaatcaaaagttggaagcactccagattcttgggatctgccattccaacaatatcgtcgcacacatccgtttcgcgactcgaaaaactggaaggaagaaccacaaatagcacttctcattgaaacttatgagactctcctccaccgagagggattacttgacttcgatgatatggcgatcattgctcttgatctactccggcgacgaccttttgtgcaaaaagcacttgaagcccgctttccgttccttgtggttgatgagtaccaagacttgggttatcctcttcacgcaatcgtgcggttattgatgcgatccacaacaattgagatatttgccgttggtgaccctgatcagtcaatttacggatttgcaggagccaaccccaagtacctcagagatcttgctagcgacccggctgttcaccaaatagaattgaaaatgaactaccgatgtgctcaacgaattattgatggttcccaggttgcactagcgctcgatgaacctcacaatttcatctcggcaagagatgacgctatcggcgaactcttctttttcgaatgtccagcgggtctcgcccaacaagcagcgacgatagtgaatcaaattatcccaagcttgaacaagttgggcattcaaaacgggcaaatcgccattctctatatcgacaagttcgacgctggagtcttggccaaagctctggaagttgccggaataaagtttgctggagaacgagacttaaggtatcctagaacgccattaacaaggtggttggaggatgttgctgcatggtgtagcttatatccgcacgtgcaagatactgctgggattgatattctattgtccacatggattacaattaaaaccgatgccggtgcttctgtcgattcggcactccttaaggagaaaacagaattcttttcatgccttgcccaaacagcaaggccaaacatgcctttggcggaatggcttggtgttcttaatgcctcactcggaatccgaagttgtttggtcaaacgagtgtctgtacctgatgacctaaccgtgtgggatgatatagttaaccaatgcatagatggacaccctttatctagttttactgttgatgatttcgctcgttgtggaggaagatcggatactgtaactctgacgacactccacagcagcaaaggtctggaatatcagatcgtaattatgcccggactcgaacaagggcgactccctggttgggctgctacttcagcaggcgcactttcggaagcaaggcgagtgttctatgtgggtatgactcgtgctaaggatgccgtctacctcttgtattctggttggaacaaaaatcggtatggccaagtattcaagaatggtccttcgaagtttgtactagaactactctatgagttaggcataaaacctagcgtcgttcagaacccatga

SEQ ID NO: 75290 - DNA, 2106 bp, Bacillus bombysepticus str. Wang
atgtatatttctgaattagaagtaacaaattttagaaattttaaaaatgctaatttcaaatttaaaccaggagtaaatactctaattggagagaatagttctggaaagtctaatgctttatacgcaataagattacttttagatgatactttaccgattaattcttcgaaatttttagaatcagattttaatcaaaatattattgattggaaaggtcattggattgtattaaaacttacttttaaagatttagattcgagtgaagctgccagctttttagcgcatcattctgaggacgtaactgctgaggaatcaataggtacttacgcactttattatcgtccaaataaagctataagaaaaagtttgtttgaatttacacaacaatcaagacctattgaagaattggacgaaatattaaaaagtataactgttaatgattatgaaacagtctttacttgcagagtgaatgcagattttaatgatgaacaaatgtataaagagctggttggagatttcgagcaaggaattttcccaaatccagaagacgataatactaatatcttaggaaatatttcaccacatataacgctcataaaaaaagaggtttcatgtactttcgtaaaagccttaagaaatgtaatagctgaattaaaacaaaggaaaagtagtcctttgttaaaacttttacgtggtacagcaaatgatattgaaattgaagaagccgatgcaatcaagaaacaaataaaaacgttgaataaaaatataagtgaattagaagaaatagatatattaacgaaaaaaattaaagcgtctttaaatagaactttaggctatacatattctcctaatgtaagtgtcaaatctgaattgcctgaggaaatggaaactttgctacactcattaactttatgggttggagacgatgtaagtagcaatcaagggaaattagatgacttaagcttagggggtgcaaacttaatttatattactttaaaacttttagaatatgagttttatcaagatcaagaagaaaaagcagcacactttttattgattgaggaacctgaagcacatattcatacacacgttcaaaaaactttatttgataaatatcattttgagaatactcaagttattataactactcattctactcatatttcttcagcgagtaagattgactcagtgaatattctaattaaagaatctggatttacaaaagtctgtcaaccgaataatggattagatgctgacacttgtaaacgaatagaaaggtacttagatgctacaagatcaacattattatttgctaaaggcgtcatgttagttgaaggagatgctgaacttatattaatcccagctatgtttaaagctgtgtttggtcttagtctcgatgaaataggcgtaagtgtaataaatgtgagtagcacagtatttgagcatattgcatgcctattcgatgaacaaaggattcacagaaaatgtgccattgttacagatttagatgaggcaatagaaaccttgccagaaaatccggaagaagataataatgagcaagaaaaaatgaggaattcccaaatagccggtcaaataagatcaacattattagatgctacatatggcataaatccatgggtagaggttttctacgcacctcacacttttgaaattgattttgctttaaatttgaacacttatgaaataaaagaaagtttaccgtcaatttataagcgacagtctgatattgatagttctacaaaaaagttagattcggaagataaaactattgttggaaaagaagcgcttagactagctaataaagaaggtaaaggatggtttgctttattagtttcagaaaaacttagttatgaaactgtcatacctgaatatattttaagagctattgcatttacttctgaacatattaaagatgaacatttaatagcaatggcaaaatatcgaataaaagaaatgaatattgacttacaagtggacattaatacaatgacgttagatgaattaattgaattgcttctaccagaagatggtttggttaaattaattaaattgttaggagttgaattaaaagaacatgtatattaa

SEQ ID NO: 75291 - DNA, 1800 bp, Bacillus bombysepticus str. Wang
atgtatattaatttaaatccttttcagcaagctgtaatagatgaagaggggaatacgcttgtaatagcttgtccaggtagtggtaaaacaagggtattaacaatgaaaattgctaaagagcttgaaaacttaaaaaagagaactaatagaattgcagcgttaacatttacaaatcgcgcagctgatgaaattgataaaagaatacatgaaatgggcatagacagctctaaattatggacaggtacaattcattcattttgcttacaatggattattaaaccatacggaggttatttaccagaacttcagaaaggtttttctatactagatgaatttaaggcacaggatttaaagagtagatttaaaaatgacttcgctatacctagatacgaagattttatcaccaggagggacaggcagggaaattatataaatgcagaaagaaattttaatgaagctgccgaaacctatcacaaatatatcttagagaataaattaatagattttgatttgattttatatttttcttatttattgcttggaaagtatcccaaaattgctaataatctttctagaatttttaaatatttttttatcgatgaattccaggatactcaagatctccaatatgcaattgtcggaaaaatagtctgggcagctgaaggacaatgtaaaattttccttgtcggagatccggatcaagcaatatttaaatcattaggtggcgttgtaaaatcttctacggaaataagccaagagattggagggtatagcattaaaaaattagggttgaacggtaattataggtcaacacaacgtattataaatttatacagtaattttcaaagtacagatttatcaattgaatcattgactaattattgtgatgaagatggagttatttcgtttgatagaactatacataaagaaaatttggtagagaaaatcacagaaattatacaagaacaaatttccgatggagttcccccgaatgaaatttgcgtactagcaccgcaatggagttttcttacctctatggctagaaaattgaaatcacatttaccagatgtagcgtttgatgctccaggcctaactattttgccgcgggatcgggataatttttggtttaaaattgcgaggattattttaataaaccaagagcctaataagtatttaattagaatgaaatgggcaaaagaaatcttagaagaattagttatgttgaatagtactattattcatgttgagatcgaaagctgcaggaaattcttaaaaataataaattctataaatataccaaaagaagatgcggtcgaatatttagaagaagcctttaagtacatatttgaaaagataggttttgattatagttccagtgatttattgatagaacagtggaagagtttttttaatggactaagtcgccgttatgagcatatagattttagtgatattcctaaagatattaactatatgaaaaagatgtttaatacaaaaaaaggggttgttattaatacttgtcaaggtgttaagggagaagagtttcatacggtgattgcttttggcctgttaagaggatatgttccacactggagtcaaataattaatcgacctacaagtaatgaaatagaagaatcaaataaattattatatgttatatgttctagggctaagaagaatttgtttttattttcggaaagtggaagattgacacaaagtaaacaaccgtatcaagtaaataatcagttgaatagaattgtttttgagtttaatagtctagcaccatatagatcggagtga

SEQ ID NO: 75292 - DNA, 1680 bp, Streptococcus agalactiae
atgaaatttgaaaaagtagttattaaaaattttagaaattttgataatgttgaacttgacttatcaaataaaaacatattttttggtctaaatgatgtggggaaaacaaatttcttgtacgctctacgatatgtatttgataaagatattcgtaaacaaaaccttttagattcggattttcataataagcagcttgataaaccaattgagattgttgttactatagatattagtgatgttgctgacagcgattgtcaaaaactccgtgcacagctaaaaggtgcattgctaagtgagcataataaggtatatataaagctttttgcagaatatagcaaaacagaaatgctcgctctaccgatattatcgtggggtggcgatattaatcatctttacgaaatgaagcaaagaggatatctatatgaaatagactatgtatttaatgtcatttatattgactcttatgttgatttgtattccctatttaaaaagaatgtgagccagcttgtcagaaatgaaaaggacgaagataaagatattctggcaaaaattcaaaatacagttgatgatttgaatggtcatattgcttctctgtctggaattaaagaatttgaggataaacttacgccagaatatcaaaaattccatgatgaagggatatctgtttcaataaaatccgaaatcgcagtaaagggattgtactcaaatatcatcccatatattaaacaagataatgatgataatttatatcctactgctggggaaggtaggaaaaagttattggcatattcaatatacgacatactgtcagatgaaaatgcggaaaagaaaatcaatttgtttttaattgaggagcctgaaaaccatcttcataagtctatgcagattgcattatcacaaatactttttaccgatagcaaatacacatacttgtttgtaacaactcattcgccttttgttctttatgaaatggataatgtaaatttagttcgaatatatagtgagcgaaaaatcaatagtattagcacattttataaagtgcctgatgcttatgagaaaaacaggaaaatgttaaaccgttgtttgtcagaagcaatctttgctaacaaagtacttttggttgaaggaccatctgaatatatgctatttagcaaagtcctttcagtagtgcatcctttttatgaagcagatggaatatatattttaccagttgatggtgtgggatttgaaacatatttttctatcctggatgaacttgaaatttttaatgtggtaaaaactgacaatgatttgagagcggtaacaggaaaaggtacatatagcgttttaggcttttcacgctgtaataattatattggggaaaagcgtctgcctactaaacaaattcaagagaattctgtttctgccaagaggagtttatataattcaaatataaatactttggataaaatacgaagtgactttcatattttcttatcaaaagtggatttagaaaatgatttagacgagtttttgcatgatagattatcagctttattggataatgataatcctgttaaatatttacaagatgcaaagcactatcatatggtggagttgattgagaaactttcggatacagattgcagaacaatctataatcattacaactttgcatgtttgaaggaggttgccgaatga

SEQ ID NO: 75293 - DNA, 1500 bp, Streptococcus agalactiae
atgaaactatctccaattcaagagaaaatagtagaaactcccggtaacttaatagtaagggcaagtgcaggaacaggaaaaacccatacaatggttaataaaattgctaaggaaattgatgataaccatacacataaagttattgctgcaattacttttacaataaaagcagcacaagaaataaaggatagattgtctgtcgatgtagttcaacacttcattggaacaaataacagtttcgttattgaggaagttataaagccttttatgaaggatgtctatggtgctgatttcgatttggacatgagtacggactattcagctaaagttgatacttttcaagaagctattgaaaaaataaggaatgaaggtatcctctgctcatatcgagataataaaaggaactttatttttgatttggctcaagaaattgtagaaaattcttcggcttgtaggctttatcttcaagcaaaatattttaaaatatatatcgatgaatatcaagattgcgacaaatcaatgcataaattctttatgtatttatgtgatgaattgaatatcgaaacctttgttgtgggagatgaaaaacaatcgatttatatatggaggggtgcttatccagaggcttttaaaagcatctggaacaaacccaattttaaaaagatatttatgggagataattttcgctcttgtcaacaaatacagaattattctaatctattatgtgatgagacaagaagtctttacaatcctacggaaaatatagataatattgtgtggctttctcctacaaaggcaaattgggcaacagaagtattgtctaatattgttcccgataaaaagtcagcattattgcggttttctaatgataacgcacgaataggagcaagcgaattaataacaaacggtttagagtatgtttatatcccacagactcctattgctgatattacaacagatacagcgtggctttatacagcaattgctaaataccttataattgaaaagtattctgcatatgatgtgatttcagaaatacctgttgaaggaaatgaaagtcgcaaaacagtatccaccgtaaaaagattactcaaaagaattgaagagactatagatgatgagcagtctttcggctcgtgtgtcacagcattggctgaatatcttggatatgatactcgccctgatcacataaacaaattattcaaaacaatttctgataccagttttcatgtggcatttgaagcggataaatacaaacacatcgcaattacattccactcttcaaagggattggagtttgaacaggtaattgtatttgcagaggattatcgattgtctgatatgtcgagtatatacaaccattatgtagcggttacacgtgcaaaaagcaaattgattatcgttaagttaaacaattacaatgcgaattgttttcagaataatttacaaaagatattttctgaaagcggtcataatatagaagatgtcgttttattttga

SEQ ID NO: 75294 - DNA, 2097 bp, Flavobacterium psychrophilum; identical to SEQ ID NO: 71912

SEQ ID NO: 75295 - DNA, 1902 bp, Flavobacterium psychrophilum; identical to SEQ ID NO: 71913

SEQ ID NO: 75296 - DNA, 2097 bp, Flavobacterium psychrophilum; identical to SEQ ID NO: 71912

SEQ ID NO: 75297 - DNA, 1902 bp, Flavobacterium psychrophilum; identical to SEQ ID NO: 71913

SEQ ID NO: 75298 - DNA, 2097 bp, Flavobacterium psychrophilum; identical to SEQ ID NO: 71912

SEQ ID NO: 75299 - DNA, 1902 bp, Flavobacterium psychrophilum; identical to SEQ ID NO: 71913

SEQ ID NO: 75300 - DNA, 1971 bp, Thauera sp. SWB20
atgcatgtcgagcgcgtcacgatcaccggcttccgctgcttcggccccaccccggcgactatcctgttcagccaagggctcaccgcgatcgtaggacccaatgcttctggcaagaccgcggtgctgcaggcactcatgcggctctttggggtcacccgggcgcaacgcacgatcgtcccctccgatttccatgtcgcgacgacggaggccgagcgccccaagtcgcggacgctgacgatcgacgtgcgcttgagtctgccggaactggtggagggcagcgcgaccgccgcgacggtcgcgcccgtgttccgccatgtgcgcattgagcgtcccggcggcaccccgctgtgccgcctgcggctgcgtgcgcgctgggatgatgacggcacggccgagggcgccgtcagccaggacctgaactggatcaatacggttgacgacgtcgttcgcgacgatcaggcatcgccggtggcgccaggcgaccgcggactgatccaactgttctacacgcccgccagcagggacgccgccacgcagatccgggccacgacgggagccctggccgctcgtctgctcaaggccatcgagtggtcggaggacacggaaaaggcggtcaacacggccagcgagcagctgatgaccgcgttcggcagcgaaaaagccatccaggccatcagcgaatccctgtccaagcgctgggggaagctgcacgacggcgacatcgactgcgaacccgaactcagcctgatgagccggcgcttcgaggaggtcgtcgcgcgtatcggcgtgatgttcaagcgggggccggccggcgaggaccggggactcgaggcgctgagcgatggacagcagtcccttttctacttcgcactcgcggccgctgtcttcgacgtggaacgcgcggcggtggcaggccaaatcaaagggttccgcgccgaggagctcagcgtgcccgccctcaccctgttcgcggtcgaggagcctgagaaccacctggtgccctactacctctcgcgcatcctgcagcagatccgcaccctcgtggagacgggtgccggccaggcctttgtgtccagccattcgccgtcggtcctggggcgcgtcccgcccgacgacgtgcgctactgccggcgcgacatggcgaccggcgtgtcgacggtgctgcccatccccatgccggcgggcgacgtcgaggccatcaagttcgtgcgcaacgccttcctggccttccccgagttgtacttcgcgcggttcgtgctgctggtcgaaggcgattcggagcgcatcgtgctaccgcgcctcgccgaggcgctgggcctgctcgtcgatccatcgttcgtcgcgatcgtgccgctcggtggccgccacgtgaaccacttctggcgcctgctccacggcctgggtatttcctacgccaccctgctcgatctcgacctgggtcgcgacggtggaggcttcggccgggtcaagaatgccctgcagcaactgctgacgctcggggttccgcgtgagcagatccttgcgctctcggacggcacctacgtcagcgatgaaagcctggccaagatggagacctgggacacagcccatctcgagggctggcttagctacctggaaaactcgtctgcggtcttcttctcctacccgttggacctcgacctggcgatgctggccgccttcccggccgcctacgcggccacgatcgacggcaccgggcctcgcatgaccaacgaagacgccgccgaggtggtgctgggaactgcaggaccggggctggccagctacaccggcaacgcactggcgttccgcgaccatatggctgcgtatcggtaccattttctgacgcacagcaaacccgccacgcacctgcgcgcgctgacgcatgtcgacctgcccgctttgaaggccggcatgccggcgccgctcgagcgcgttctgcggcacatcgctgcccagttgtcggggctgtga

SEQ ID NO: 75301 - DNA, 1902 bp, Thauera sp. SWB20
atgtcgttgccgccgagacgcgtcccgcccggcgactggcagccggtcggcgtggacagcctggaacccaatgcactgaccgtggtgaggtccggcgaacactgctcggtgctcgccgggcccggcgccggcaagacggaactgctcgcgcagcgcgccgcgttcctgctgcagacaggcgcatcccccgctccgcagcgcatcctggccatcagcttcaaacgagatgccgcacgaaatcttgcgcgacgcgtgcgccagcgttgtcaccccgaccacgccagccgcttcgactcgctgaccttcgatgcattcgcgaagggtctcgtggatcggtttggacaggcgctgccggaccgttggcggccgacggccgactacggcatcctgttccccaagcgggcccactgggctgacttcctacggcgcgcaggtctcgcccaggacaacctgtttgggcaggccgcggtgcaggggctctcagtcaactacttcgagcgccgccatgtgcttgatgagcgcttgcccgaggccggctggccgccggtaactgcgggccgctgggccggacagcggttttgggacgagcagttgcgcggcatcgcgcgcagctacctcaccttccccatgatcagccgactggctgaactgctgatccgcgtcaacgcctccgtgcgcaacgccttggcgctgacctactcgcacgtgttcatggacgagttccaggacacgacgcaggctcagttcgacctcgtccaggcgatcttcctgggcacgccgacgatcatgacggccgtgggcgacaacaagcagcagatcatgcgcttcgcactcgcgatggacgatccgttcggcgccttcgaacagtctttcggcgcgcagcgaatcccgctgctcagcaactaccgctcctcgcccgaactcgtccgcattcagcacgtgctggcgcaagcgctcgacacggccgcggtgcacccgcagtcaaaagccccggccagcatccacgacgcctgctgtgccatctgggacttctccaccgtgaacgctgaagccctgaccctggcccagtatgttgcgtcacagatgcgcgagcacaacctgcggcccaacgacttcgtgctgctggtgcggcagaaggcggaagactatgcgcaggtcctgacacccgctttcgtgaccgcagggatcccgctgcgcaacgaagccgcctatgtcggttcccagatgctgcaggagctgcttaccgagccgctgtcggaattggtgctgctgatccttcgcctcgcctgcgccgcccggagcgggtcgacctggagcgaagcgcagcatgtgctggcagacctgcacggcattgcgccgaccgacgaccgcgctcgccgcgccttggcccaagatctggatgcctttgcacgccagttcagcaagcagcatccccgacctcccgatacggaggcggctgcccgctcaatcgtccaggacgtgatcgctttcttaggccgcaatgccctcatcgcggcctacactccctacgggcaagggggctggttagaggaggtcgagaacagcctggcgttgcacctgcagtcgagcgccgcccaggcgcccgactggcatgcggcacttgaggcctacgaggggacgaaggcacttccgctcatgacgctgcacaagagcaaggggctggagtaccacaccgtgatcttcgtaggcctcgacgactcggcttggtggagctacgctcaggacaccgccgacgccactgcaggcttcttcgtggcgttcacgcgagcaaagcagcgggtgatctttacctatacgccggagcgcggggcacgaaccaacattgcgccgctatatggccttctggctgcggctggcgtgcaaacaacctcgatagcttag

SEQ ID NO: 75302 - DNA, 2304 bp, Cupriavidus basilensis
atgcacctaaagaagctggccgtgcgcaattttcgccgactgcgcgacgtcatgatcgatcttgcttcggacatctcgattttcgtcggtgcgaacaacagcgggaagacttcagtcggccatgtgctccagctctttactgagcgaggaaggttcagtgtctatgatttcagcgccgaccagtggccgcagatcgtagcgtacggcgagggcgatgccaatgcgcgcttgccaacgatcgaggtcgatatctggctggagatcagcgctgacgacatccaccgtgtggttgatctgctgcccagcttggcatgggaaggttcgctggttgggatgagggtggtgttcgctcccatcgattccgacgcgacccgcgcgcgttacgccgaggcgcggcaacgcgcgctcgaggctgttgctggcggagaaggtcccgcattcgatccctcgccgcgcaatttgcaggactatctgcgcgaccggttgaacgacgaatatgagcttcgccacttcgtgctcgatcccacccggttcgacgcgaacatggtcgcgcagcaagattatgaccccatgcccctgaccgggcgtgatcgcagcgggcgcgacattctcaatggtctgctgcgtatcgacttcctgcatgcgcagcggcatcttgctgacgcgccgggcagcacgcgggccgagaccctctcgcgcgtgctgagccgcttctacgaacgcaacctcgagcagaggggcgaggatcttgcggcgctgcgggcgctcgccgagtccgaggtctcgctgaacgagcatctcgagcaggtgttcgagccgaccttgcagcgtctggcgcaactcggttatccggggctcagcaatccccggctagtgatccgctcggcgctcgatcccgcatccatcatgagcagtccgcacggcgcgcgagtgcattatgcgctcggcccggacgacggcgcgccggagccgccgacgctgcccgacagctacaacggtctcggcttcaagaacctgatcttcatggtggtcgaactccttgaccttcacgcccaatggcttgcgatcgaggataacaggccgcctgtgcaccttatcttcatcgaggaacctgaggcccatctgcacgcccagctacagcaggccttcatccgcaaggtgatgtccatcctcgccttgggcgcggaggaccgaacacactacacaagccaggtcgtcgtcacgacccattcaactcacattctgtacgagcgcggtttccggccaattcgctacttccgccgcagccgcgccgagcatgtttcgacctcggccgtgctgaacatgtcggtgttctacgatgctactgaccacgatgtccggacattccttgagcgctatctcaagctgagccactgtgacctgttcttcgcagatggcgcggtgctagtggaaggcaatgtcgaacggctgctgcttccacagatgatcgccaatgcggcaccgcgcctgcagtcgacatatcttactgttcttgagattggcggcgccttcggctatcgcttcaaaacactgatcgagtttctcggtctcacggccctcatcattacggacctagacagcgtcttcgggcctccggcgcccgctgctggcgctgtggagaatggcgcggacgccggcgcaccggcggttggtgataatggggcggagctcaaggaagaagatgacgacgacgaggacgctgaagctggcgccggagcagaaggcaagccgggcaaggtatgcgtcgcgagtcatcccggcgctgtgacctccaaccagaccttgcggcaatggctgccgagatgcggcacggtggccatgctttgggaggctacagacgaccagaagacgcaggcacggagcgagaacagcgaggcgatcgtgcgcgtcgcctatcagtgccgcacaaatgtgacatgggcaggtgaaacacaagcgttggccggtcgcacgctcgaagaggcattcgcgctcgagaacctcgcctggtgccaagatatcgcgcgcaagccgctgcagcttcgcatcgctaggtccgacaacaaggacctagctgagctaacccgccgaattcatcggcgggtccaggcgaagagcttcagcaagaccgatttcgccttggctctgttggccgaggatccgacgcaatggtcggtgccgacctatatcgccgaagggctgcgctggctcgagggcgaggtcgccccaccggccgagcccgatgacgacggtcaagaggagcaggcggttggtgatccggccgtcgccgcggtggtggcatga

SEQ ID NO: 75303 - DNA, 1791 bp, Cupriavidus basilensis
gtgatggtggcaggcgcggggtcgggaaaaaccacatcgctgatcaaagcgctcgcgcatctccgtgaaacgcgcggaaaggcgctacggcgtgcgggccagcagatcgcctgcatcacttacaccgaagtcgcggtcggcgagatctccgccgacgtaggcgttaccccgctatttcatatctcgaccattcacagcttcctgtggtcggttgttcgctcgttccagtcagacattgctgcctgggtcgtcagccgtattgaggagaagatcgccgagaagcgcgcccattacgacaagcctggtacacgggccgcgaccaagatgaggctcgatcaggagatcgtcggcctcgaagccgagctcgaggcggtaggtcgggtcgagaagttcacctacggaacgggcagccgttactccgaaggcattctcggccatgacgacatccttaagttgaccccggcctgcgtcgagaagcaccatttgctacgcgaaatcgtggcgcggcgatttccctatattttcgtcgacgagagtcaggacactcagcccgccgtcatccaagcgctccggcagatcgccagcgagcagcccctctgcgtcggctttttcggcgacccgatgcagaagatctacggtaccggagccggtgcgatcgagctgcttcccggctggggcgagataaccaagccggaaaacttccgctgcccgacctcggtcctcggcgtgatcaacgctgtgcgtgcgccgggcgatggtctagtccagacccgtggccgcaccgtgaccgtggatggggaagagcagtccgtggtcggcacagtcaacattttcatcctgccaagtgatgatcaaaggaccgctcgtctcggtgcagtacgagcctggctggccgcgcaaaccggcgacggtttgtggaccagtgacatgcgcgacggcgatgtccggttgctggtgctcgtgcatcgcatggccgccaagcggctcggctttgcttcgctctactcggctctaaacgatcacgcgccgcagagcctgagcgaaggcattgccgacggttcggcctggcctcttcggccgttcgttcagcaactgctgccgctgatcgtcgcatcgcgtgcaggtgaccagttcacgatcatgtcgatccttcgcgcagacagtccctgcctggaaccagaacggctgcgcgggcaggcagtggctcccgtcctcgtcgcccttcagcacgcaatcgagcaactggccacgctgctggccgacgggtcagcagcgacggcccgcgacgtcctccggcacgtccgggacaccgagctggtggctctcgatgaccgcttcgccgcgcatctcatggacgacccggtcgacgatggggcggagggctttggcaatgtcgcggcgttccttgaatgcaatgtcggcgaactctgggcccaccgtaaatatatcctcgaagagtcgccgttcgcgacccatcacggcgtcaagggcgcgcagttcgagcgcgtgctcgtggtactcgacgatgaggaggcatcctacaaccaatactcctacggcaaatatctcggctacgcgcccctgtccgacactgacaaagcgaatatcgcggaaggaaaggagtcggtgctcgaccgcacgaggcggctattttacgtctgctgctctcgtgcggtgaaggacttggcagtcgtgctgttcgctgctgatgtagcggcggcacgatctgccgtggtcgatgccaaactgtttccggccgcttcgcatcatggagttgagcagctcggctaa

SEQ ID NO: 75304 - DNA, 2067 bp, Bacillus cereus 03BB102; identical to SEQ ID NO: 71842

SEQ ID NO: 75305 - DNA, 1716 bp, Bacillus cereus 03BB102; identical to SEQ ID NO: 71843

SEQ ID NO: 75306 - DNA, 2127 bp, Bacillus megaterium NBRC 15308 = ATCC 14581; identical to SEQ ID NO: 74900

SEQ ID NO: 75307 - DNA, 1800 bp, Bacillus megaterium NBRC 15308 = ATCC 14581; identical to SEQ ID NO: 74901

SEQ ID NO: 75308 - DNA, 1818 bp, Myroides profundi
atgtatatatctaaattaagactatggaactttaggaaatatggtaatgcatcatcaattaatactattgattttaatgctcctgtattggaagtaccatttaaagaaggaatgaatatcttaattggagaaaatgactcaggaaagagtgctataattgatgcaataaaattagtgttaaaaactcatgcatacgaatggattaaaatagaggaagaagatttttattgtttagcaaataatatagcttgtaaagttagaattgaaattgaatttgaagatatcaagcctgaagaagctagtaattttatagaatggtgtggatggaatgataaaggagagcctaaacttgttctgatttatcaagctgaattgagagatggtcgtataattccttcagatgttaaggcaggaatggacggtataggtcatgctttaacttatgaggcacgtgagtttcttaaatgtacatatttaaaagctctacgtgatgctagcagtgaattaacagcgaaaaaaaattctcggttatcccaaattttgagagcacataagttatttgaaagaaagaatgtactttcagagagacatgattttgaagaaatatttgaaaatgcacgtgcagagataaatggtaaatttaataaaaaaggagaggaaagagattattctattattaaaaatgctattgataaatatatacaagcttttatcaatgatgatattagtactgattttaatttgggagggagtactataactaatattttagaaaagttatcattaggagtcttaaaccaatcgaatttaggtttaggaacaatgaatcgtttatttatggcagcggagttgatacatttagagaaaactaattggaatgggttaagactttgtatgattgaagaactagaggctcatttgcatcctcaagcacaattaaaaattataaatcgtttaaaacaagaaagcaatattcaatttattctcagtactcatagccccaatatcacttctcaagctaatttagaggatattattctttgtaagaataatttagtttatccattaagtgtaggtcaaacaaaattagataaagtgaattataaacatttagagcgttttctggatgtaactaagagtaatctctttttttctaaagggaatattattgtagagggatggtctgaagaaattattttaccagctttggcaaaaaaactaggttatgatttaacacataaagaaatatcaattataaatgttgcttctacagcgtatctacattttgcgaagatatttcaaagaagtaagggagagtgtatacaggttcctatttcgattattactgatttagataaaagggaatatgagagagaagaaataattgttaaaaaagaaagcaaggaaaaaagaaaggaatataactacataaaacaaaatattgattattctaaagagattgagaaaagaaaagaaggaataaaaatatctacttcttcagaagtgaaaatttttatttctaaacaatggaccttagagtggtgtttgttgaaatcaaaagcacttgaaggtatatataagactattttaaaagaggttcatcacgatatttttaacatatgtgatgataataatgaaaactgggaaaaagcattaagtagaattctattgagtaactctataaataaaacagaaatagcttatcaattgagagcaaagttagaggaattaggcggttcgttgattatttctaataatgacacagctttttatttagttgaagcaataaaacatgtatgtgagtatgaagataaataa

SEQ ID NO: 75309 - DNA, 2025 bp, Myroides profundi
atgaagataaataatgaggatatttataaatctgagcaaatttttattaatgatgctaaatttgatttggagcgtttagactttatatccgatttcagtacgtttgatttacttgctgttcctggtagtggtaagactacagctttattggctaaattgtattgtttagctcagcaattaccactaaaaaataatgccggtattcttgttttagcgcatacaaatagtgctattgaagaaatagaacgacaactaaaaattcattgtcctcaactatttgtgtatccaaattttattggtactgttcaatcattcgcaaataagtttttaacaattccttactatattagtaaaaataaaaaaaaggttagcgttattgataatgaaatgtataatgaattatttaaaagtagacttaaatattctcgatcaaagtctataaattatattttacacaaagatccttctaaattgtatgagtcatatcttaagtataataaggagtctgataaagaatgtgatgttataaataatggtaagttatttaatatagaagtacctcctaaaacttggataaaagaagataaagtagaagaggaaattaaaaagataagaaattttattgttagtacaaaaattagtttattctccgaaggatatttgaactataacgattgtttctttttttcttttacttatctaagtaaataccctcaaataataaatataattcaaaagcggtttaagtatgtttttattgatgaaatgcaagatttaaatcaagaacaagtagatttgattgaaatgatttttcgaacaaaaagttcagaatcaattattcaacgtataggtgataaaaatcaagcaatatattcgagtaatagaggattagaggaagagagtgtatggaatcaagaatcaaatggaagtagaattaaagtaaagactttaaataattcttatcgtttgacccctatattaggaagattagtagatggttttgtattgaaacgagataaaggatataaagtagaggggatagcaactcataatgaagtaccaccatatttaatcgtttataataatgaaaacgatggtctaaaattgaagaataagtttaaagaacttataacgaagtataacttatattcttcaagtcaaaataaattcaatgggtatcatattattgcttggactacggaagtaaaagataaaagcaatgctcttcatttgaagaagttatttcctgaatttttaaaagagaaaacacaaaaaaaagaacactttaattctttagaaaaatatttatgcttctttgattcggatagtttaacctttagagaagtacaggaatcattattaaatggtattattagagttttaaggttgtatagagtgtttgaaaatacactacaaaaaaaatattatacaaaagaaacatttattcagtttcttaaagaaccaaaaaatgatgggttagatcattataaagcatttaaagaagtattatatgattggtgtattaatttgattaagcataataatattgagtatgtttttaatgactatttatcttttataactgattatttgtctcaaaatttaaaaaactttgtggtagatgataatgatcctttttttaaatatactggaaatataagtaataataaaattaatgcctcaaagaataaagaaattaatagtattgatataaaattatcttcaattcataaggtaaagggacaaactcattgtgcaactatgtatattgaaactgaatttcataatactgagtcttttaaattaactaagaaaggatgtaaaacacctcttttttttcaaaaaaatgagtataaaattcaaaataggaaacgaattgatcaaactttaaaaatgatgtatgttggtttttctagacctacacatttactttgctttgcagttcaatatgataatatcaaaaatgatattgaaaaatataaagatgctggttggattgtagatagtagtatagtagaaaaataa

SEQ ID NO: 75310 - DNA, 2313 bp, Stenotrophomonas maltophilia
gtgcatcttcactcgtatcgtctcaggaattttcgacgcctgaaggatgctcatattgagctggctgacgacatatcaatattcgtaggatcgaataacagtggaaaaacgtcggcaactcaagccatccatgctttcgtcgcaggcggaagggatcgcttcagtctctatgatttcagctcttcgtgctggaagactttcgatgaagctgcgaatatcaacttggccgacccgattcccgagggtttctcactcccaagcatagaccttgatctctggttcgaagttgcagcgccagatctctatctagtaattcccttacttccgagcaccgcatgggaaggaaccaaggtcggcataagagtttccctgaccgctcgaagcgccattaagctcattcaaaactaccaggaagctaaagccaaaggtacagggcaggctgcggaactgccgcccgagtcgcagtatattccctggcctcgctccatgacggactatctccagcgcgaactcaggaacgaatatgagctgcgctacttcatcttggaccgcacgcaattcgatgagaccttccgcgaaatcggtgactatgttccagatgaactaggtggtgagccaggcggcggaacgattctgaaatcgcttattcatatcgacaacctcggggctcagcgacacctttctgatcctaatccggaagccggcggtagatcggaagatctatcaaagcggttgagccgtttctacaagcgcaaccttagtcagaggcaagacgatcatacagcccttagggcgctgttcgaatccgagcaagcgctcaatgttcacctagatggggtattcaagccgacgcttgatcggctcgctaagcttggctatccaggcatcaataacccgcgactgaagattatgtcggctctggaccccgcccacgtcatgagccaggacgcgcgggtccactaccagatcggagatggcgaagacactgccacccttcccgacagttataacgggctcgggttcaagaatttgatctacatggttgtggagattcttgacgcccaagccaggtgggcgacgatggacaatcgccccccgttgcacctgattttcgtggaggaaccagaggcccatctgcacgcccaactccaacaggtcttcatccgcaatgttcttgagcttctcaatatagatggcgacgatggaagtatttttggcagtcaaatggtcgtcacgacccactcgccacacatcctttacgagcgaggcttcaagccaatccgctatttccgacgcaagaaagtcggcaaggaacagttgacagaagttctaaatttatcggcgttctaccaagctcagccagaggatcgtgattttttggaacgatatctaaagctgactcactgcgatctctttttttcagatgccgctattctcgttgaaggcaatgttgagagattgctcctacccgtaatgattcgaaaggtggcgaggactctccgatcggcttgtctatgcattttggaggttggcggtgcctttgggcaccgcttccagtcgcttattgagtttctcggtctgacaacgctgatcatcactgatattgatagtgtcgcccttgtggctacggcggttggcgaagatgtggatgacgaagaagtcgaggagttcgaggttccagccgatgcggaagaggacgtcgctgcccaggcccaggataatgggcaagatccggtgggtgagcctatagttacagcgcctaagaagaaatacggcaaggcttgtttgcccagtgaaccggacgctgcgacttcgaatcaaaccctcatcaaatggcttccggggaagctcacaattgaagacttgcgtaacgcctctgaagcggacagaactcacgtgctcgaagacgatacgaaggttcgcgtggcctatcagacagaacgggctgtcacttggaacggagccactgaaaccctccgcgggcgcacacttgaggaggactttggccttgaaaacccggagtggtcccaagccgcagcgaggaagccccttggtctgattgtgaagggcggggccgctggtcctgccgctcttgctaaaggccttcatgaaaaggtttcgcggaagagtttcgataaaacgaagttcgcgctcgccgttctcactgaagacgaaaatgcgtggcatgtacctgcttacatccgtgatgggcttgtctggctgaaggacgaagtacggatcgaacttgagaccgtgctgcccgacgccgttctcatcggcgaagatgtcgcgataggtggcgagcatgagtag

SEQ ID NO: 75311 - DNA, 1947 bp, Stenotrophomonas maltophilia
atgagtagccgggcaaataagccggacacccaggcagacattgatctgcgaaactgccttggagacgttccgccgcgcagcttcataatgaaggccggcgccggctccggaaaaaccacgtctctgattaaggggctgtcgtctgcaatccgaatacacggtgacaagctgaggaaattccgccagcgcattgcctgcattacctacaccgagatcgcagccggagagatatggagggatgtcggcagtgatccgctggttcacgtttcgacgatccacagcttcatgtggctgctagctaaaccgtttcagaacgacattcgcgtatgggtgtctcggcgcatcgcggagaaaattgaggcgcttgaacagaaacaggcaacctacggccccagggttcaacagcgaacaaaggacaaagacacccgagacctggagcgccttcgcaggcagtcggggcggatcgccgaagtcaaaggcttccggtacggaacgggtagtgactacgtaaagggaattttggggcacgacgacattttgaagcttgtgccgtatctcatcgctgagcgccctctctttcgaacccttctcgcgcgccaatttcctttcgtatttgtggacgagagtcaggacacgaccaccgaagtaatagaggcattgaagatcgttgagcgcgaacctggcgttacattttgcctcggcttcttcggcgacccgatgcaacgaatttatgctacgggaaccgggttggtcgaagcggcaccgaactgggccgacattccgaagccagagaattttcggtgctccactaaggtactgaacctggcaaacgccattcggcgcgatggtgatgacctcgttcagattccaggccaacgtctaggccctgaaggtatcgttccaactcctgaagggtcggcccatcttttcgttttacctgcggatgatacgcgagatgccaatctggttcgggtgcgcgaatggatggcggcacgaaccggtgatgaccattggcgagcggggaatgatgaccaggagtgggtaaagcatctcgtcattgttcaccagatggctgcaaagcgcctagggttcggagagctttacacggcacttaattccaaagcgcccacagcattcaaagacggttttctggatggctctgcatggcctctttcaccgtgtgtgaaatttctgattccgatagcgattgcccatacagaaggccggcaactcgaagtgatgcgactgatccgagagtattcgccccttcttgaaaaaggcgatctcgccagagcgaacgttgcagagcggcttaaagcacttagagagcttgttgcctcaattgcagaaggcatagccgggaattccaacgtaacgatcggcgaccttctgaagcaggtgtacgccgcagggttattaatcttcgacccccggctagcatcttacttggacccggaagcagctccacctgcccagcccgcagaagaggtggacaatgacgacgaccaagaagatgatgagtccgataaagaaatggcctcaatggatgcttttttagcgtgtcctgccaggcagcttctggcgtaccagacctacatttcagagcgctcacctttttggactcagcaaggcatcaagggtactgaatttgatagggtgcttgtcgtgttagacgatgcggagagtacccatttccagttttcttacgagaaatacctgggcctcaaagcgctttcggataccgaccgaaaacacatcgaggcaggtgaagaaacgactgtggatcgaacacgccgtcttttctatgtgagctgcacaagggcgctaaaagaactggcggtcgtcctcttcacggctgatcctgaacaggctgaggcgcatgtgcgccagcttgatctttttgaaggtgactccattcatactaaaattgtcttcgaggcaggataa

SEQ ID NO: 75312 - DNA, 1875 bp, Yersinia frederiksenii Y225
atgtatcttgcagagctcacgataaagaattttcgcaaactgcgtgaagccacgctgaaatttcaacccggtttaaatgttctggtaggcccaaacaacgtagggaaaagtgcagcaatcgatgcactccggacgcttcttgcaggtcatgatgagaattatcctcgcctcgatggttctgataggcaccgtccgcatgagggcgatccaactggtgatataagtttccattttgtcttccgagatcttagccttgaagatgaagcggactttattgctgccctcaagccaaatggggacaagacaatggaggcgcatatccatgtccagtataccgatatggataagacgggacgattcaaagtccggcgttggtgcggtgatcacccagaagtttcgcttacctcagatatgatggagaaccttcggggggtctatctccagcctctccgcgatgccgcgcagggccttcgtcctaaccgtaacagccagctggctcgactacttcatttgcttaccgatgatgcaggtcgtgacacaataaatacggctttaaagcaacttgacgaaacacttaaacaagacaaatccattcagagtacccataaagcgatatcaaccagacatgattccatgatgggtgctcagctagcgcaggagcttgccgtcgggctcagcgttactgattttcagcgcctctcttcccgactgaccctgacggctgaagccatggagattgagaagaatggattgggcttcaataatctgatcttcatggcggtagtacttagtgaattggctaaaaatactgattctgctttcaggagtttgattattgaggaacctgaagcgcatttgcatccccaactgcagcgcgtattgctgcagtaccttgcagggattccaacgggtgaaggcgaaaagcctgtacaactatttgtcaccagccattccccaaattttgccagtaattcaaagctggactctcttgtatgcttgatcgaaaacgaggctggcgttgagaccttctttccacgagatatcaaatttgaaaagggaaaacgtgaaaagttagagcgatatctggacgtaacaagggctgaactattttttgcacgccgggtgatttttgttgagggcgcagcagaactcatgttgattgacgcgcttgctaagaagatgaactttgatctcaagggatatggggtcagtctcattagcgttgagggacttaattttgactccttcctcccgctttttggagagcaggggctacgaatccccgtcgctgtagtaaccgatgcagatccatttgaagaagaagaagttgaagccgtggcagagggtgaacaggctgaagagggaattgatgacttactttctgaggctgcctaccaggaagaaacagatgctcctgatgatgaagagcctgctggcaatgctgagaaaaagaaaaaagttaaaaggaaagaggtgtacccagcgttgggagatcaggtgcggttatcggcaaataccatcaagatgaagaatctggaagatgatttcgtgaaggtttttcatggattgaagacccttgaatatgatctggcactcattgaggcgaaccgcgacccaatgcttactgcattagccgacccacatccaaaaatctctaaagctctacgtaatatagttgatgcacagccagacaataccgcaaaaaccaaagcgttgttctgcggaatgtttgagcgaaaaggcaacggcaatattcagaaaggtcgattcgcccaggcattagcagaacagatttcgaaagaaaatggttttgaagcccctgagtacctcaaaaaagctattcaacacgtctgtcagggagtggttaagccttga

SEQ ID NO: 75313 - DNA, 1728 bp, Yersinia frederiksenii Y225
ttgaaactatcaaaggaacagatagatatcatagaagcaccgttagggccaattgcggtcactgcgtgcgcaggaagcgggaagacagctacagccattcggcgcctgatcgccattcggcagaaaatgcaaaacagtcgcggccgtgttgtgctgttgtctttctccaatgttgctgtcaataccttcaatgcaggatatgcggaactcgctgctggcctaccagacgatgctaatcgtcgaagggtggaagtcgatacacttgacggtttttttaccaaacatgttttacgtccccatgcttacaggactatgaccgcacctcaggctgcatacttggtgtcaggtttggagccttttcttgccaggtttaaatattggggtgaaggtcatccccctctgccattaaaagacataaaaataagcatactggatggggactttgtcttttattccgatgtaagaaatgaccttgaaattcttgataaaggtaaggttttaaagatcattcatgaccttggacgtttaggtgcttacactcacgagataggtcggtactgggtgtataggaccctggattctcaacctgcagtattgagggcgctggcagcccgctacccgcaaatacttgtcgatgagtctcaggatttgggaacactgcatgaggaaatcttaaagctactcattgctgcaggggttcaggttacgcttattggggatgttaatcaggggatttatggcttcgctggtgctgacggtgagttcctgaatagctatgaggagcgtgcagaggtgaccggctacaagcttactcgcaattatcgttccctgcctccaatcataaatatcgccaaccttcttagtggccgccaagacgaaccataccgcctgggggaacaaggtggagcttattttattggatacaaggattcggaacttcccaaattaattgatgcattcaaggcccgtattgatgagttaggcatgcaacaccaggatgctgtgctcctctgccggggagcagatagagccgcagtaattgcgggtaggactgcccctccaggacaaggtatggtcaaggtgttagcagaagcatcgttgttaagggatcagcatagtaactaccatggatgctttaacttggtctgccgggctattctcagcttattggaggatataccccatggcctcagttctagacttcagggtgtatcacatgatgctgagatgaagggactaaagcgattactatggtgtttcagtcgcaacgctgatttgggactcccttcgtctgcgcttgtggctaagaccgactggcactccaagctattaacgaatgttaaagtgcttctcgcagagattgaaaagcactacggatataaagttgctggcaatgtaggtactaaactcactaagaaattattaccagatcagacactaaccagtgcagtgtcggctcaaggacacgagctaagagtcgagacggttcatcaggttaaaggggagtctatcggtgcggttatgtatgtggctaagaaatccaatattaaagcactactttcaggtacagatgatgaagaaggacgtatcgggtatgtcgcaataactcgggccaagaacttgttctggctggctgtaccacaatcatgccttaaagaattaaaagaagatctcattaaagccggttttcaggaatggatcaaacttgccgtcattgatcctgcctga

SEQ ID NO: 75314 - DNA, 2310 bp, Yersinia frederiksenii Y225
atgtcagaagtagctaacaccacgtcattatctgggcagatatcactaagatttcttgagctttcccaattccgccgacttggcaaggtccaaatggacgttgacccaaagactactatcctcgtcggcgctaacaatagcggcaaaacatcaattctggcagcgttgcgccacttccttgctgatggctcaccatttggtgcttttgacatcagtatttctcaatggccaaaattgcgggcacttggaagagcttgggaggcattagaggaagatccatctacgtctggcgcatccgaagatgaatgggaagagcaacttggaaccttactttcggcgatgccaacgctagacctatggttcgatgctgaggctggtatgttccactatgtctctccgtttctatcaaaattcagttggaaaggcggcgcagtaggtgtccgattgcgtctggaaccagctacgaacattgaggatttgaaacagttagcatggaagtatcacttggcgagaatgccagtgaaggatatgggaaagaattcacttgcttggcctattgatctactggatttttggctccgcgaagcttctctgctgggccaagttcgggcttataagttggatgctgataacaatcctttggacggaataaagacctacgttagccagacactggatgctgactctagcccaattgatcgaaaaaacctgcagaaacttatacgagtagactttgttgctgcacagcgtggccttggtagtgaggaagccgattcccgatctgcttctggccctcatcgcataggtttgttctccaatcagcttctgaaatttgctcgacagcacctaaatgtagctgcaacgggtcatgggcaccgagctgacctcataaaagctgttgctgaggcgcagcaggaactggataaaaagatccatgaggctatcggaccttcggtagaagaggttaaagagcttgggtaccctggcttgcatgatccccaagagattcgttttcgcacgcgcatacagacagctgatttactcgaccatggaaccgctgttcaatacagcatgcagaaggattcgttagaagagcttctcccggaatattccattggtctcggttatcagaatttacaatcgctcagttaccaacttgtttctttcaaggctgctcgcctaaatcctgaaaagggcgctccagcacctattcatctggttatgattgaggagcccgaggctcatttgcacgtccagatacaacgtatatttcctggcaaggcacataagttaatcagccctaacggtagcgatgagtcaggacttaaaagccaattgattatcagtactcattctagtcatctggcacatgctgagaattttgaccggctacgatatgttcgccgcattgctaagagtgaagaacaaaccatgcctaccactgaggtggtcaatcttgggcaagtttttggtgatgataaaacgacccgtcaattcgctgagcgttattttcgcgttcaacacacagatcttttattcgccaatgctgcaatctttgtcgagggtgttgctgagcgtatgctgttacctcttttcattgaaagagattttgcaatactcaacagccgctatctgtccttccttgatattggtggtagccatgctcatcggctaaggtctctcgttgaaagactccgtattccaactgtaattattactgatatcgatccagttgaagaaagacctggtaagcctaagaaaaatggggaaccgactacaaccttggttgctgtagctaatacaggacaacccgggctgcaatgtgggaacccgactcttcgcggatggcaccctaagctgcaacagcttgaggatttcaaaaacccgaaagatgagcatcttgtctggaacgaaattgccgaatgttctgtacgtttcgcatggcagttgcctgtagccgaagctgatagtcagtggccaagtacttttgaagactctctaattcttagaaatatcccttggtttaagcaactgattgatgaaaaagtcgatggtgatgggaagcaaatcaaaccgccgaagggcgcgctgggctcagtagcaagacaggtcgctgaaaatgataatattccagaactgctcgcggctctgcacaaattaatgcatggatcttttaataaaggagactttgccgcaagtatctttgaaatggttgctgcggatgagccgattgtctgtcctaaatatatcgaggatgcactggaatggctccagacacagctggagccaagcaaggaggtgatgccatga

SEQ ID NO: 75315 - DNA, 1950 bp, Yersinia frederiksenii Y225
atgactaactcacagatccttgacggcaatgatcgcgatgcaggggtagtagaagagatttgtggctaccttacagacataccacctcgtaactacttcctttttgcaggggctggttctggtaaaacacgaacattggttgaagttttacgtcgccttactggtgtgaccgagcatgagaaggggggacaattagcacggtccctgaagatgtatgggcgttcgattagagttgtgacctacaccaaaaatgctgtctctgtaatcaacggacgtcttggggacaataatttagtcagtgtatctaccatccattcgttttgctgggaattgattaacgggtttaacgatgacatccgtgaggctcttattgcattaaaagaagcgcaacttgctagagacactgcagaggcggaagcaaaaccgagaggtataactccagctaaacaacgcgctctcgacgaaattatagatgaaatcgaaattctgcgagcgacagaagtattcatataccatcccgaccgtaatatgtatggtcctggtgctctaccacacaattacgtactggacgcgactgcgtggttgcttcggaataaaccgacacttcaaagcattctcaaagatcgacatccaatcatacttattgatgagtcgcaggacacgatgaaaggtgtactggactccttgatgatacttgccaaaaagcgggagagagatttgactcttggtctgctgggagatcatcgacaacgaatttatatggatggtcatgccgatcttccaagcattgttccggaaaactgggcaacgcctgagttacaaatgaatcatcgtagtcagcgacggattgttacactgattaataaaatctgggaaactgaactggaaggcaggacgcaaccagtaaagggttcagcacaacatccccgaacagaaaaagctggtggaacggttcgactcttcttgggggatacatcacgaagtccagaagataaagtgcttagcgaacgctggtgtgctgagcggatgtttgaagttagttgttcagtagcttggaatcaagagcaatatcaggtgcttgcgcttgaacataagctcgtcgccactcgcggttcgtttcttgaggtgtatgaggcaatgaccctactggatccccacgccgcagctccatcaggcagtggggacaataaggggccttcaacagtacaaattttgcttaatgagcttgggcatttagaagcctgcgtgagtaatgaaggaattgtgaatgagttcaaggcaaccgaagtttttagacgttatggcggtttagacaatatgccagaggactctgaagcaagagctgaacgtactgatgaaatgctcgaggcgatagcgatatttgcaatggcttgtgccaaccctgagtcaacggtcgctgaggtattggcaccagtcttaaatgcaaaattatttgaagtagatcatcgccttcaggaggcttatgccgacaagtcaccagccccgcaagctcctggacgaggtgaggatgagtcaaagcaaacaagaatgcgccgtggatggtgtgcactgtttgctgctccatggaaacaacttaagtgctatcggaattaccttgctgggatttcagagctcgcaacacatcaggtagttaaaggctctgagttcaagcacgtcatggttgtaatggatgatgctcttgctggtgggactctcattaagtacgacaagatttttggtggtacggagttaagtccaaaagataaaaagaatgcagaggcaggtaaggagacaaccatcgaccggactttacgtttgctgtacgtgacttgtagcagggcgcaagaatcgcttgccttagttctttggtcgtccaatccagctactgctatggctcgaatcaaggagagtcagtggtttgctgaatatgagatactgataatcccatag

SEQ ID NO: 75316 - DNA, 1776 bp, Yersinia aldovae 670-83
atggcaactcttataaattgcgttagaatttccggattcagaggaataaaagaaatagaagttgagttgggaagaatagtgattttattaggtactaataattcaggcaagacttcattcctcaaatctctgcatttagctttaggcgattatcaaagatactttagcgaagaagacctacatattgatgttacaggaaataaagttagtgaggtggttattgacttcaggatggtccctgtaaatgataattatgaaaaaatagatgagtttgaagataaatggattgatgtgtttggagataacattgctttagatgctgatgggagtgagtttgtagcaatacgcacaaaggttaatcctgatgaaattaaaggtggttttaatacgcaaagatattttctaactgaatggcctagttatgaagaatggaaaaacgttgttccgaatgaaaggaagagatttagggcaagaatagatgccattccttatatatgcatcgaagcgcagagagatatacatagcgaattaaaggataaatcatcatatataggaagggttctttcttatataaaatatgatgatgacgatgtagcttcactcgagaatatgataagttcaataaatgaggttgctgtaagcaaaagtgaacctttacaaagtttaaaggcttgcctacaaggtttaaatgaatcatttctcggttctaatcatactgaaataacgccctttccaaaaaaaataagagacctttcaaagcaatttactgttcattttggtgatgaagaaaatcaatctttttcaatggaataccatgggacaggtactagaagttgggcttcaatgctcaccgttcaatctttcttagaatttatgcacgaaaggcatgaaagtgagggcaaagcgttacaccctataattggagctgaagaaccagaggctcatctccaccccaatgcacaacgaacattatttaagcaactaacatcctctcagggacagattattctaagtactcactcgccatatttaagtgctatggcggatattgaggatattagatctttcattaaacgttcggatggggttacggttaactgcttaagaaaaaagataggacacgatgaaaaaaatgccattaaaagagagataatgcttacacgtggagaactgcttttctcacgtgcattaatactttgtgaaggagttacagaggagcaactgatacctgcaatgtttgagttatattttaaaaaatcattatttactgtgggagtaaattgcattagtgtaagcgggaaaaattatcctccctttgtgaaacttgcgaataatctcggtatacctgttagcattatcagtgataacgatggcaatacaagaaatgaaattacaagtcaaatggctcgattgacgcgggatgatggattgatttttaatgaggattgtttttctttgaatttcattgaggatgggaacgatatagagtcagaattatttactgaattaaatataaaagaagagataatcgaatcactagtcctcagtgaaactaaaggcaatgccaacgtgcagtatagaaatgcaaagttagcagaaataaatgctttggatgatgatgctataattaaaaaaatgcgtgattcaaaagcaagctatgcgggctatttagggctaattttaacagaaaaccctaatgagaaacaaatcgaagaaatactgccacaatctgttatcgctgcatttcaaaaagttagaggatggcttgagttatga

SEQ ID NO: 75317 - DNA, 1899 bp, Yersinia aldovae 670-83
atgattgataatttatctcttgcgcaagaaaaaattgttaaggctcctataggagaggctatgcaagttcttgcctctgctggttctggtaaaactagggttttaacagaaagagtccgatatattatagacaattcaactagaggcagcgtcgtagctttaacatttactaataaagctgccgatgaaatgctagaaagattagataatggaacgggtattcgcgaaagatgctggatttctactatacattcagtcgcgcaaagagtccttgatagctatggatacacaattgggttgcctaaagagttgcatatctttgagcgcgaccaagatagaatggaagtatttcttcactccctaagagaacagggagtaaatattgataactatcttaatgttgacgatgaaagagaaaaacgaagccgtgagaaaataatggggcaatatttaactattttttctcatataaaaagagaactcctcaatgaagatgaagttctaactaaatattctacaaaccctcggatgtggaatatttatcaagactatcagtctgccttgttagaaagtggtggagtagattttgacgacattcttctttatgcacataaaatacttttaaaccaagactcagtggcgagaatatatcaaaaaaaatatattgctttatttgttgatgaagcacaggatttaaatagagcacaatatgaatttattaaagtgttttgtggtgaaagaataaaaaatatcatgatggttggggatagcaatcaaatgatatatggctttaatggctcatcctctgattactttttaaaatcatttaaaagagattttcttcctgaaacttataagctgactgagaactatcgttcctctagagaggtaatcgctttagccaacaagataaagcctaatagtcaggttggtattaatgctgcaatagctggttataaaagttttgcagcactacctgatgagtctgctgaagcgatctgggtttgtaataatatagaaaaaatattagagcttaaaactcatcaagatatagagggagggatagacttatcaagtatagttgtcattggtagaaatagatttgttttcaaatacattgaagatgaaatgaagaaaagagatttgccttatttcttgaaaagcagtgaaagaaatgagcaacctgtttcgctcataggaaaaatcattgacttagccttaagagttaaaataaaccctagggactgggtggatgggcgaaaattattttcaataattggcttgaaaattaattccgatgcaagctatgtatatatacttgatgatatatgcaaagaaattgaaagtaacataattaaggacaaaaagttgattttgtcagttctacattcgatagatatgctcgaacttgactcacctaatttcataaaattttgctctgagctaaagtcggaattgaaagaactaggttctaaaactcaagattttactatggaagaggatattgctattggaataaaagatatcgagcagctaaattcaatgtgggtgagatttaagaggaaaggacttggtgatagtattttatcgtttaggaatgcgctagcattaggtcaacttaacgaagatggtatgaaaaaaggaataatgctcagcactgttcatacgatgaaaggtcttgagaaagatattgttttccttattggtatgtgtgagggcgtattccctgattacagggcaaaaagtgctgcggatatagaagaagaaagaaataatgtttttgttgcggtcacgcgttcgcgtcgatggatttttatttcatatcctgagaaacgaatgatgccttggggtgattttaagtaccattcggcatcgagattttttgttgaaatgcagtag

SEQ ID NO: 75318 - DNA, 2310 bp, Yersinia kristensenii; identical to SEQ ID NO: 75314

SEQ ID NO: 75319 - DNA, 1992 bp, Yersinia kristensenii
atggctccagacacagctggagccaagcaaggaggtgatgccatgactaactcacagatccttgacggcaatgatcgcgatgcaggggtagtagaagagatttgtggctaccttacagacataccacctcgtaactacttcctttttgcaggggctggttctggtaaaacacgaacattggttgaagttttacgtcgccttactggtgtgaccgagcatgagaaggggggacaattagcacggtccctgaagatgtatgggcgttcgattagagttgtgacctacaccaaaaatgctgtctctgtaatcaacggacgtcttggggacaataatttagtcagtgtatctaccatccattcgttttgctgggaattgattaacgggtttaacgatgacatccgtgaggctcttattgcattaaaagaagcgcaacttgctagagacactgcagaggcggaagcaaaaccgagaggtataactccagctaaacaacgcgctctcgacgaaattatagatgaaatcgaaattctgcgagcgacagaagtattcatataccatcccgaccgtaatatgtatggtcctggtgctctaccacacaattacgtactggacgcgactgcgtggttgcttcggaataaaccgacacttcaaagcattctcaaagatcgacatccaatcatacttattgatgagtcgcaggacacgatgaaaggtgtactggactccttgatgatacttgccaaaaagcgggagagagatttgactcttggtctgctgggagatcatcgacaacgaatttatatggatggtcatgccgatcttccaagcattgttccggaaaactgggcaacgcctgagttacaaatgaatcatcgtagtcagcgacggattgttacactgattaataaaatctgggaaactgaactggaaggcaggacgcaaccagtaaagggttcagcacaacatccccgaacagaaaaagctggtggaacggttcgactcttcttgggggatacatcacgaagtccagaagataaagtgcttagcgaacgctggtgtgctgagcggatgtttgaagttagttgttcagtagcttggaatcaagagcaatatcaggtgcttgcgcttgaacataagctcgtcgccactcgcggttcgtttcttgaggtgtatgaggcaatgaccctactggatccccacgccgcagctccatcaggcagtggggacaataaggggccttcaacagtacaaattttgcttaatgagcttgggcatttagaagcctgcgtgagtaatgaaggaattgtgaatgagttcaaggcaaccgaagtttttagacgttatggcggtttagacaatatgccagaggactctgaagcaagagctgaacgtactgatgaaatgctcgaggcgatagcgatatttgcaatggcttgtgccaaccctgagtcaacggtcgctgaggtattggcaccagtcttaaatgcaaaattatttgaagtagatcatcgccttcaggaggcttatgccgacaagtcaccagccccgcaagctcctggacgaggtgaggatgagtcaaagcaaacaagaatgcgccgtggatggtgtgcactgtttgctgctccatggaaacaacttaagtgctatcggaattaccttgctgggatttcagagctcgcaacacatcaggtagttaaaggctctgagttcaagcacgtcatggttgtaatggatgatgctcttgctggtgggactctcattaagtacgacaagatttttggtggtacggagttaagtccaaaagataaaaagaatgcagaggcaggtaaggagacaaccatcgaccggactttacgtttgctgtacgtgacttgtagcagggcgcaagaatcgcttgccttagttctttggtcgtccaatccagctactgctatggctcgaatcaaggagagtcagtggtttgctgaatatgagatactgataatcccatag

SEQ ID NO: 75320 - DNA, 1875 bp, Yersinia kristensenii; identical to SEQ ID NO: 75312

SEQ ID NO: 75321 - DNA, 1728 bp, Yersinia kristensenii; identical to SEQ ID NO: 75313

SEQ ID NO: 75322 - DNA, 2028 bp, Bacillus thuringiensis HD1002; identical to SEQ ID NO: 72154

SEQ ID NO: 75323 - DNA, 1962 bp, Bacillus thuringiensis HD1002; identical to SEQ ID NO: 72843

SEQ ID NO: 75324 - DNA, 1719 bp, Lactococcus lactis subsp. lactis
atggaatttaagtcgctacaggttaaaaacttcagaagttttgaagatataagcattgacctatcaaataagaatgtatttttcgggcttaatgatgtcggaaaaacaaatcttctgacagctttacgatttgtttttgatagagatattcgtagaaatgattttatggactcagactattttgagaagaaaacggaaataccaattgaaattttggttaccgttgatattagtgataacaatgaggacagctctaaactgcgtgcgaggcttagaggggcaattttatcagggcaagacttaatatacatacgattaatttcgaaatatgataactctgaaatggttggagttgctgaattattttggggtggagataaagaaaatcttcaggaaatcaaacctagagggacccgttttgatattgatgacgtatttaatgtcttttatatagattcttatgttgatatggatgttctttttaaacggaatatcaagaagtttatccaaagtgatacagaggacgacaaggttatcaatgattctataaaatctattgttagtgaactgaacgaaaagatttcaagcctttcaggagtttcggattttgagtcgaggataactcctgcataccaaaaattcaatgatgaaaacatctcaatttcaattaaatctgaaattgcagtgaagggactctattctaatattgtcccttacatgaagaaaaaaggcgatgataacatttatccaacggcaggggagggtagaaaaaagctggttgtgtactctttatttacacttttagcggagcaagaagcagataaaagaataaatttatttctagtagaggagcctgaaaacaatcttcataaatctttgcagatagagctttctcagattctatttggtaattcagagagctatccatatttatttgtttctacccattctccttatattttgtatgaaatgaacaaagtcactttggtgcgaatttttgctgagaggagagtgacaagtaagagcgctttttataatgtaccttctgactttcaagataataagaaaatgcttaaccgcttgcttgcggaggcaatttttgcgaataaggttttgttagtagaaggaccgtctgagcagcttttatttgataaagttctttcagtgattaaaccatattatgaagttaacggaatgtatattctttcagttaatggcataggattcaagaactaccaacctattttgaaagatttaggaattcattacgttattaaaacggataatgatattcaatggcgggaaaataaagggtgctatgctctgggattttccagaatcaatggggtgactaatggaacacttgtgacagactggccaatgagagattttcatgaaagtaaggaggaatttacaaaaaattctatcggatatcgaaaacagctttatgaacttgaacagaatcttccaacactgaatcggataagagaatactatcatgtttatttatcaaaagttgatttagaaaatgacctagatgaagttctccacgataatcttgttgaatattttgaggtaaaagatccagttacttatcttcaagcagctaaaaataatcacatggttgagcttattgagaaattaactgatgaagattgtagagaagtatatgaacattataattttgcttgtctaaaggatttggtagaatggaattaa

SEQ ID NO: 75325 - DNA, 1527 bp, Lactococcus lactis subsp. lactis
ttgtctaaaggatttggtagaatggaattaacagatactcagaaaaaaattgttgacacagcaggcaacttgattgttagagcaagtgcaggcactgggaaaacgcatacaatggtcgcaaaaattgcgaaagaaatagacgagaataaggatcatcgtgttattgcagcaatcacttttacaattaaagccgcgcgagaaataaaagaaagactatctgtagatattacaggatattttattggtactaataatagttttgcaatcgaagaagttatcaaaccgtttatgaaagatgcctacggtgtacaatttgattgtgagatgacgactgactatagtctaaaatttgataattacgaagaagggttgaatttcatttctgaaaactgcactttaggaagctatgaggataataataagaattttattttcgaactagctctaaaaatacttagaaagtcagaagtagcacgactgtacctgcaagctaaatatttcaaaatttatgttgacgaatatcaggattgtgatacagcaatgaatgaattttttatgtatttgacagattcattgaccattgacttatttattgttggtgatgacaagcaatccttatatacatggagaggtgctaatcctgaagcattcaagagtattattggcaaaagaaatttcgaaaaattttttatggttgataacttccgttcaaataaacagattcaaaactactcaaatctgctttttgaagagacttccagtctctatgatcaacaaaccagcatagagaatattattttgttaaattgtacggaacaagattggattgaaaaaatcaaatgtttttgggatgcagacaaatcttctgctttgttgagattttctaattcaaatgcgaaaagtgctgctgatattttgtgtgcgaatgatatggatttcaaatttattcccaaagctccaattgaagatatttcaaatgatgcaggatggctctattatgcaatagcacaatatttactagttgatacctattcggtttttgattttatctatgatatcccttcagggacggaggaagactcgaagattaaaagcaagttggagagattcctacaggggttaaagacaaacgttgttgatgaaaatcaatttaaggaaaaagtttcagagcttgctacatttctaggatatgaagctcagcctaaagatttatcagctctttatgaaactatttctacagacagatatattgaagcgttcaaatcagataacatcaaccatagggcgatgacatttcattcttcaaaagggttgcaatttgatcaagttatcctgtttgttgaggattataatttgcgagatgaggtaagtttctataaccattatgtggcaactacaagggcaaaaagcaaactaatttttattagtatcaaagaaaactatggaacaaggctgttctatcaaaatattgctaaaaggttaggagcaagtggattgacattggataaattggttactatctattag

SEQ ID NO: 75326 - DNA, 1794 bp, Acinetobacter baumannii; identical to SEQ ID NO: 71916

SEQ ID NO: 75327 - DNA, 1782 bp, Acinetobacter baumannii; identical to SEQ ID NO: 71827

SEQ ID NO: 75328 - DNA, 1992 bp, Vibrio parahaemolyticus 846; identical to SEQ ID NO: 72330

SEQ ID NO: 75329 - DNA, 1752 bp, Vibrio parahaemolyticus 846; identical to SEQ ID NO: 72331

SEQ ID NO: 75330 - DNA, 1992 bp, Vibrio parahaemolyticus 97-10290; identical to SEQ ID NO: 72330

SEQ ID NO: 75331 - DNA, 1752 bp, Vibrio parahaemolyticus 97-10290; identical to SEQ ID NO: 72331

SEQ ID NO: 75332 - DNA, 1992 bp, Vibrio parahaemolyticus 3324; identical to SEQ ID NO: 72330

SEQ ID NO: 75333 - DNA, 1752 bp, Vibrio parahaemolyticus 3324; identical to SEQ ID NO: 72331

SEQ ID NO: 75334 - DNA, 1992 bp, Vibrio parahaemolyticus 12315; identical to SEQ ID NO: 72330

SEQ ID NO: 75335 - DNA, 1752 bp, Vibrio parahaemolyticus 12315; identical to SEQ ID NO: 72331

SEQ ID NO: 75336 - DNA, 1992 bp, Vibrio parahaemolyticus EN9701173; identical to SEQ ID NO: 72330

SEQ ID NO: 75337 - DNA, 1752 bp, Vibrio parahaemolyticus EN9701173; identical to SEQ ID NO: 72331

SEQ ID NO: 75338 - DNA, 1992 bp, Vibrio parahaemolyticus EN9901310; identical to SEQ ID NO: 72330

SEQ ID NO: 75339 - DNA, 1752 bp, Vibrio parahaemolyticus EN9901310; identical to SEQ ID NO: 72331

SEQ ID NO: 75340 - DNA, 2112 bp, Vibrio parahaemolyticus 901128
atgcatatcaagagcttggaaattactaattttagaaaattcaaagataaatctaacacggtgacatttgttgagccgacaagcaaaacagataatgagtcgatgatatcgtcatcaacgactcttgttgttggaaaaaacaactcaggtaaaactacagtcactcaggcgcttaatatggtagtttctgagcaaagtaaggtatggggacacgatttcaactactcatatatcgatgagttactaagctcttatgagtcgggaagctttgaaaaattccctaatatgaggttcaaattaacatttgtaacagatcctaagttggcttctttagtgaactctaaaaaggtcatatcattaggtcaagcgacaaaagaagatcacaatgatctaaaagagttttcactcgtagttgattttcaaatagaaaacaagattaagtttcaagaagatgttcgtattctgttagagaaatgctcttcgaaaacaagagattttaaatttagaaagctattagaattaattagtgaatttaaatttgataaagtagtaaaatcaccagaaggaatagtaaaagctataaacatttctagtttaatagaattaaaggtaatctctgcggctaacaacattcacgacagtagattattatcaaaggcatttaataaaattataaaatacaaatatcaaactaatgataaagatttcgatgaggtaaatgagttaatcagtaataataatgatgagcttaccggtaacattagagaaactcatgaatcagtaattgagaaagttctccagggtattgtcggaacagagagccttggaatcgaactaagagctgacttgacctttgataaacttatggatggcttaattacgtacgagcataaagatgcaggatttctagtcccagagggacagtttgggttaggctacgcgaaccttattagtatcataagtgagataattgattatattgagagaactcctagcacagataagacaaccaaagttcgattgatttgcatagaagagcctgaaacattcatgcacccacaaatgcaagtgaacttcattagacatatagatagtgctttgagaaaaatcatcggagaaggggaaaagattaaaagtcaactcctcataacaacgcactcagcacacattctcaatagtaaggttcattcaagtggaagtttagataatataaattacatttacccgcatcaaaaatattgtgagaatgtgccaattaaagatgaagatatcagccccgaatcagggagaaaagatgaattctattttgttaaaaaacatattaagcatcaagttcctgagttgttttttgcggatggtgtaattttcgtcgaaggtattactgaagagcggttacttaacttttacatagaaagagatgaagtgttatcgagaaagcttatttctgtctttagagttgatggcgctcatgccaaagtatatgacaaactaatgaggcagttaagaataccatctttgatagttacagatatcgattttaaaagaaataaaagtgagtcgactttatccgaagaaactaagtcaggtaaagaaattacatgggaaatttatcctcaaatgactagtatttcagatgatagatgttcaacaaataaaaccctaaagtactactttaattcgaataaggtaaaagactatactgattattatgaagacagtaatatcaaagtcgttttccaaaaagaccctttagaaataattttgagtgagtcagaacaagcaagatattatgcgtccagtctagaggaagccttagttctagagaactatgacaatgatatctttagaaatgtgttaagaagtactatacaaaaaaattatgatgagcttgtgcctgaggggacatgtgaatatgttaatttggctcataactcatttaagatacaaaaagagttgaacacgtctaaatctaaatttgcaaacaacataatttatgctctcgtggtcaatgaagaatcggcagctttaccaaagctacctaactatattgaaaatgggcttgaatggttagcctcaaagttatcaggcgctgagggagaggcatcgatatga

SEQ ID NO: 75341 - DNA, 2073 bp, Vibrio parahaemolyticus 901128
atgacaatacactcgttgcttgaagaagaaaaacaggtccaagctcagatctttaaaaacttggaagaaaaacggtcattttattttcttgcaggagcaggggcggggaaaacgtatgcacttgttgaaactcttaagtacagcttaaataaaagcatgcagaagcttgatagaagtggtagccgaattgcgtgtattacatatacaaatgcagcaaaaaatgaaattattgagcgtttctatgatagtaattatttgtgtgttagtacaatacattcttttttatgggaaatcatagaaccataccaaaaagaattattaggagtgcatagggaatatattgaacagttgatttctgatattaaatatgaaatttatacttgcgacgttaaaggcaaagccccggcttttaagaagcttagggccttatctcaggatgaaagcctttttttaaatgaaaaagtaatagaaaatacgaaagaaatttataattgctttaggtgtgaagacgcatcaagtttttgggcagagctagagtctattttaggtggcgatatttatactaaaattaagtcctctaaggcagatgtggaaaaaattcttagaagtattataaaaatatctaggttagagttttgtgcaaaaatgatagattgcaaagactcgaaatactcaactgtttcttataatgaaaagggaggaagagaaattctccataagaatttgattggtcatgatacattgatcgattattcattgactctggtggagaaatatccattattaaggagggtgattcttgatacttttcctcaaatatatattgatgaataccaagatacccacactcaagtgataaaaattatggatatgcttataacctatagcaagtctcataatattgattttattgttggtttttttggtgacccagtacagtctatttattctaataacgagttggcgttgtcaattgataatgaattagacatggtgtataaaaatatcaatcggcgctcacacggtggaattgttgatttaatcaatgtaattagaggtaatcaccagaaaatacatcaaaaggctttaaagaataatgctgaaagtgatatctttatttcatcttatggaaaggaaggtgtggatgaaatttgcttcatcaacgataagatagaagaggtaaaggttaaatggaaaataacaagcaagaataaactaacatgcatggttttgaggaataagactattgcaaacctatgtggttttggaagtctttatgatatatataacaatatatattgtgataaatcatctttcttatcttacgcgtcaataaatgatgaggtattgagcaaggatattgtgaaattaggaatcttgccacttttgattttgaaaatttccactccaatatttaagattaaattcgaaagtaattctccgttgtcagatgtttttagtgatgagtcgttggacaaccatactttggaagagatatcgacatgcttagattatgtaagaaatggggggtattcatcattatctgaatattcttcagatttactcaagaaaagtacagaaagtgataggcttaaagcactatatagtgatttagctaaaggttgggccataaattcagaagacatcaattgcccagatgacattgttgattgtttatgttactcgatatctagtagcgcaagtgacaagcttagagataatgtaaaactcattctatctttagatttgaatgaaatatttaattggattcgttttgtttataagatcgatattgatgacgaagtaagctatatcacatgtcacggttcaaaaggtttggagtttgacaatgtgttagcaattattgacgacaaatttggaaaggattctaatagtaaaaatgtcaaagataagtttactaagctctttgtttctggattccatgagaatcatgacactgatatggagaaaacaagaaacctcttctacgtgatttgctcaagagcgatccggaacttagaaatagcgctcctaaaggaagggagtgtaaatgaagaaataatttttaagtaa

SEQ ID NO: 75342 - DNA, 1992 bp, Vibrio parahaemolyticus EN2910; identical to SEQ ID NO: 72330

SEQ ID NO: 75343 - DNA, 1752 bp, Vibrio parahaemolyticus EN2910; identical to SEQ ID NO: 72331

SEQ ID NO: 75344 - DNA, 2004 bp, Staphylococcus aureus subsp. aureus
atgttaatttctgaacttcatataagtaattttagatcgtttggaaatgagtcacaaatgatcgaaattgcagatttaacagcgctcattggtgctaatagttctggtaaaacaagtttaatcatggctttattaagattgtttggacaaaaaaatacagatagaactttaataaaaacagactttcatattccagagagcgctgatatatctaaaattaatgaaatagatcttatgatagaagcgaaggtaatatttccagaattaaaattagagtcacctgctaatataaaaactgttccagaattcattaaacatttaattattgaagaaacagatgctgatccttatttacgaattagattaaaggggaagtggatacaaggttcaactcctgaaggtaatatagaacaagaattagtttatgtaaaaattccctatggtcgtgaagaaaaagaagaagatttaactagagtaccaattcatcatcaaaaattaattcaaatgatgtatatacctgcaatgagagatccagcaaagcaattaaaaaatgcttctggtactttattatggcgtatatttgatggtattgactggccagaaaatttaaatgactatataaaatctttaacgtctcctattgaaacgttatttaaagagattcctagcataaaagatattcagggaattttaaataatcaatggaataaatatcataaagataaaagatattctaatagtcaatttaaatttaatggtaatagtttgcaggaatttttgaaaaatgcggaaattttatttaatcctactattgatggaaattccgtaaaagtggatagtttaggtgatggtttaaaatctttattttatataactttagtatcaactctacttgaaatagaaaataaacaagaaaaagatgataaacctttgttaaacatcctagctattgaggaacctgaaaaccatatttcacagcatttgttaggaagaatagttagaaacttaaaagaaatatccaagaaagataatgctcaagttattttatcatcacacaattcatctataattggaaaagtagatccagagtatattagacatttacaaatacagaactcagaatcaattgtaaataatattaccctccctgaaaaaaatgatgatgctcatacctatatcaaagaagctgtaaaagcatatccagatttatatttttcgaaattagtgattttaggtgaaggagatagtgaagaaatagtattacccaaactactgagcgcagacaatatatatttagatgatttcaatatttcagtagttcctttaggaggaagatatgtaaatcatatgtggaagcttttaaatgatttatcaataccacacgttactttattagatttagatagagaacgaggtggaggcgattggggaagaattaagtatgtgttaaaacaacttgatgagaataatagatgttcagaacaacttcgtacagttctattaattccaagtaacacatatcatacttatagtatggaagagatagaagactttcataatagaaaaagtaatagattaaattcacttaatacttggatagaaaaattagaaaaagaagatgttttcttttcatatcctctcgatcttgatttcactatgttaatgagttttcaagaagaatatcagaacactatggaaagagggcctcaaattccaaaagattcaaattcgacagaatatgatgaaaaattaaaaaaatctatacaagcaactttaaaaaatgagaaagctattgcaaagacatattcggaagatgaaaaaaagctgatgatttggtataactctttatttttaggtagagggaaaccaagtacgcatatagcggctctaaaagatattgatgagaatgaaataatagaaaatgctcctaaagaactcttgcgacttatacaacgtgtaaaagaaaaagttgggttagtaggaggaagtaacatagatgaataa

SEQ ID NO: 75345 - DNA, 1926 bp, Staphylococcus aureus subsp. aureus
atgaataataggatattagaggatgaatggaagccttcagacgatgtaacactagaagattcagccttacatgctataagagcttcaagtcatgtagcgattgccgctggaccaggtgctggtaaaacagaattgttagcacataaagctggataccttatcgaaactggaatgtgtccatatcccaaaaaaatattagctattagctttaaaacggatgctgctagaaatctgcaagaacgtgttgaattgagatacggtaaaggtgtagaaaaaaggtttgaatcgaaaacctttgatgcctttgctaagggaatattggatcaatttatacacgcattacctaaagagtatcagccccaaaaaaattatgagattattttaaacgaaaaatcactaaacgatattataaatgcttatattacagagccttactcttattattctaattggcaatatgaatatcatattaatagtgtgttgagaaccatgaaagaaacaaagttaccaatagttagttttgaagatgatttatactcttggataaacgaaagactgtggatggctttattgaatggtaagggaaatttaaaaagttcactaactttttcaatgatatcaattttagttgagtatttattaaaagaaaatccattactagttaaggcattacaagcgacatatagtcatgtttttttggatgaatttcaagatacaacacacattcaatacaaccttctgaaaacaatttttttgaaatcaaatactgttattactgctgttggagataataaacagcgtattatgggctgggctggagctttacagaatgcatttggaatatttaaaactgattttaatgcaactcagtatacacttttgaataatttcagatctgctcctaatttagtttatatacaaaatatcttttctaaaactcttaatgatgcctccatagaagttctcccagctggagagtggaacaaaaatgaaggggtttgtgaaatatggaattttaaaaatcataatatcgaagcaatcctattagcgtcttatataagtaaatggatgaaagtagaaaatctaaagcctagagatttttgtatcatcgttaaacaacacgaacatatctatgcagctgaaataatgaaggaactttccaaaattaatataaaaagtagaatagaaaaagattatcaagacctattatctgaggaattagttttgcttattattaggtttttaaaattaagttatgaagaaaaatcccctgaattatggctaaatgtcattgatgaaatcatagatatgaagtacagtgatgctgattctgaaagtataaactatttaatcatagaaaaagaattggtaaaaatgttagatgaggttagaaaactctattcaaatattaatgatacaaacttcaatacacaattcgcagaaatattacaagaaattgtagtttttttaggagaagatatcataaaagctacttatccgaaatataaccaagctaattatttcaatgaagtaatgcaaaaaatgatagataaactacaatatcaaaattgtatttcaatgagggggctagtacaagagttttgtggagaatatagtatacctattatgacaattcataaaagcaagggactagaatatcatactgtgttttttattggagttgaagatgatgcgttttggagtttttctactcaaaaagaggcagataaaaatgcattttttgtagcgttatctagagcgaaacaaaaaataatatttactataagtgaaaaaagaaacattttaaagtttggtgaggagaaaaatatattgcaagagactaaaaatatttctgagctgatacaaacattaatagatgcaggtgttcctttaattgaaaagagtggtttggataatatattatag

SEQ ID NO: 75346 - DNA, 1932 bp, Pseudomonas putida
atgaagctttgcaatctgaggatcagcggctttcagtcgtttggacagggtattacggagatcaccttcgacggagttacatacctcctagggcccaacggtgcaggaaagacggcgacgctgcaggcattggcacgcatgtttggcttcgagccaggcctacgccgcctccgtcgatcagatttccatgttccgctggatgagcaggcagtacctgctcaacgcgtgctttggattgaggcggacttcacattcgacgaaacgctggatgatgatgaagacgacacggtaccgccattcttcacgcagatgacactgcagacggctgatggggttccccgcattcgctatcgcctggaaggcgttttgcactccgatggtgaggtggaagagcgtttactctacgtgacccggatggacgagaaagggcaacctacgtcgctgaagacagttgcgaagcgtgaaagggacgagatacacgtccattatttacccgcccggcgggatcccgctgaccatattgcatacggcgcaagcgcgctattaggccgcctccttcgagccgtcaactggagcgatgaccgggactcaatcaagcagctcactgagcaaatcactgagtgtttgtcggaaaacgagtcgatcaagaccttaagcactagcctcagcggcgcgtggcaacggcttcacaaaggcgatttctttgcgaatccatcccttacttttgcgaactctgaaattgaggccatcctgcggcacctctcgatttccttcacgcctggccatggtgaaagtcatgtggactacgagaggctgagtgatgggcagaaatcgatgctgtacctctcgctcgttctcacatccctgacgattggtcgcgaggtcagatcaggacagaacacctcatttgaccccctcaagctgaagccagctgcctacacgattctggcggtcgaggagcctgagaacagtctgtctccgcactacctggggcgtatcgtgagctccctgaaatcatgtgtaggtgtggacgcacaggcattgatcgccacgcaggccccgtcgatgctaagacgagttgagcctgaccaaatcaggtatttgcgtctaaatgcaaagcgagaaacggatgtgtcgatcatagtgcttccagataagcgcagcgacgcctacaagttcgttcgagaggccgtccaggcgtttcccgagctctacttcgcacgcttggtggtgcttggtgagggtgacagtgaagaaatcgtgctacctcgcatccttcaagccaagggagcatccgtcgacgaatacgctgttgcaattgctcctctagggggccggcacgtcaatcacttctggcgcctgctgaatgcactaggtacgcctcacatcactctgctcgacctcgacgtaggccgttatcaaggcggctggggacgtgtgaagtacgtacgtgaccaactcgacaaatttgatccaggacgcagtatccccaatcattgggaacgccatgaatggaatgatgcccaacggcctgtcagaacccatcactggttcgagaatggagacacaactataagcagcatgttccaggaattagaaaatcgagacgtatttttctcggatccactggatctggactttgcgatgctcaaggcgtttcccgacgctttccttgctgtgcgatcaaatccgacgccgcacgatcatttagcagtcctcggtaaatgccacttcaatcccgggcagtacgacgctgatgagcagcaactcttctcggcctaccatttcctgttcaaggtgagcagtaagccagcagctcatctggacgccctgggcaaacttactgacgcggagctgttggcttcgcttccagcgtccctcaatcgactagcagacagggtcaaagctaagcttgaggaatctccagagtga

SEQ ID NO: 75347 - DNA, 1680 bp, Pseudomonas putida
gtgatttctcatgatcaatgggttccatcgcccggcgtgaggctggagaaaaatgcatggagcgtagttcgcgagcttggtcggtcgatcttgctgacggcggggcccggcgctggcaagaccgaggtgcttgcccagcgcgccgattaccttctgcgcaccaatagctgccgcttccccaagcgaattctcgcggtgtcgttcaagacagatgccagccgtaacctgaaggaaaggattcacctgcgttgtggctggaacttcgcatcacgcttcgacagtgtgacctttcatggcttcgcgaaacgaatcatcgacaaattcctccccactcttgcggaggagggattaagcccggattacacaatcggtgctgaggccatacagggaaagcagataacctttaagcagttgctgcctttcgccatcaagatcattcagcgcagcgaggttgcccgaaacgcaatccgcaaaacctacgcccatgttttcctggacgagttccaagattgcactgctgaccaatatgagctcatcaagctcctattcctcggtaccggcatccacctcacggcggtcggagatcgcaagcaaatgatcatggggtgggccggagcgctggagggcgtttttaaaacgtatacgactgacttcgatgcccttcccctccatctttatgcgaacttcagatcgaagtccaatctgcttcgtgttcagaatgaaatcatccgcgaaattgacccaacggcagtgacgccggcggagctgatcgcgggagatgatggggaggttttggccgcccatttccagcactcgtcacaagaggcgatgatgctggctgaaaacatttgtcgctgggttgaagcgggggttccaccgcgtgaaatcgcagtcctgatgccgcgccaggtggatgactatggctcggccctgatggctgagcttggcaaccggggcatcgcctcaaggaacgacagcgagctgcaggacttgctgaaagagccggcagcgagggtcgcgatcgattacctgacatgcctgtacggaagaggccagtcagatgcctgggcgcgcctgatggatctgttcactccctatgaggacgctagtcgtgaccatctgcacagactgtttgaaaccacgtaccgcgctcatgtgcgccaggtaagggccgccagcaagactgccaccccgtatgaggattggtgggcgcttacaagtagctttctccgggacgtaggttatccaattctgacggcgctctcaggtgactacgagtcgaaaccacgcttgcatgaagtagttcgtgaggtcagagatcgcgtcagtgcactgctcgccagcgaaaagaccattccgaacgccctcgcccggctttcagacgaccaagcggtacgctttctcacgatacacaagagtaaggggcttgagtttcacacggtcatcattcttggggtagaaacccaggcgtattggggcaagctcgcggaggagcgctgcgtctatttcgtgggcgtttcacgtgccaaggaacgactgttgatcacaacggcggagtaccggcccaagcctaaaggagcaggtcgttggacggagcaccgtagtccccatggagaattcgtttcccatgtgacaaggcatatcactgggcgactaccgccttcaaaaactatgttgtga

SEQ ID NO: 75348 - DNA, 1992 bp, Vibrio parahaemolyticus; identical to SEQ ID NO: 72330

SEQ ID NO: 75349 - DNA, 1752 bp, Vibrio parahaemolyticus
atgactgcactgaaccccgcagcacaggcgtcagtagagacacttgaaagcttgagaggttgtattgaccaagggcaatgtttcagattggaagccggtgctggagcgggaaaaacctattcgttgattgagtcgctcaagcatctgatttcgttacgtgcaaatgagtttgttgtatctgggaaacaagttgcatgtatcacttatacaaacgtggccaaagacgagatcaaggcaagaaccgataacaatccagtcatttttgcagatacgattcatgccttcagttggagtgttttgcaaaactaccaagtgcagttgagacaacttattcctacgcttggggcaaagtggcaagagagaattgcagaatcggtaggcattggtaatcaaacggttaagtacgatttaggttatgcgtcgattaaagagcatgaaatttctctgcatcatgacgatgtagttgcgttaatggctcgcatgttggcctttccgaaattccagaaattactgaaaagtaaattcccaattatctttatcgatgaatatcaagacactgatagcgcacttgccgaaagtatcgtgcaaaacctgattgataatgattcgggagttgtggttggcctttttggcgatcactggcaaaaaatatacggctcgtcagcctgtggattgattagtagccctgcaggaaaaatcatcgagattggcaaacgagccaatttccgttctgataaaaacatcgttgaatgcctgaatcgcatgcgccctgaattacctcaagccgaatccgacccaagctctgttggaggtatagaggtctaccattcaaatgattggcaaggtgcacgtcaaactggtgcacattggaaagacgatcttcctgaggaagaaactagacgatttatccagcaaaccaaatcattaatggttgaacatggttgggatatgtcgttatctaaaaccaaaatattgttcttgacgaataacctaatagctacagaacagaaatttaagaatttggctgattgcttcaattatgcagaagactatctgaaaaaaaatgacaaatacattgagttctttgttgatactgttgagttaacggcgctagctttccaacaacgtaagtatggtgaattgcttcagattaaaaagaaaaaccgctcctacttaacgtcgcaagctgacaaaactgcttggattgagaatttagaaaagttaatgcgacttagagacacatctacaatcggtgatgttttagacctgttgataactacgagtatgccgagagttccggcaaaagtcgcggattctgaagtccgttatcaaacattatctgcccgtgataaagattcattagagccagatgaattgagtttcgtcgccaaaattaggcgtcttcgtgcagtgtcttactctgaagtcataaacttggccgagtacataaatgataaaaccccgttttcaaccaagcatggggtaaaaggcgcccagtttgataatgtactagtagtttgcggccgtggctggaatcactacaactgggatcaaatgcttgaatggatagaaaacggtgtcccaaaaggaaaagacggaacttttgaacgaaatagaaacttgttttatgtcagctgctctcgggcgaaacataacctcacgctcctctttacgcagtacctctctgataaatcacttacggcccttggtaaaatctttgggaacgaaaatatcaaaggcagtccattttag

SEQ ID NO: 75350 - DNA, 1992 bp, Vibrio parahaemolyticus; identical to SEQ ID NO: 72330

SEQ ID NO: 75351 - DNA, 1752 bp, Vibrio parahaemolyticus; identical to SEQ ID NO: 72331

SEQ ID NO: 75352 - DNA, 1992 bp, Vibrio parahaemolyticus; identical to SEQ ID NO: 72330

SEQ ID NO: 75353 - DNA, 1752 bp, Vibrio parahaemolyticus; identical to SEQ ID NO: 72331

SEQ ID NO: 75354 - DNA, 1992 bp, Vibrio parahaemolyticus; identical to SEQ ID NO: 72330

SEQ ID NO: 75355 - DNA, 1752 bp, Vibrio parahaemolyticus; identical to SEQ ID NO: 72331

SEQ ID NO: 75356 - DNA, 1992 bp, Vibrio parahaemolyticus; identical to SEQ ID NO: 72330

SEQ ID NO: 75357 - DNA, 1752 bp, Vibrio parahaemolyticus; identical to SEQ ID NO: 72331

SEQ ID NO: 75358 - DNA, 1992 bp, Vibrio parahaemolyticus; identical to SEQ ID NO: 72330

SEQ ID NO: 75359 - DNA, 1752 bp, Vibrio parahaemolyticus; identical to SEQ ID NO: 72331

SEQ ID NO: 75360 - DNA, 1992 bp, Vibrio parahaemolyticus; identical to SEQ ID NO: 72330

SEQ ID NO: 75361 - DNA, 1752 bp, Vibrio parahaemolyticus; identical to SEQ ID NO: 72331

SEQ ID NO: 75362 - DNA, 1992 bp, Vibrio parahaemolyticus; identical to SEQ ID NO: 72330

SEQ ID NO: 75363 - DNA, 1752 bp, Vibrio parahaemolyticus; identical to SEQ ID NO: 72331

SEQ ID NO: 75364 - DNA, 1992 bp, Vibrio parahaemolyticus; identical to SEQ ID NO: 72330

SEQ ID NO: 75365 - DNA, 1752 bp, Vibrio parahaemolyticus; identical to SEQ ID NO: 72331

SEQ ID NO: 75366 - DNA, 1992 bp, Vibrio parahaemolyticus; identical to SEQ ID NO: 72330

SEQ ID NO: 75367 - DNA, 1752 bp, Vibrio parahaemolyticus; identical to SEQ ID NO: 72331

SEQ ID NO: 75368 - DNA, 1992 bp, Vibrio parahaemolyticus; identical to SEQ ID NO: 72330

SEQ ID NO: 75369 - DNA, 1752 bp, Vibrio parahaemolyticus; identical to SEQ ID NO: 72331

SEQ ID NO: 75370 - DNA, 1992 bp, Vibrio parahaemolyticus; identical to SEQ ID NO: 72330

SEQ ID NO: 75371 - DNA, 1752 bp, Vibrio parahaemolyticus; identical to SEQ ID NO: 72331

SEQ ID NO: 75372 - DNA, 1992 bp, Vibrio parahaemolyticus; identical to SEQ ID NO: 72330

SEQ ID NO: 75373 - DNA, 1752 bp, Vibrio parahaemolyticus; identical to SEQ ID NO: 72331

SEQ ID NO: 75374 - DNA, 1992 bp, Vibrio parahaemolyticus; identical to SEQ ID NO: 72330

SEQ ID NO: 75375 - DNA, 1752 bp, Vibrio parahaemolyticus; identical to SEQ ID NO: 72331

SEQ ID NO: 75376 - DNA, 2070 bp, Aneurinibacillus migulanus
atgtttatatcacaaatcaatatacaaaatttccgtaattttaaaggggataacaacgtagtagagtttaatgaaggtattaatattataattggacataataattcagggaagtctaatttattaaaagccttggatttggttttaaatgtgggctcttcaaaaaagctatctgttgatgattttaataaagaagtaagtattgctgaattaagagagaagccacctaaagtttcgatcactgttacattttcagaatcggccaatgaacctgagttctcagaagatttagtaacggtttctacctggttaacagagttaaaaagcccctataaagcacaattaacttatgttttttatttaccagaaaaagaagaggctgaatataaaagagaaatgagtttactttcttcaagtaatattaacgaatattggttaacaataaaacataattttttaaggaaatataaaagtgcaatttatggtgggaatcctgattataaaaattcagtagatacagaggcattaaaaaagatagattttcaatttcttgatgcaattagggatgtagagagagacttgtttactggcagaaatactttgctgagagaagttattgatttctttatggattacgaaataaaaagtaataaggaaatagataagtctcagcaattatctgaaataaaccagcttaaaaaagaattttcacaagaggctgctaaattgataaattcactaaaaagaagaatggaacgtggaacaaaagaaatgttaacttatgcaaatcacacgggagcttcttttgggaattctgaacctgatttcgatggttatattttggactctgaactatattctgtgttaaggcttattattaaatatcaaacaggcattacagttccagcaactcataatggccttggatacaataatttaatttttatctcacttcttcttgctaagatgcaaaaagatgcttcaggggattatcttgggagtaatgctaaaattttcccgattttagttattgaggagcctgaagctcatttacaccctgcgatgcagtataaattcctgaaatttttaaaggaaaagtctcaccagaaggcgaggcagatatttattacaactcattctccaaatattacttcagcagtagatcttgatgaaataatctgttttcatagaaaagatgataacagcttaaatattggatatttagggagagcttttggggatgataaaaaatcaaaggcttatgtacaaagatttttagattctactaagtctgatatgttattttccaaagggataattctagtagagggaataactgaacaactggttatgtctttgtttgctcgatatgaagattttgatttagagaccaatcatatatctgtcataaatattggtggtcgatactttgaacattttcttaaattatttgattcaaataagagccatactatacataaaaaagtagtttgcattacagatttggaccctgttcggaaaataaaacaagaagaagctgactatgaaagatgctatccttttgaacttgatatagataaagagaattacctatataggaattactcgaatgatttaattgataaatatagtatagataggtatggcatgagtactcatcctaatatagtttgtttttctcaagaaaaaggaattggaaagacattcgagtacacacttgcttatactaacccaaactgtaaacttataataaccgattctataagtaattcaaaagagctaaatcgtttatttgatgcttattccgaggggaaagagcttgaagaattgataaacatacatggaaaaagaggagaagaaaatacgagggtaattgaaagtattaggaaatataaaaagccagacgttaaagaacatttaattgcttcaagatatttgaattcgataaaaaaaggtgaaaatgcttttgagttagcgcaagcactagaggaaaatttagagacaggaaatgttgctgattttaaagtgccaaattatattagggaagcgataacatggatatgcagataa

SEQ ID NO: 75377 - DNA, 1719 bp, Aneurinibacillus migulanus
atgcagataattaattcggattcctatattgatattaatcaacattttaaagtatcagctggaccaggtgcaggtaaaacaaaatttttaataaatcatataaagaatgtgcttcgtaattcagaacgtttaggtcgaaataggaagattgcttgtattacctatactaatgttggtgttgagactattttacaaagactaggtgatgaaacagatcatgttgaagtaagtactattcatagctttctttatacccatattgttaagccgtatatgtttttaataagtgataaatatggtattgatccaacaaatattgattctccatgtgaacatattgtgtctaatgggtatttaagtagaactgatttggccactaggttctttgtgagagagaaagatatgaaaaatgtctattgggaagtaagtgatgaaacatgtaaacttcatttaagacatagggatagagataagggatatcataaaagtttgttgaaatataaaaagtttttttgggaaaaaggaattattcattacgaagatatattagcgttttcgtgggaaatactcaaatcttttgaagaggtacttcggataatacgttctaaatttccatattttttcatcgatgaattccaagacacaaatccaatacaaacaaacataataaaattaatagcccagaacgaaacaattataggggttataggagataaagcgcaatccatatatgaatttcaaggggccgatgttaaacagttcaatgattttagtttacctaatatttccctctatagaatggaggataattatagaagtactgaaaatattattagtattttaaataacatacgaaaagatatagagcagaaaaaccctctaaataaaaaaggtaattcacctgttattattgtgggagaggcgttacaagcactgaagacagttcaagaaatcttaggggaacagtcatttacttctctttcgtattccaatttaacagctaatgctattagaaataataagccaattgaagaaggagacaggtggaaagtaattgaagaggactttgatgattctgatagtaaaagaagaaaaatatttatatcattaataaaggctattgaacttgcaaggttatctcattataaagaatcccttagagaattaagcagacatgtcaagaaaacagataattttaatggagaaaaaactgcattgatagtaatcaaaacactattaaatgattattatgaatttaatagtaagccactctggtttctctatgataaaatagtgagtatgggatattttcaatttcctaagattagggagagtaagaatgcgaaggtaccttcaaaagccgaaaagtattataaagaaactttatattcggacattgcattatatgtaaagattgcagaagatgttagcttacattgtacgattcataaagcaaaaggtagtgaatttgataacgtattattgatcgtaaaaggaagggacggcaaaaagtacattgaagagagggacttaggttttttattagatccagacatagatgaaaatgaagagcatagagtttattatgtagcatgtagcagagcaagagaaaatttgtttataaatgttcctgaaattactgaggaaacgaaaaataagttgcaggatatgtttgactttaagtatgtcagtgatagaagcttagttactataacataa

SEQ ID NO: 75378 - DNA, 1851 bp, Pseudomonas sp. MRSN12121
atgctcggccaggagttggtcaggaggaatgcaatcgggtggccaagtcagtgcaattgcgcaggtgacaacaatgccggcaagtcaacattgctggaagcagtggacctggtgcttggcccagaacgcctcagtcgccgccccgtaatagacgagcacgatttctatgccgggacgtatgtagacccggtcaaaaaagaggtggttccgatccagatcgaggttattgtcgccggcctctccgatgagcagcagcggcatttccgcgaccacatcgaatggtgggatgcgcaggccaaaacgttacttgtgggggctcccccggaaaggacagacgcccctcacgttggtgcagcaatgcgcgtcttcttcaacggctggtatgacgtagaagaggatgacttctctggggatacctattacgccactcctgaaacaccggatggttcctacctgcgcttctctgcacccgacaagcgaaagtgcggttttctctatttgcgcaccctgcgaaccggcacccgtgcactcagcttggagcgaggctctttgttggacgtgatccttcgactgaaggagacacgactgacaatgtgggaggacctgctcgaccagctaagggcactgccagttggagagaccgaagacatcggcgagctgcttgccgcagtccaagatgccgtgcggcactacgtaccatccgactgggcagaagaccctcacatgcgtgtctcggatctcacccgagacacgctccgccgaacactgaccgtcttcatgggtacgggcgcaaagaggccggacggttccgtctactctgcgccatatcagcaccaaggcactggcacgattaacacgctggtgttggctctgctgtccatcatcgccgaactcaagcaaagtgtaatcttcgcgatggaagagccagagatcgcgcttccgccgcacacccagaagcgaatcatcaattctctgcgccagaagtcagcacaagccatcttcacctctcactcaccctacgtgctggaggagttcgagcctgcccaggtggtggttctcaagcgagtggccggtgtcatgaccggaatccctgctacatacccaccatcagtcaagcccaaggcttatcgcaccgaatttagaactcgattctgcgaagccctactggcccgttatgtactcgttcttgagggtcgtacggagtacgacgcattggctgccgccgcccgccggcttggcgagttggatcccacacgattcaaatcactcgaaaaccttggggtagccatcgtcgacgctcgcggggagaccaatgtcgctccgctgggtgcattcttccggtcactcggtaagaccgtgtttgcggtgttcgacaagcaatcgccggaggcactcgcagccatcaaggcctcagtcgatcatccttacgagtctgcgagcgcaggcttcgaagacctggtgctgcagggcgcatctgaggccgcactccgcagctatgccgctgctgtagttgccggaggcgattggccgcagcatctcgcggcatggacaccagcagccgcaacgccgttggctgatctgcaggctgctctgtcgagttatttcagctgggctaagggtggtggcgacgccggcgacttgctcgcctcctgtcaaaccgccgacgacatgcctgaatacgtgagaaccacgttggcagccatcaagaacgtcattgagccaccacggctgcctccattacctccccaggcagccggcatgccccttctcccagaaactgcagccaagccggcaccattggcagccgcctatggaaggtttcaaccgtccccgccccagccttcgacatga

SEQ ID NO: 75379 - DNA, 1650 bp, Pseudomonas sp. MRSN12121
ctgggtggtcctggtggaggcaaaacacacgtcgcgctggtgaaggctcgcgatgagattcgctcaggagtactcaagccaggccagaagattctcttcttgagcttcgccaggcctaccgtagcgcgcatcatcgaaaaggcttctgagctgatttctcgtgaggacctgaagcaactggaggttagtacgtaccacggttttgcatggagcattctccggagccatgcctatttgctgaatggcaggcgaagcctgcagctcctgccaccgccagaagcagcagcgcatttgactgatatcgataaggcccaacacgaaaatgagaagcggcgccttttcgagcaggaaggccgtctgcatttcgatttgttcgcaagcttggtcagcgacctgcttcgtcgaagtgatcggctaaacaccatcttctccgacacctatcccataatcatcctcgacgagtttcaggacacaaacagtgatgaatgggcgctgattcagcagcttggaagacgcagtcgcctcattgcactggcagaccccgaacagcgaatctacgagtttcgaggcgctgaccccaggcgggtgggcgactttctggagagcttcagcgccgctcacttcgatttcgccggtgaaaaccatcgcagcggcggtaccgatatcgcaacctatgggaacgaccttctcaccggggcgaacaagggcaggacctatcaacaggtcaaaatcattcgctacggcttcttatatggaaagagctcgcacttcagcgccaagaccgcagtttactcggcattggaacggctcaagaaagtaccggacaagtcgatcgcggttctggtgccatccaaacggctaatgcttgagctttctgactatttctcatccacgtctgatggtctgccggagctatatcacgacgttgcaatggatgcagagccgccggctctagccgctggcgttatcgccacgctactggagggaggtacggctagcgatgtggcaagccgcatgctcggcgcacttcactcgcacattcgcggacggcgcggaggcaagcctacacctcagacggagcttgacctggcaggcgctcttagcggtttcctttccacgggaaagatccgcggtgccaagcgccagttgattgtcagcgaagttcaacggatctcagagttgcggcaacgactggaattcacaggtgacccttcggaggactggctatatctgcgcggcctgttggcatcctccaccgcggaagccttgaggcaagtagcaacggatgcccgctacttacgacttcttcatcgaggctcggtactgcgcaccagcttgggtgccctgtggcgtgcccagggtgggtacagaggtgctgaagaggcagtccgcagtgccttgatgcaggagcatttcgctgctgctcaaaaagactggcgcggcatccatctcatgacaattcataagtccaaaggcaaagagttcgacgaggtcatcatctacgaaggcctataccagcgcatcgccaaagccccgcaggacccaaagacctgcgctcaagacctgttagctctacgggtaggagtgactagagcggtacgccgtactaccgttgtgacgccgaagcgcgaaccttgtcctttcctgtga

SEQ ID NO: 75380 - DNA, 1845 bp, Burkholderia pseudomallei
atgcacctatccaaactggtcatcaagaacttccgcaagctgaagcacgcggaactgtcattccaagccggactgaacgtcttggtggggggcaacaacgtcggtaagacggcagtggtcgacgccttgcgcgcgctactggccggacatgacgaaccctatccgcggctcggcgaagaggatgtgcatcgcccccacgatggaacgccgtccggcgacattgtattcgagtacgtgttcagcgggctcagtctcgatgacgaagcggacttcctagccgcactggtgcccggcgctgccggtggtctggaagctcacattaaaattcgctactcggacgccgacaaggctggccgcctgcgcgccaagcggtggtgcggcgagcacgaggacgtgggtctgacggcagacatgatggaaaacctgcggggagtgtacctgccgccgctacgcgatgcctcgcaaggcctgaagccgggccggaccagccagcttgcgcgactgctacaactgttggcagacgagtccggtatcgaaggcatcaacaaggcgctacaggagctcgatgggaaactgaaagagcatcttcccatcgccaacacgcataacgccatcaacacccggcacaagacgatgctgggcccgcagctcgcgcagcttctggaggtcggcctgagtgccagcgactttaagagcctgaagtctcggctgtcgctgctggtggatgccttcgaaattgagcagaatgggctgggcttcaacaacctgatctacatggcagtcgtgctgagcgagctgaccaagaatcctgactcctgctatcggggcctgatagtcgaagaacccgaggcgcatctgcatccccaactccaggccgtgttgctgcagtacctgcagtccattcaggccgtcgaaggcgagaagcccgttcagctctttgtgacgagccattcgccgaactttgccagcatcgccgacctaaacagcctagtatgcctggtcgacacaggtactgcggtcgagaccttcctcccacgcagcgtcgtcttcgacaaaggtaagcgcgagaagctagagcggtacctcgatgtcacgcgcgccgaattcttcttcgcccgccgcgtgatcttcgtcgagggtgcggctgagctgatgatggtcaacgcgctagccaagcgcatcggctgcgacctgcgccagcatggcgtgagcctcatcagtgtcgaaggtctgaacttcgactcattccttccactctttggagacaaggcgctgaaaattccggtggcgatcctcaccgacgcagacccggtgccgcccgagactcaatcagtcgcggcggaagcggcggctgtggagggcacgccaccgtcatggtcggccgacccagccgctgacgagtcagtcgacgaaagccaggacgccgaccccgagccggtgtatccggcgcccggcgacatcattaccttgtcggccaacacggccaagatgaagggccgcgaggacacatacgtcaaagtgttccacggcctcaagacgttcgagtacgacctcgccctggagtcggacaaccgcacagccatgctcaaggcgctggccgaactgcacccgaggatcgccaagtcgttgattgccgccgtcgatgcagaagtgggcgacgcggccaaggccaaggcgctgttctgcggcatgttcgaacgcccgaagaacaacgtccagaaaggcagcttcgcccaatcgctggcacaggtcatttcggacgacaaggtagccttcaccgtgccgaactacatccaggccgcgatccagcatgcttgtagactggcggcgactccaaagccatga

SEQ ID NO: 75381 - DNA, 1827 bp, Burkholderia pseudomallei
atgagcgagctgacaccagagcagcaggaaatcgtcgacgcgccgatggtgccgctgtgtgtcatagcctgcgccggcagtggaaagaccaagacggccgtccaccgcctcgtgcgaatgcgccgcaatctcggcgaggcgcgcggccgcgtggcgctgctgtctttctccaacgtggccgtcgacaccttccgcaagacctacgatgacctggcgagcagtctgccgtccagcgccggccggtcgagggttgacatcgacacactagacggctttatcaccaccaacatcatccggcctcatggccatcggacaatgaagtccctgcgggcgacattcctggtgactggcaacgaatccttcctagagggattcaagttctctacatcgtcttttcctcagccaatcacggcgctgcacctggcattcgcgaacggtgaagaggtgttctaccacgtctacaacgaccagatcgagcttgtggatacgtccgcagcgcgcaatctgattgcgaagctgggccgcaccggcgcctacacgcatgacctgggacgctattgggcgtaccggacgctgaaggagcgccccgagctcctcgccgctctggttcgccgatacccccacattctgatcgacgaggcgcaggacattggatcggcgcatcaggctatcctggagctgctcatcgacgccggctcgtgcgtgacgcttatcggtgacccaaaccagggcatctatgagttcgcgggagccaacggtaaattcctgaccgactaccaccagcgcgccggcgtcaagaagcactcacttcaacggaacttccggtctaccccgagcatagtggatgttgccaacggtctgtgcggccgtagcgatgttgccgatcgagctgcatccagcacgccgcatggcgcctttttcacgggctacaagcgggcccagcacgcacaacttatcaccgcgtttcaaggcgcgatgtccgttgtcggcgccgacgtcacgcgctcagccgtcctctgcaggggaaaaggtctcgccgagacgctgcgtggcgacgaagcgccggccggccaaggcctagtcaaggctttcgcggctgcagcggtgctgcgcgaccggagaaaggactttctgaaggcgtttcagcgcgtagccgtggctgtggtcgcactgctagaaaacgcgccccatggcctggtgagtcaaattacgcaaccctctagtgatgaggcggaccgggaactccgcaaagcaatctgggcatttacgcgcgacgcggccaccggcctcccttcctcgtcgctggtcgcggccacccaatggcactccttgctgctggcccgcatcaaggtcctgctagccagcctggagtcaaagttcggccttaagtcgaccgaaaacattggccgcaagctgtcaaagaaggctctgccgagcgcgccgctcgcaagcgccgaggacctggcctacggcgatgtcacgacgctgcgagttgacaccgttcacaaggctaagggagaaagtctggacgccgtgctgtacatcacccttaaagagcatgctcaggcactgctggatggtgtcaccacggaggtcgggcgcattggctacgtcgcggctacccgggctcgagatctgctgtgggtggctgtgccggacagcgctctgaaggaactcaggccgatgctgctggctaaggggtttaaggaagtgggcattgcggtggcaccggtccctgcggttaaggccaaggtcagcacccatgtagggatcgcgtccgtcgtcgccacaacgcccgtcatctcgagcacaacgcaaacgccatga

SEQ ID NO: 75382 - DNA, 2190 bp, Staphylococcus aureus
atgtttatatctactcttcaaattcgaaattttagaaattatgaatccgaaatctttcgattcgataatgagacaaatactattataggtgagaatgattcagggaaaaccaatgctcttactgcattgagaatcttattagatgatagttattactatagtagtaaaacactaaaagaatcagatttttttcatggaattcaaaatgggtggcaagggcattggattattatctctgcgacatttgaaggaatcagcgaagaagaatttgacaatgagatttgtgcttccatttctttaaattctgaaagtcaaacaatcttagaagaattgatttcaaatgcagataaaggtgtaggtagtatttctctatttattagacctaacaaagctattagaaagcaattatttgatatttccactgaattagactctcatcaatttaacgaatttagaaattctattcgtctatccgactatgaattttactacacatctaaatcaaatctaaatttctgtatcaatgaaaattatgataaattggtaggaagactcaatgacaatatagctagtaatcctgaagaagacgatgaagctctgttgggctcaagaattgacatgtcagatattttcaagcatatttcggttgtttatgttgacgctcttcgagatgttcttagagaaatgaaaaacaatcgaaacccagtcaaaagaatcatggaaacaattgaatcaaaaatatcatcagataatgttgagtcattaaaaacaattatacagcaattaaatgagactattaccagtgttcctgaaattaggaaaattggcgaaaatattaatcggcaactaaatagcataattggttcagtgtattctcctaatcttcttctttcctcaactatgtcagatgatatgggttctttagcaaaatttctttcaatgaagccagaacaaaatatcgacttagacttactagggttaggacatctaaatatgatttatttagctttgaaaatagtcgaatttgaagcgtgtcgttcaagagaactacttaatattatgttgattgaagaaccagaagctcatattcatcatcatattcaaaaaactctgttcgaaggattaaatcttcaaaaaaactatactcagattctcatgaccacacattctgtacatttagctgaagtgtctgaaatatctcggatgaatgtattaaaatcgtttaatggcaaatctatcgttatgaatccagcaaataatctgaactcatttgctaaagaaaagttaaaaaagaacaatctaaatctaataaacgcagtagagagatatttagatgttaaaagaaatggattgcttttttctaaaggtgttatcttagttgaaggagatgctgaagaaatacttattcctcaaatagtaaaaaaattatttggtataaacttagacgaacttggaataggtttgattaatgttggtagtacttcgtttgaatatatcgctagcttgtttgacgatgatagaatacagagaaagtgtgctattgtaactgatttagatgaacaggcaatcccatcagaacatcgattgtataaaagcactgcacaagagaaaggtcaagcaagaaaagaaaaattatcctccctttttaatgaaaacaattgggttaattgtttttatgctaatacaacatttgaaattgagtttttagatgtgaataaagaaaatattctaacttatgtcagtccaattatagatgacgcattcaaagataaaaaaacaataactgcttataaagaagaaatacaaagtgaacaatatttagaaagaaatttagcgatgttaaaactagccaatcatgttggtaaggggtggtttgtaattgagttaggtgaaaaaattgactttttaatcaaaattcctaagtatattcttaatgctattgcttttgcatgtcaggaaatagtagatctctcaatttataaaaaaattctactccatacaatcgacttgtacgaggaaactacagaattgtcagctttatcagctagtttaaaaacaagtgatacagctgatttgaatatagcaataatttctttattagagtactttggtaaagatgaggatgttgtgtatctaatcaatcagatagaaaattacacaaaaatactttatgctgaggtttcaaaatga

SEQ ID NO: 75383 - DNA, 1794 bp, Staphylococcus aureus
atgacaaatatcttcgaaaaaatcgtaaatgatttaaatttagaacaaaaagatgttgtggaaagtgaagataacctttatgtaaatgcatgtcctgggagtgggaaaacaagggtacttacaaggaaaattgcttaccaagcaattaaacacgatggatcactaaaaagaataattgctatcacatacactaatagagctgctgaagaaattaaggaacgcctaagtttacttagtatagatgatgatattaatatttgggtggggacaatacatcagttttgtcttgaatttattatttatccttttaaaatgaatctctcaagagtatcaaaaggatttacaattattgatgattatactcaaagagcttacgtcagccaaattaataatatgctgaatttaaatctcaaaacgtatgaactgaacaaaattgatttgtcactttctcatgattttaaaattaatgaagttcagtatactcaagtttctgaaatgtatcacactatgttggaaaaaaataaagaaattgattttgatatgattttactagtagcgtataaaattttaactgtaaacagtaacgttgcacgtaatattgctagtaatataagggcgatttatgtggatgaatttcaagatactagagaattacaatacaatgtaatagctaaattacttcaaaacaaccctcaaattcagtcaatgtttgttggagatattgaccaagcaatttatggatcattagatggtatagctaaatcagttgaagaactagaaatgctaactagtcacacttttcaatcaaagacgctacatggctgttacaggtctaatcagagattagtagacttctactctaattttcagagttgtccttacgagattgaaagcagagggaataataaaaacgaccgtggttttataagttatgattgcaaagttactaaggaggatttacccaacataataaaaaatataataaaggaaaagattgaaagcggcattcatgaaaaagatatttgtgtacttgctcctcaacactatcctctgttttcactgggtgagtatttaaagaaagaattaccgtattgcaattttgatgctataaatatatcaccaattaaggtaaataatcatagtttatttttcaagttagcaattttgtactttactgaatcaggtgaaaaggttcgaagaagaaagctaattgcaaacgatattttaattatattaaaaaatgaatttggaatagaagttaaagattattttattgacttagatttattacagctaataaacagtgtgaaaagaatgtatagtggagacgacaacggtgttgatttatacaaatttgttaccaaacatatatttgttaatcttaatattgacgagaacaattacccgtctatttttaagcactatctattttttattaacgaagtagaagatcggataaaaaataattcattatctagtagtgtatctagttttaagaagatgtttaaatctcgagatggtatcacacttactacagcacataaagttaaaggaaatgagtatgatactgttatcgctattaatcttctaaacgggaaaattcctcattggaatgaaatttttaatgtttctgataaaggaattagttcagcgagaaaactactatacgtaatttgttcaagagcaaaaaataatttatttcttttctcagaggtgggttattttacgagtaaaggagacttgctttatcccactcaattattagataaaatagaatttgattataatatttaa

SEQ ID NO: 75384 - DNA, 2190 bp, Staphylococcus aureus; identical to SEQ ID NO: 75382

SEQ ID NO: 75385 - DNA, 1794 bp, Staphylococcus aureus; identical to SEQ ID NO: 75383

SEQ ID NO: 75386 - DNA, 1956 bp, Pseudomonas amygdali pv. tabaci; identical to SEQ ID NO: 72702

SEQ ID NO: 75387 - DNA, 1671 bp, Pseudomonas amygdali pv. tabaci; identical to SEQ ID NO: 72703

SEQ ID NO: 75388 - DNA, 2148 bp, Bacillus subterraneus
atgtatatctcaaaactgtatattagaaacttcaggaatttctgttcacaaaactttttatttcaaccaggagtaaatacgcttataggagaaaatggctcaggaaagacaaatgcattttttgcattacgtcttatgattgataataatctacccatcagtgcttctaaattaatagaaaccgattttaataggaatttatctagatggcaaggtcattggattattatatctcttcaatttgaagatttagattcaagtgagggagcgaatattttagctcataaacttgaacatgttaatgaagcttcaagtagcggctcttatcatttctattttcggccgaataaaaaattcagaaaaaaattatacgagctatctattgataaagataaagatcagcaaaagcttgaagaaattctaaacgaaataactataaatgaatatgagggtgtttatcattttcgaggtacagctgatttttctgttgaagcagtatataaagaattggttggcgactttgaaaatattattttccctaatcctgatgatgaaaaaaaggacttgctgggtattacaacatctcaaatatttttagtgcgatcagaaattgcatgtacgcatattaaagctcttcgagatgttatggcagaattacgtaaaaatagacaaagcccgttattaaatttattaaggggtagtgcaaaaaatattcaagtaactgctgcatcaaatattacaagcaaggtaacagatttgaatgaaacaatcagtaatctctcggagattaaggaattggctgaaaaggtgaaaaagacacttgattcaacaattggctttacatatgcaccaaatgtaagtattcgttctgaacttcctgaagatataaataaactgttccaatcgttaacactatgggttggagatggggaagatacaagctatcaaggtaaactagaagatttaagcttgggcggggcaaatttaatctatatcacgttaaaattattagaatatgagtataagcaaccgaccgaagagaaagctgctcatttcctattaatcgaagagcctgaggcacacattcatacgcatattcagaaaacgctgttcgataattacaaatttcagaatacacaggtcattacaacaacacattcgacacatatctcttcagcaaacaaaataaagtcggtaaatattctatgtaaagaggttaacgaaactgtcgtatgtcatccaagtaatggacttgatgataatgagtgcactaaaattgagcgttatcttgatgctacaaggagtacccttttgtttgctaaaggtgtaatcctagttgaaggagatgctgagctagtcctaataccagctctttttaaaagtgtctttggtttaagccttgatgaaatgggggtcagtttaattaatatgaatagcacagtcttcgaccatattgcaaatttattccatgatcaaagaatcagaagacattgtgccatcataactgatcatgacatatcacttacaccattaaaagtaaataaagacgatgatactgttgaggaaaggaaatctcgaaactctgaaataaaaggggaagaaagaaaacagaaactagatttatactgcaaagacaatccttgggttgaagcattttatgcagaacatacttttgaagttgattttgttttaaccggtaatcagcgagaaataatacaatcattaagcaaaatatataaatcgaaaaaatcaatagacaattcaaaggctttattagaatccagtgataatattaatgttggacttgaaacacttcgtctagcggataaggttgtaggaaaaggatggtttgcccttacacttgcagaggaattgacttatgaaacattcattccagattatatattaaaagctattgcgtttgcagcgggacatattggatttaaacactttgtaaaaatggctaagtacagaatagagcaacattgcagctatgatgaattttgtgaatttgtagatgctcttgaaaacctgaacgatattgagcaatcatatagcgagctaagaaaattatgcgaagaatacttagatgaaaatgatgatcttattttactgattgacaattatgagaggtatcaagtatgttag

SEQ ID NO: 75389 - DNA, 1797 bp, Bacillus subterraneus
atgttagacggtttaaattctaaccaactagatgccgtgacaacggataaaaatgcacttgtgattgcttgtccaggtagcggaaaaacacgcgttttaactcgcaaaatcgcttatgagttagagaggttcgatagtaaaaagaagtttattgttgcactcacttataccaatcgggcggctgaggaaatacaaaggagacttgatgaccttggcattccacaagagcagctttgggctggcacaattcattctttttgctatcagtggattattaaaccatattcagcatatgaaccagcattagttaacggattttccatcattgatgataacaaaaagcgaaaaattttaaatgaactaaagaaaaaacattctattcctttttttagcgatattaatacaggactggatagaaatgcgaattatatgaatgctgacccatataataatgcaattgcaaaggagttccatgagagtatcttagaaaacaaggaaatagattttgatttattgctttattattcctataaaatgttaataaacaataagaaaatacgctcacacctggcaaatatattttctcatatttttgttgatgaatttcaggatacacaggatttacaatacgctattattggacaagttctcactgtggctggcgataagtgtaaactatttctagtaggggacccagatcaggcaatatatggctcattaggaggaacgcctaaaagtctatatgagatacaagaggaaatcggaaatcaagatatagtgttcaaagagattcctggaaattatcgatctacacaaagaatcgttgacttcttcagaaattttcagtcaacagaagtaaatattgaagcacttggtcagcgtgcaaatgagcatggatatataacacttgatacaacaacaaataaggataatctttataaagagtttgctgatatcattactcataatattaaaaaaggtgtaaagccaagcgaaatatgtatcatagcaccccagtggtattttttaaccccacttgcacaaaaattaaaatctgttttaccagatatcccttttgatgcaccaggggtttcaccattgccaacaaatcgggagagtttttggtggaaattatcaaggctattcttatcagaaataacccctaaaacatctatgagccgttttagatggatgagtcacctaattaatgatttaaacggctatacaaacggttctttgggaaatgagtacatagactgtagaagataccttaagataatcaattccataaaaccgaatgaatcaaatggcatactatatttggaaaaagcgtttaaagcatttttcaataaactagaactcgatttaaatgattactatgtgctagtggaacaatgggatatattctttgatggtattcgtacacggtatgaatcaactgattttataggcactccagatgacattcagtactttaagaatatatttaagccttcaactggtgttgttataaatacctgctatggtgttaagggtgaagaatttgaaacggtgattgcgtttggcctactttggggatatattcctcactggagttctattagaaaccaaccaaactatattacggaatctgcttcaaataaattgttatatgtgattgggtctagggcaaaaaaaaatctgcatttatttgctgaaaaaggtaggaaagcaaattcaggatacgcctatcaaacaaatcatcaattagcacaggctaagtttgaatatgatggcacctactatcaagagaaataa

SEQ ID NO: 75390 - DNA, 2418 bp, Pseudomonas stutzeri
atgaagttacaggcatatcggctgcagaactaccgccggctgcgcgatgttgtcatcgagctcgatgacgaaatttctatctttgtcggcgccaacaacagcgggaagacgtccgccgtccaaggcctgtactcaatgctccgcggcgaagtgaagaagttcgagctctttgacttcagtgcggcgctgtgggccgagatcgacgcggtcggcaggacgccccctggcgatgaggatgcgcccaaaaggttaccgtccatcctcttggatctctggttccgcgtcggtgaagacgaccttgccattgcgatgtcgctgctgccgagcactgagtgggacggcaagtgcgtcgggatccgggtggcgttcgagcctcgggatgcccacgacctcgtctggaagttccatgaattacatgagaaggccaacaacgcagctgtcgcgcttgcggccaagcgcaaggctgccggggagcaagccgtggaggcgggcgcggaagacgcggctgcggtggtggccgatgccggcgagtacaagccttggccggaaagcctgacgaagtacctcaccaaggagctgagcaaggaatacaccttccgctactacgtgctcgatgagcgggcttttgtcggctatcaggcaaaggaggccgactacgagccgctacccctaggcaaggagccgggcggtgcggccattctcaagtcgctggtgagggtcgacttcctgcgcgcgcagcggcacctcgatgacccggataccggtagctctgatcgcgccgagagcttgtcgcggcgcctgagcaggttctatcaccgcaacctggagaagcgtggcgacgaccatgcggctctcaaggcgctcgatacctcggagaaagagctgaacttccatctgaaggaagtcttcagcgacaccctcaagcgcctggccaagctcggctatccgggcgtcaacaatcccgagatcgtgattcgggcggccttggatccgaccactgtcctggggcaagacgccaaggtccactacgtgatcccgggcgtggcttccgctcaactgcccgacagctacaacggcctggggtttaagaacctggtctacatggtggttgagctgcttgacctgcacgagcagtggaaagccgaggaggacaagcgagctccgcttcatttggtcttcattgaagagcctgaggcgcatctgcacgcgcagatccagcaggtcttcatcaggaacgttttacgcctccttgaggatgctaacgatcacgcgacttttttccacacgcagctcgtcatcaccacgcactccccgcacatcctctatgaacgcggattctcgcccattcggtacttccgccgcgtcagcgaccagttgggccatcacacgaacgtgcgcaatctgtcgctattcaaaacgggcgcgtccgaagctccagcgcgcgaattcctgcagcggtatctgaagctgacacactgcgacctctttttttccgacgcggtgatattggtggaaggcaacgtcgagcgtctgctcctgcctgcaatgatcgaggtggcggccaagcgcctgcgttcttccgccctaaccatccttgaagtcggtggcgcgttcgcgcataagttccaggagctgatcgccttcgttgggctcacaacgctggtgatcacggatctggacagcgtgacggtcaagacggacgccgagaaggccgccgcgcaaggcgcaggtgctgagggcaccgtcgacggagatgacgaggacgacgacctgaagcccttcgagcttgaagacgacgacgaagcagaaccgggtggcaagaagaagtcgaagaagcgtggcagcacctgccatgcacacgtggaaggtgccgtcacgtccaaccaaaccctcatcagctggatcccgaagaagcggtcgatggcagaactctgggaagtcacggcggagcaaaagacgctgtcgctggctgaggattctagcgctgaggttcgggtggcctatcagatcaaggtttcggtgacggtgggtgcgacgacatcgcagctctgcggccgcacgcttgaggaggcctttggccttgagaacgcggactggtgccaggctgaggccaaccgggcggtcggcctcaagctcaggagcgcaccgagcagtcccgaagagctggctgagaagttacacaatagggtggtaggcaagaacttcgacaagacccgctttgcgctggaggtcctcgcaagcggaccgctcaatggctggaaggttcccgcgtacatcgccgagggcttggcctggctcgaagccaaagtggcccacgagcttgaggcggacgccgccatcgccgccgaggtcgcgactattgagccgactgcagccgatgttgtcgctgtcattgttgccccagggcagacggcatga

SEQ ID NO: 75391 - DNA, 1932 bp, Pseudomonas stutzeri
atgagcagacgaattgatagcccagataccgacgccgaccgcgagatccatacatgcattgccgcgacgcccccgcagcccttcgtggttcgtgctggcgcaggttccggcaagaccacctccctcatcaaggcgctggactgggtgatgtcggagcacggcgccagcatgcgggcgaagaagcagaaggtcgcgtgcatcacgtataccgaccttgctgccaatgaaatcctggcggacgtcaacgatgacccgctggttcatgtctcgaccatccacagcttttactggtctattgccaagacgtttcaggccgacatcaaagtttggctgcagaacgacatccgcaggcggatctccgagctggaagaagcgttcgagaattacagctcgcgtgtccggcagaccacgcgcgacaggaacaaggccgaccaagagcgctatggccgaagcctggaggctgtggccggcgtcaggacgttcaactacggcgtgggcagtgactacgccaagggcatcctcggccacgaagacatccttcagctcgccgacttcctgctgcaaaaccgcccgctattccgacgggtcgtggcgctgaactacccgttcgtgttcatcgatgagagtcaggacacgtttccgggggtggtgaagtctttcaaggaagtggaagcccagatgcggggcaagttctgcctcggtttttttggcgacccaatgcagtcgatcttcatgagaggcgcaggggacatcacgctcgaagaccattggcgggccatcacgaagccggaaaactttcgctgcgccaagcagatccttgacgtcgccaacgccgtgcgcgcgcagggcgacggcatggagcaagtccgcgggctgcacgagaggggcgatgggggcctcaagccggtggaggggtcggcccggatgttcgtcctgccgaacacgctgaaccgaaccgaggccttggcaagagtccgggcgtggagctcggcgacgaacaacgacgagggttgggcaaccccagacatcgcggtcaagattcttgtcatcgtgcaccgcatggccgcaaaccggctcggattcggcggcatctactcggcgctgaacgacaagacgtctgatgccatgaagcaggggatgcaggacggcaccggctggcccgttcgacccttcctaaattttgcgctaccgatcattgcagctgtgaacgccggcaatgagttcgcggcgatgaacctgctccgggagttcagcccgcgcctggcgcctgcggctctgaccggccaacgtgcggtggatgtgttgcgagagctgcatgctgctgtgttgagacttgtcgccatgctggacgaggcagggaccaccattggtgacatagctctccatctctgtgacacgggtcttttcgagttcgacgtgcgctttgcgcgtgttcttgggtttgtcagggatgttgctgacgccgttcaggagcccgaggctgctgatgcagttccggccgaaggattatcctcggacgcggcaatggccaagttcttcaattgctctgcgcaagagctttggccctatgaacgctatgtctcagaaggctccccctatgccacgcagcacggcgtgaagggagcgcagttcgagcgcgtcgtggtggtgatggacgaggaagaaagcgactaccgaacgtacaactacgagcgtgtcttcgcaagtgctgaggcccgtgctgcagatcgtgcgcgagcactggatggtgatgaaaacacttggagccgaacgctacgactgctttacgtctgctgcactcgcgcccagcgtggactggttctaatgttctttgtcgccgatccggcgaccaccctggaaaacgtcgtggcgagcgggatcttgccgcgaagcgcagtctttacgcaggaagtgttagctggatggccatag

SEQ ID NO: 75392 - DNA, 1911 bp, Bacillus cereus
atgtacttatcagagataaatgcatggaattttagaagatttgggataaaagatgatgggaaaccaggcgttcatttgaaatttaatcaaggattaaatttgctagttggagaaaatgattcgggaaaaacagcaatagtagatgcaataaaatatacaatattgacacaaagttacgaaaatttaagaatagaacttgaagattttcatattccagtaggtgaaagtgatgaagatgaaagggctcaagagttacgtatagaatgtatttttcgagggttttcagatttagaagctaaaaattttttagaatggcttggaatggaaaaaaattcagacgaaatatatgaatattatcttaaggtttttttaattgctaagagaaaaggaaatcatatatattacgatattaaagcaggatcagatcaggaaggtaaagcattgaatggagaagcaagaagtttattaagaacaacttatcttaaaccattacgagatgcagaaaaagaaatggcttcaaagagaaactctcgattatcccaaatattagaaagtcatgaggcgtttaaaggaaaagaagagcattatttatatgagattattcaagaggcaaatggtaaaataaagaattattttaaaggaaaagatacaagtggtgaggagttaactgatcaagaaggaaaaaaaatattggaacaaatcaatgtgtatttagaaagttttgctggggaaaataaaatgcttagttcagattttaatatatcaccgttaagattaaaaaatattttagaacgacttaatttagagttaattgagagtaagtctggcttaggctctcataatttactatttattgcaacagaattattattattgaaaagagaaaattatcaaggcttaaaattagcacttgtagaggaaattgaagcacatttacatgtacaagcacaaatgaggttaatagattttcttcaacaagaggtggaaaactctaatttacaattaattatgactacacacagcacagaccttgcatctaaagtgaatttaagtaatttaatcatctgtaaagatggtgcagcttttccaatgggatacgaatacacagagttaagtcagggggattatttattcttagaacgctttttggattcgactaaagcgaatttgttttttgctcagggggttatattagttgaaggggatgcagaaaatttattaatacctactatagcagatattattgaaaaaccattatcaaaatatggggtttcaattgttaatgttggaaacaccgcctttttaaggtactctagaatatttaaaagaaaaaatcctgaaataggaggtttaaagatccctgttgctgcaataactgataatgatgtcagaccagatttatataagagtaaagaccctcaagcaaagacatgggaagatctagaaaatgaaaaaccaattgagcaaagaagagaagaaagaaaagcaagaattgaaggacaagatgtgaaattatatatatctcctgtgtggacattagaatatgatatagcattaggtattctacaaaaagaattatttgaagcagtacttagggccgagaaaattcaaaatagtgattcaataggtttgactccagcaaaaataaaggctgtaaataaaacagtagaagaaaaatataagaattgggaagaagaaaatgttcctaatgaaaagcgagcattttatatatatagtaatttgatgttagataaaagtatttctaaagcaataactgctcaatgttttgcagaagttttaagtcaaaagcaaaaagaggatcatgaaggtttaaaagaaaaaatcttaaaagatgaaaatttaaaatatgttgtacaagctattaattatgctacaaatggagttggataa

SEQ ID NO: 75393 - DNA, 1905 bp, Bacillus cereus
atgacacaaattgatagtcgagatatttcatatgctgaacaaatgttgttacataatggtgagagttttgatgatgagcgtagagctgttattcaatgtctagagagtaaagatatcatagcttgtccagggagtgggaagacaacagcattgttagctaaacttgctatattagcaggtaaattacctttggaaaataataaaggaatttgtgtccttactcatactaatgtagcaattgatgaaattaaaaatagattaggtatgcatggtgaaaagatatttaaatatccaaataactgtagtaccatacaatcttttgtaaatcaatttttagcaattccagcttatatacacttttatgggaaaaaaccctttagaattgatgatgaaatttataatgaggaaataaggaaaaagtattatcgaattgttccttatggcttacggtttgggatagaacaaagtaggattgatgtaggaactattcgttttaatttagaaaatgaaactttacaaaaaagtttatatggcgcaaaaatctatactaacgaacaaagtagaagttatttggcacttaaaacattaaaggaacaaatgctagaagatggaattttatgttatgatgatgcgtatttcttagcttataagtacttaagagagaatcctaaccttaagggagtgttttcaaaccgctttttatacgtttttatagatgaaatgcaagatactatgaaacaccaaaaggaactattagaattattatttgatgattccgtagtaattcaaaggattggagatctcaatcaatcgatatatgatcaatcaggtgcaattggttcttgggaagtggattcagaatcaagtttggagatttcagatagtaaaagattttctaaggcaattgcagatattgtgaaaaatatttgtgttactcctcaaaatctcaatggtaatactaatatagaagatataaaaccatgtcttttagtttataactcaacgaatattcaaaatgtattgaaagaatttgcgagaattgtagtagaaagggatttacataacttagatcgtaaagtttttaaagctataggatgggtatctgaacacgaaagagaaattgggataaaagattattgggaagaatttaaaactagtagacgaaagcgtagtgattttaatagtttgataatgtacttgttgaaggagtcatccgaagatctagaaagatttggagctaacttatacaatgacaagatattaaaaggaatcataaaagcattaagaataatgaacgaaaaaaatgaaggaaagcattatacaaaacagacgtttttaaattatttgaaagaatctcataatgaagtatatgaagatttaatgctcaaactttcgatatggtgtttaatgatccagaatcgtcaagaagtagtgggggaagttgaagaatttattacagtgaaattaaaaagaatatttaattggaatgatattagtcaattgacatctttttttagtaatacagaagaggaatcaactgaagtatatagtatacaaacgaatgtgatgaaatttttagaagaagagaatgaagttgatatagaagtagcatcaatacattctgtaaaaggagaaacgcatacagcaacattatatttagaaacttactattttgaatatgatataaaacgtattattgcatatttaaagggaaatcatacgaatactaatcgttcaagaatggtacaaaatttaaaaatggcgtacgttgggatgacgagacccacacatttattatgtgtagcagttcgagaggagtcaattaatggacacgaagcagaattaaatgctgcaggatgggatattagatatgttgaagagagagtgccagtaacacaggtttaa

SEQ ID NO: 75394 - DNA, 2316 bp, Raoultella ornithinolytica
atgcatttgagaaagctggcagtccgtaatttcagaaggctacacgatgttgttatcgatcttgcgtcagacatttcaattttcgtaggggcaaataacagtggtaagacttctgtcggtcatgcacttcaactattcaccggtaaaagccgattcaatattcatgacttcaatgctgaatgttggactgacattgtcacatttggagaaggggcggatgctgcgtcgctaccttcactggaacttgatatctggttcgaagtaacaccgaatgatgttcatcgtgtagtcgatcttctccccagcctatcgtggtcaggttctctggttggaatgcgcgttgctttttcccccatcaatcctgaagaaatccgttcgcgcttcctcgcagtacgtcagcttgctatcgatgccacacctaaagatgaaaatggaactctcaaatacgatccttcacctcgtaacctttgggaatatcttcgcgatagactcaatgacgaatatgaactccgctattttgttcttgatcccgcacgtttcaatgcggaaatgatatccgaggaaggctatgagcctactccgctcacagggcgtgatcgaagtggtcgcgaaatactgaacagccttatccaaatcaactttttgaatgctcagcgtcatctttcagatggttcaggaggttcccgtgcggaggatctttctcgtgttctcagccgtttttacggacgaaatcttgaacaaaaaggtgaagattacgaagcattaattgctttagctgcgtctgaatcagctttcaatcagcatcttgaacgtgtttttgcacctacgctgaaaagtctggcgaaactcggatatcctggactttcaaacccacgtatgatgattcgttcggccttagacccggcgcagatcatgaacaaccaaaatggggccgtaatacattacgcgctgggggaggatgacggtaatccgaccccaccaacactacccgatagttataacgggcttggatttaagaatctgatctttatggttgttgaattaatcgacatccacaaccaatggttagcaatagaagagaatcgaccaccggttcacctgatctttattgaagagccagaagctcatctccacgcacagttacagcaggcttttatacgcaagataatggaccttcttgccatggagagtcaggagcttatgcactacaccactcaagtggtggtgacttctcattcaactcatattctttacgaacgtggttttcggccgatccgttactttcgacggaagcgttcatcaaatatgtcggcaacagatgtgctcaatctctctgttttttatgataatactgatcctgaaattcgagactttcttgagcgttacttgaagctgacccattgtgatttgttttttgccgacggggctgtacttgtagaaggcaatgttgagcggctactgctcccgcaaatgattgctaccgccgcccctagattaaaatcctcttacctaacagtccttgagattggcggtgcttttggttatcgattccaaaaactaattgaatatcttgggcttactacactcattattactgatctggatagtgtgtactgtacccctctggtacaagatgcaacagaagctcgagcaaatgggttagatggtcttgcagaaaatccggctgcaaatgatgatggcgaggaacctgatgatgatgaggaagaacaggccaatacagaaacaccaggaaaggcttgtattgccagtcatcctggagctatgacctctaatcaaacacttcggcagtggttaccgaaatgtgacaccgttgccgctttatgggaagcaactgaggaaatgaaaatacaaagccgcacagctgagtgtgatgctttggttcgtgttgcttaccagtgccagacagatgttacatggaaagaggaaacactggcacttgctggtcgtactttagaggaagcttttgcacttgaaaatctgtcctggtgtcaagatgtgagctgtaagccgctcaaactacgtattgccagagctgtaagtatggatctactgcaactggctcagcgcattcacaagcgcgtgcaatcaaaaagcttcagtaaaactgattttgctctgaatttacttctaaaaaaaccggatgaatggtctgtcccaatatacatcgctgaaggattaaaatggcttgaagctgaaatagccccgccggaattagaagctgcagaagttcagggagagaatgttgaaggtatgtccgtcgttctggctgaaacagatggtgggagggttgcatga

SEQ ID NO: 75395 - DNA, 1878 bp, Raoultella ornithinolytica
atgaccagtcgcattggtagccctgatacacaggcagatattgatgttcgtgcttgtctggatagctcgccaccacgttcatttgtcatggtggctggtgctggttcaggtaaaacaacatctctcattaaagccttggcacatttggctgatacccgtggttctgctttacgtcgtgccgggcaaaaaatatcctgtataacgtatactgaagtagctgttggtgagattgccgctgacgttggtaactcacagttatttcatatttcaaccattcatagctttctttggtcggtcatccgaccttttcatttagatatcgcaaagtgggtcatagcgcgaatacatgaaaaaatagctgaaaagcaagcccattatgataggcccagaactcaagctaaaacaaaatcccgtcttgaagatgaaattacctatctctctgctcaacttgagtgcattgatgatgttgataaatttatctacgggacaggaagtaactatgctaagggtattttagggcacgatgatattcttaagcttgtacctgcttgtgttgaggctcatccccttttgagaaggattgtcgccaagcgctttccatttgtttttgtcgatgaaagtcaggataccgatccgaatgtgatctctgcgcttcgaactattgctgatgacaatcctgacatgtgcataggattttttggtgatccaatgcagaaaatctatatgagcggagctggtgccattccgttaagtgatgggtggtctgaaattacaaaatcagagaatttcagatgtccgacgtctgtacttggtgttatcaattcgattcgtgcttctggggatggcctccaacaaattcgtggccgaacaactatcgtagatggtgttgaacatactgtatcaggcacagtgaatcttttcatcttaccttcaaatgtggaacgaagtgcctatctcacatctgtcagacgttaccttgcaaatgaaactagcgatgaacaatggctaagtgatacacgcgaaggtgatgttcgtcttcttgttttggtacatcgtatggcagctaatcgactgggattccctaatttattttctgctcttactgataaagcaccgatgagcttgagtgaaggggtgaacgatgggtcagcttggccgcttcgcccatttgtccagcatatccttccaatttttgctgcggctcaggcaaacgatcaatttcagattatgtcgattatgcgtaacgagtgcccaaagctggagccatcacgattgcatggtcaagctatggtggcagttttaaatgaactacaacgaggcatcaatggcctgcttgcactgttggaagaaggatcgcaagcaacagttcgggatatattgctacacgttagagactgtgaactgctacgtcttgatgatcgttttgataatcatttacgtgatgaacctgtgaatgatggtaatgatgatttcgaaaatgttcagaactatctaagatgcaatgcccatgaactttgggcgtacagacgctacctttcagaggaatcaccttttgccactcaccatggtgtaaaaggtgcacagttcgagcgtgtattggttgttatcgatgatgaagaggctcgcttcagccaatattcgtatgggaaatattttcaatacattcccctatccgacaatgatctagccaatcttgaagagggtaaagagtcagtactcgaccgtactcgtcgccttttttatgtatgttgctcccgtgcactgaaagatttagctgttgtcatctttgttcccgatgttgccgtcgctcaatcggcaatcattgagcaaaatttatttccagcatcggtaattttaggggagcatgatctggcctaa

SEQ ID NO: 75396 - DNA, 2136 bp, Pseudomonas oryzihabitans
gtgcatatttcaaggctacaactcgtcaactaccggaatttccagtgcgcgaatatcatcttcaacaagggcgtaaacacaatcattggcgagaacgggtcagggaagaccaaccttttccgggcgttgcgccttttgctagacgactcactgttgcgctcggcctataggctagacgagaaggacttccatagaagccttggcgaatggcgcggtcactggattgtcattagcctcgagttcgatgaggtgtcccacgacgaggcgattcagtccctttttctgcatgggaccggcaacatcgccgacggcgcaatcggcaaggcgacctataacctgatttttcggcccaaagcggctgttcggcggaccctggccgaccttgcccttggtgataccataggacttgccgaggcacgttcgcagatcacaatttcggattatgaaacgatcttcactggcaaaagcaccgcagacttccttaaccccgaaacctacaggcaactggttggcgacttcgatgcggtgttgttccctcaagaactgacgaaccctgctatcgggggcgttatcccaggcatgctctcgatctcgcgcgaagtgtgcttcacctttgttcaggcactgcgcgatgtagttgccgacttccagaacaaccgcaccaatccccttctgaccttgctcaagagccggagcggtgcgatcgatccggagagcttcgagccgatcagcgcgctcgtcaaagggcttaacgacgcaatcgaaggcctgccagatgtcagaactattcgcgccgatattcgcgataccatttccgatgcggcaggcgagacatactccccgcgatcactttcgatccgctcggatctgtccgacgaggccgatcgcttgttccagtcactcaagttgtttgtgggcgagagcgaagagcaatatgagggtgcaattcacgagttgagccttggcggtgcgaacctcatctacctgacactaaagctcctagagttcaaatatcaaaagcagaaagaatccttcgccaactttctcgtgatcgaagagccggaggcgcacatccacacccatatccagaaaacgctgttcgaccggctaaactatgatgacacccaaatcatctattccacccattcgactcacatttccgaagttaataacgttctaaatatcaatatcctcggcagggaaggcggacaatgcgaagtatttcagccatctgcaggactagacgccggccagattggcaatatccagcgctaccttgatgcagtgcggagcaatctgctcttcgctaagagcgtagtattagttgagggcgacgccgaggaaatcctcatcccaatcctcattaaaaaggtcttcgggctcagcctggacgagctggggatcagcttgatcaacatccgaagtaccggctttgagaatgtcgcggtgctttttcacaacgagcgcatccgcaagcgctgcgcgattatcactgaccttgatcgcgcgtttatcgatacggtcgaagacgtgctcgacaaagacgatgtggtggccgcaaagaagaaagcactagggtcacaggtcgctggactccggcgcgaggcagcgctcaaggagctatgtgacggaaatccctggttgactgtgcacttcgctgaccacaccttcgaagtcgatttcgtctccgctggaaatgtcagcactgtcgtttcggtgctcggcgacgtctacactgatggcggcaccatcgcaacgtctaagtcggagctggaatcgggcgatatcgcacgtttcggagcacgagtactgacgatggcacgttacgccggaaaagggtggttcgccatcatcctggggcgaatgatcacacctgaaactgtcattccggattacatactcgacgcgatctttgcagcgcataagccggtatccatccagacatgggcgcgtgtgctggactatcgagtctcggtcttggccgcctcgcaactgcacgcgcctggaaacatcgaagcgatgcgtgcacaaattagactctatcaccgcggcgagatcgactttgccagggttcgtgccgaaatgctccaagcttttccagccgacggcattaataagattttggcgagcttctag

SEQ ID NO: 75397 - DNA, 1800 bp, Pseudomonas oryzihabitans
atgtttatctgggataggaaggatctaaacgatactcaagtcgcagccatcgagcacccaggcagcgtcttccttgttgcttgtccgggaagcggtaaaacgaggaccctcacctacaaaatcgcccgcctgctgtcagagctcaagtcggacaagaaacgcgtcatcgcgatcacgtacacgcaccgagctgcggacgagattcacgaacggatcgagcagcttggagtcaatacaagccagctttggattggcacgatccactctttctgcctcgaatggatcctaaagccctacggaatctaccacccggacctcaagcacggcttcagggtaattaatgcacatgacaccgaacgaatgctggaggagctctgtcgcgcagtgcagggcaccaagctcagcagcttcgaatgcacctattatttcgagccgaatggccctgtcctgacatgtaacaagactgccaagcatgaggccattacgggggtcctacaggcctattgggaggcgcttcgtgccgagcggcagatcgattttgaactgatcctttgctacgcctatcatcttatcgaaagtaatccgtcgatcagtgtactgctgggttcgattttcgaatgtgtgcttcttgatgaatttcaggacacacgggaaatccaatatgcgatcctcgcgtcgatactgaaaacttcgaagggcggtgcgtccgctttcgtcgtaggcgatcccaatcaagcaatctacggttcgcttggcggctatgcgataacggcagcggacttaggaatgcggtgtggcatagcattcaaagaaatgaacctgtcagacaattatcgatcttcatcacgcatagtgagttatttcggaaattacaacgtattaccttcgaaaatcgaagcgattggaaaggacaaagattacctgagcgtggtgtcatttgatagccaaacgcatcgcgatgcgctagaagaagagctcgtgagactcattaaattcaatgtcgaaacccttggaattgctcaacatgaggtctgcatcgtcgctccttggtgggtccatctcgcaagtatgacacgtcggttggtcgcggcacttccggcctattcgttcgacggcccaggcatggttcccttcgcgcgcgacgtagataacttttggtacaagcttgctcggattattctgacagaggcgtccccacagctctatgtacgccggatgcgatgggcgggagaagtaattgctgatctaaatgacgcgggcatcgatgttccaaatttggaccgtaagacgctactgcgcgcctgcaacaccatcaccatcacagaaactgatggtctggtctatctccgggcgtttttcgaccagctatgttcagttttcggcattgatcgctacacctgtacggcgcttcaggagcatcacgacgccttcttcgaatgctcgcagaggcgcgtcgataagctcatcgatgaaggcagcgaggcgatcgctgagttggcaatgttcaggaaggtctttgcaggccggactggtattaccgtatcgacgatccacggggtcaagggagccgagtacgatgcagtgatcgcctatggcctactgaaagggatggttcctcatttcagcgatccggaccaggtcgagacagcgaagaagcttttgtatgtggtgtcgtcgcgggccagaaagaacctacatctaatctcggaacgtggtcgcagtctacgttggggtggcgattatcaaccaaccgacgtgcttactggatgtgcgttcgagtatgaccagtttttcaactga

SEQ ID NO: 75398 - DNA, 1788 bp, Acidovorax temperans; identical to SEQ ID NO: 72168

SEQ ID NO: 75399 - DNA, 1338 bp, Acidovorax temperans; identical to SEQ ID NO: 73479

SEQ ID NO: 75400 - DNA, 1953 bp, Pseudomonas aeruginosa
ttgatactcaagcaaatgcgcgtgtgtggtttccaatcgtttggcgccaagccagtcactatcgattttcgaaagctgactttcttgattgggcccaatggctccgggaaaaccgcaacgttgcaggcgctctgtcgacttttttcgatcgaccccaatcagcgacgtctgcgcaaatctgatttcttcgttgcgcatgatgaagaagaaaggccggatgagcgaacgctgtggatcgaggcagacttctactttcctgaaatcgccgatgagaccaaagagcatccgaccatcccatgtaattttggtcacatgcggttggacagcatcagaggtgtcccgcgtgtgcgatatcgcctggatgcgacgctaggactggacgatgagattgagcagagcctgcgctacgtctcggaagtcgatgaggatggaaatccgatagccacctctccagtgccgcgtgatgagcgtaatcaaatccaggtgcactatctgccagcacgtcgcgatccagcagagcacatcacctacgggactaatgcgctcttgggccgcctgttgcgagccgtgaactggactgagcagcgtgaaaaaatcagccagttgtctgcagatatttctgcaagcctcagtaccaatcaatcggtcatcaacctgggtgacggtattgctaatgcctggggcaagctgcacaaaggcaagtttttcaaagacccgagcttgacctttgttagccatgagatcgaagcattactgcgacacctctcggtttccttcacccctggtcatggcgaacagcaagtagatttttcgcggctcagtgacggtcagaagtcgatgctttacctgaccttggtgctcacctctcaggcgattggcagggctgtgctcaagggcgatgacgattctttcgacttggataagctaaagcctgcagtgttcaccctagtagccctagaagagccagagaatagtctgtctcctcattacctgggccggatcgtatcgtcgctcaaggcattggtgctgggcaaggatgcctatgatgcgcaggcgatgatcgccacgcatgcgccttcaatgttgcggcgcgttgagcctgagcaaattcggtatcttaggcttgatgactcgcgctgcacggccgtaaccaagattacgatgcctccgaaggctggtgaggcctacaaatttgtcagggaagcagtgcaagcctttcccgagatatatttctccaggctggtagtgctgggtgagggcgatagcgaggaaattgtgttgccgcgattgcttgctgcagaaggactcatggtggatgaggctgcggtgtgcatcgcgccattgggtggtcgtcacgtaaatcatttctggcgtcttttgagcgggctgaaaatcccttacgttacgcttcttgatcttgacgtggctcggcacggtggcgggtgggggaggatcaactacgttgcaacgcagctcaatctccattgcccaaaccaagggtatatgcctgatgaccagcttgcgaaactcccaagctgggataaccccaaatataaaattctgaaggttgagaaaagtcgggagtggaggaactacatcgctgagcttgaaccgtttgacgttttcttttccagtccaatggacttggacttttccatgctctgcgccttcccacaagcctttggtgtcgaggccaaagaccttgtggcaccgaagatcggccagctcagatccgtgctgggtgatagcttctttgacgaaaaacagtacaccgtgactgagcgtaagcatttcgccgcgtaccacaggttgttcaaggtcgacagcaagcctaagtcgcacattgaggccctttcgaatctctctgacgatgatttgagggagggtatgccaccctcgctcaagcgactggtcaagcatgtgatcaaaatggccagggagcttcacgaatga

SEQ ID NO: 75401 - DNA, 1668 bp, Pseudomonas aeruginosa
atgatcaaggtcgacgcttggaagccttccgccggcatcaagcttgagcctaatgcagagattgccgcgacggagcaacagcgcagtatagcgctgactgctgggccaggctcgggtaaatcagagttgctggctcagcgcgctgacttcctactcactacgggtgtatgtcgttatcccaaacgcatcttggccatcgccttcaagatcgacgccagtaacaacctgaaggaacgcgtttggcggcgttgcggtgcggcctatgcaggccgcttcgacagctacactttccatggattggcgaagaggatcatcgagcgcttcaggccagtgctagctggcgccgatgcgttaaatccagatttcaaaattgtcgcgaagggcaaggctcaccctgtgcagacggagtttaaagagctcatcccccttgccatcaagatcctggatgcctatccggcggcagtaaatgctatacgccagacctacagcgatgtcttcctagacgaattccaggactgcacggacgagcaatacgagctggtgactaagctgttcaaaggatcaggtcgtcgcgtgacggcggtaggggatgttaagcagaagatcatgggttgggcaggggccctggaaggcgttttcgccagtttcgttgatgactttgaggctcaacatctcaacatctatcggaacttccggtcgcaaccgcatttgctcaggctccagaacgacatcatcaaagtactagatcctgactcggaaatgcctgctcacttgctcgccggtgagggtggagaggtgcatgtattgtcctacgccgattgccaggatgaagccaccgacttggctaagcgcatcgctagctggataaatgtagaaggtatcgctccggctaaaatcgctgtgctaccgcgtaatcaaccggaggcgtattgcattcgacttatggctgagctcgacaattggggcatcagctatcgtaacgaaaacaaggcgcaggacatttctaccgagcctatcgcccaggttatcgtggattacctgctgtgcatttacggcctgagagagcccaaagcctggactcgtctgacgcgtcgaatcatccaagtagaggatgatgcagagagcgaactaaagaccaattggagccgttacatcaaggaagcacggaagtctgctgcggctgatcttgcaactaaaacctttgaccagcgatggacgctactggaggagttcctcaagatggttgggcctgcgctgctggcagggctctcccatgattacgagtcctgggtgcacctgcgagagcagattgagagtgtcaagaaatatatcgatgaagccttggcaaaagaacctgaccttctgaaagcactggcccagctctccgatgatcaatcgattcggatcctcactgtgcacaagagcaagggccttgagttcgacacagtagtattgctgggcgtggagaatcaagcctatttcggcaaggatcaccacgaagtgcagtgcacattcttcgttggtgtatcgcgtgccgagagacggcttgtggtgacgacggcaagtcatcgtcagaatctcgctcagcttgaatactggagatccgcccgcaccgttcaggcggaattccttgcgtacgtgaatctctggaagacccactccaactga

SEQ ID NO: 75402 - DNA, 1989 bp, Bradyrhizobium sp. LTSPM299
atgtttattgaacgacttgctctgaccaacttccgttgcttcggtcctgcccccaccgtgattgatcttatttccggtctcaccacgttcgtcggcgtcaacggtgcaggcaagactgcggttatgcaggcactgcagcgcctgttcggtatcaccggtgaccaccggcgactccgtcggcaagatttccacgtgcccgctgctgagctgatcgcgccgcttcaacgctctttcgttcttgaggtaatccttgccttccccgaactggacgccggcgctgtcgacgccggagctgttcccgagtttttccaacaaatggcgaccgacgaggcaggtcggctaaaatgccggttgcggctggaggcgacctggacggacgatggttcgctagagggaacgattgagcaaaggtatcgggccgttcggacactcggtccgtttgatgaggtcgattgtatcgagctaaaggcactcgaccgtgcgcggatccaaatgatctacgtacccgcgtcgcgagacggcgcgtcccaggtcacggcgtttctgcgcggccgcctctggcgggccatcaactggtcgcagggcgttagggatacgttttctgaagcaggttcaacactcaacaacgcattttctggagaagcggccgtcgacatcgtagcggccgccgtacggcgacgctggcaggaggtctatactgccgggaccgacaccactccgctttttcgaccggtcgacctgcgctttcaggaatttatccgaaaagtcgaggtcatctttcgccctgacgaagcgggccgcgaacgagctttggacgatcttagcgacggacaacgctcacttttccatttggcaatgacggccgcgacattggacgtcgaaagcagcatagccgctgatccagtcgcggcgggttttcaggccggcggcgtacctttgccggctttgacgctcattgccatcgaggagccagagaacaatctcgcaccgttctatctctcccgcatcgtccggcagatcgacgacctgacaaagggaaaccgggctcaggcggtcgtttccagccattctgcgagtattttagcgcgagccgatccatcacaggtcaggcatttccgtctcaaccctaccgatcgaacagcgcgggtccgcgccatccggcttccggttggcctggaggacgcgtccaagttcgtgcgcgaggccgtccgcacctatcccgaactctactttgcccgcttcgctgtccttggtgaaggcgcgtcagaagaggtagtcttgccgcgcctcgccgaggcgatgggctttgacattgatcgatctttcgtagcggttgtcccgctcggcggaaggcacgtcaaccacctgtggcgtctgctgacagatctcgatattccttatgcgacgcttctcgacctagactggggccgcgacggaggcggatggggccgtatcaagacggcatgtgcgcagcttcttgagaacggagttgcgccgcaggcaatcttcgcccagcccaaccctgcaggaccggcggccaatctcgccgccttcgatgcgaacccaattgaggatttcgccagcctaaccaattgggcaaatgcactgcgtcagcacaacgtatttttctgcacaccgctcgatcttgattactcaatgctgcgcgcgtttcccgcgccctatcaagtcatcgagcccggacgacaaggcccttcgcagcaaggaaatccccgcaccgccgttctcggcgatgagggccgcggtgatctctatggcaatgaacaggatcaggtcctgcgctggtatcgctatctatttctcggccggggcaaacccagcacacacgttcgcgtcctaagcggacaaacgcatcaagcattagctgccggcgcgccagaggaattgcgtgcgcttcttagctcaatcgcagcccgcctagctccggcagcactcccccctcctccgttgcccctgccaccggtggcttga

SEQ ID NO: 75403 - DNA, 1884 bp, Bradyrhizobium sp. LTSPM299
atggtgctcgtccggccacaagactggcgaccacgagggatagatgacctcgaaccagacgcttggcgcgcacttcggcagggcggctcagcgtgtgttgtagccggacccggtgcagggaaaaccgaattcctcgcgcagcgagccgcctatctgctggagacggggctatgtccagcgccgtaccgtgtcctggcgatttccttcaaaggcgacgccgcggataaccttgccgctcgcgtgcgtaagcgctgcccgcccgaactagcgaaccgcttcacgtcaatcacgttcgacgcctttactaaaagcttggtcgaccgcttccatagcgcgatacccgccgaatggagaccagatcggccctacgacattgcgtttccggtgtaccgacaggtcgtcggcttcctcgacctctcgcgccttgctgctccaccccaatggcagcccgaaattgccggtcttggtgccggcaatttcgaatcacgttttgtcggcgcctaccgcttgccgattgcgcgaccgccgccgcaatccggcatagagtttacgatccaacgttggtgggcgggccagcttagaatccaacctcgatcagccgtcagttttgtcagcctgaaccggctcgccgaactgctattgcgcgccagcccagatgtccgtcgcgcgcttcagctgacctaccccttcgtgttcgtagacgaatttcaagatacgacgtacgcgcagtacgacttcctgctctccgcgttcggcggcgccaatatcgccgtaacgggtgttggagatgacaagcaacgcattatgacgtgggccggcgcgcggaccgacgccttcgaccgcattaccgccgacttcgctgccgttcggatcccacttcttttcaattttcgatcctcaccggacctcgttcgaattcagcatgtcgttgcgagagcgctcgatccgaacacggcgccgacggtggcccaggcagtgcggcaagtggacggcgatgtggctcaagtctggaacagccccaacaagggagtcgaggccggccacttagctcgctggctggcgaatgacatggctacgcgaggttgcgtgccacgtgactatgccatcttggtcaagcagaagtccgacgacttcgagtccgatctggctgagccgctggcccgggaaggcctaacgctgcggaacgagagccacgcgcttggacgaaccacgctacaagatcttttatttgaccagttctcgcgaattgcgatcggcctactccggctcggcgcgacccgccgagcgcccgacgcatggcaactttgttccgccgcgctgctggagatacgggcaatttcgtcgggggacgaagtcgcggaagcacgcgccgagaccgatctcacagtatttctgacagccctgcgcgctgacatggccaacaccctcccgtcaccggcgaatgccgcgatcttcgctgcacgcgtcgtggcattcctcgatttggccgctgtcgctcgaacctacctggaatattcgtcgggcgacctcctgacgatcatggtggatgccttccaggagcattttgtggcgtcggccgcaagcgtgcctgactggacggcatgtctggatgcattcgagggggtcggtcagatccccttgatgacggtccacaaaagcaaaggcctggagtacgataccatcgttttcattgggctcgacgatcaggcttggtgggcgcacacgccgggcaacccagaaggcctagccacctttttcgtagcgctctcccgcgccaagcagcgcgcgattttcgctttctgccaggagcgcggccaacgccggcgcgtcgccgagctattccaacttctctcgaacgccggcgtgcccgagatcgcgatatga

SEQ ID NO: 75404 - DNA, 2397 bp, Enterobacter cloacae
atgaaaattgaatatattgatatccagaactacagaaagcttaaaacttgcagaattcgtctgactgaggaagaaacactgctcgtcggggcaaataacagcggcaagacgtcagcaatggatgcgcttattttctttctggatcaaagaggaagaacggctgcgagcatcgcatcgggtaaatctccatcttcacgaaaattaggcgcagccgatttcaccctatcaaattggcatcagcttaatcaatttggtcaagcatgggtgaacgccgaagaggttggcgaaaaaatcagtgactggcagcccttatgcccaacgctggatgtctggttaaaagtcgagaaaaatgaagtccatcgggtacggcacctaataccaacattaaaatgggatggcggactgttaggcatccggatgatttatcaacccaaagatcttgatgccctaaaagcagactttattgcccacttcaaggccgctgagcagcttaaaatcacggcagaaaaaaacgccgaaaaagctctaggtggttcagcatctgagctcagtgatttcaaattttcagtctggccgggatcgttgcgtgaataccttgaaagagaggtgtctaaagcttttgagataaaatcttacatcctagatcccgcaaaacttatcacggaccaaggaagtaaattcctgccccaggttcttgtcgaggggcaaattccactggatttttatcctttcaatggactgttcaaagtcgatatcattgatgctacccgtggattttcagatccctatgtggcaaccggctctcagcatggtacctctaatctggctagccagattaaccagtactacaaccggcatttaaaccctaccgactttccttgtgacgaagatttggatgctctcgaagccatcgcctatgctcaacactcctttgatggaagactcaacaaggtgtttaacaaacccttgaaagagatagagacgctggggtatccggggttcaacgatccccatatcagattatcgagcagggttaatccgatcgataatttggaccacgaagcggccattctctttgagatccagaaaaccagccacgccgcaggggtgccgctgatgagtctgtcagagaaatataacgggcttggttacaagaatctgatatccatggtctttacaatgatgagcttcagggatcaatggatgcgcgtcggtaaagccagcctaagaaagccagaggaggatgcctttgttgagcctcttcacctcattcttattgaagagccggaagctcacctgcatgcccaggttcagcaggtgtttatcaaaaaagcttattcggtgctacgcaatcatgatgatttgcggacatccaagaggttctcgagccaactggtggtcagcacacattcaagctaccttgcgcatgaagtgggctttgaaaagctcaggtacttcaaacgtaaacccgctacaggtccgcatgacgtgccgactgcggacgttattgatctgtcctgtacttttggcagcggtaaaatccgctcggatgatgtcttacaaacggctcagttcgtggctcgctatctcaaaaccacacactgcgatctcttttttgcgaacgggattattctagtcgagggggcggcagaacgtatcctgatgccgcattttatccgtaataatcccaacgctaatacaagcctggacaacagctacatttcgattctggaggtaggaggagcccatgctcaccggctgagggcattgattgacatactcgggattcccacccttgtcgttactgatacggatgcccaaaagcctcccctcaaactaccggcagatgatcaaaaagttagctcaggaaataaacccaaagccatcaggcctgaatttggtaagggatacattacaggcagccataccatcaaaatttggctcgatgttgagggagggctggatacggtccttagaatgccggagcatgagaaaattcgtggtaaggtcaggattgcatttcaatatggtattcccattaaatttggaaaagaggaggaggccgaggctttcccgtacacatttgaagacgctattgcattgacgaatcctgagttgttcaaaaaagtagaaaaacctactgggatgatgaaaaaaatgcaggatgctcttaacctcgatacgcttgaacagtgctgtgaaaaactctatttggcactcaaagatgacaaagcggagatggcactcgatttattgtactgtgctgaccccgccgaactcgccgcgcctaaatatattcaagaggggctggactggcttaaaaaagagctggaagtggcgagtagagaccttacgccggaagttccggaagtcactgacgtttgggagggggaataa

SEQ ID NO: 75405 - DNA, 1869 bp, Enterobacter cloacae; identical to SEQ ID NO: 75013

SEQ ID NO: 75406 - DNA, 1785 bp, Klebsiella pneumoniae; identical to SEQ ID NO: 73688

SEQ ID NO: 75407 - DNA, 1818 bp, Klebsiella pneumoniae; identical to SEQ ID NO: 73689

SEQ ID NO: 75408 - DNA, 2316 bp, Klebsiella pneumoniae; identical to SEQ ID NO: 73440

SEQ ID NO: 75409 - DNA, 1878 bp, Klebsiella pneumoniae; identical to SEQ ID NO: 73441

SEQ ID NO: 75410 - DNA, 1926 bp, Klebsiella pneumoniae
atgaagcttgaagcaattcggttatctggtttccagtcttttggcaaagaaccaactgaactaggcttggaagatgtgacctatctcattggtcctaatggatcaggtaaaacagcagcacttcaggctttatgccgactttttgcgtttgatccaacattgcgtcgtgtccagcgaacagatttccatgtcccttttgatgaggatgaagttcctcctgagagacagttgtggattgaagctgactttctgtttcacgaacttgcggaggacgaggataacagcactgtggctccttattttggtcacatgcgacttgatgagccagaaggtattccacgtgtgcgttttcgcctcactgctactatgggaatagatggggatatagaagaaaacttagcatatgttttggatgtcagtcctgatagctcacctcaaaccacagctcaagtaaccagggcagagcgtaataatattcaagttcactacttaccagccagacgggaccctgcagaccatattgcttacggtgctaacgctttactcggacgtttgctccgtgctgttcgttgggatgatgaacgtaatacgattagaggattaaccaaccagataagcgacagcctagcagctaatccctccatcaatgctttcagtgaaagtttgaaattaacttgggcaaccctacacaaaggtaaatttttctcggatcctaaaattacatttgtggcttcggagattgaagcattgctacgccatttatcggtttcatttactcccggccatgatggctctcttgtcgatttttctcggttgagcgatggtcaaaaatcgatgctttacctttctcttgttctatcatctcaagcgatcggtagagctgttctcgcagaggaagatgttacatttgatcccgacaagttgcgccctccgatttttacgctggtcgcagtggaagaaccagagaatagcctttctccccattacctgggacgtatcgtcagtgccttgaataccatggcaaaaaatattgatgctcaagccttaattgctactcatgcaccatcaatgttacgaagagttgatcctaaatttatacgttatctacgacttactgaggaaagaaaaacacgaattacgtgtatcaaattgccccctaaaacagatgaagcacataaatttgtgagagaggctgtacaagcattccctgagatctatttctcacgcttggttgtgcttggtgaaggagatagtgaaggaatcgtactgcctcgtttgctccaagttaagggcactcctgtggatgaatcagctattacggtagcaccgttaggtggcaggcatgtaaatcatttctggcggttgctttcagcactgcagattccctatctgactttgcttgacctggatgtagctcggtatggcgctggatgggggcgaattaaatacgttaacgatcagcttgcagcatttgagccggagaaagtacttcctacagaatggaaaattacaaaatggaatgatgaaactacgccaataagaactcaccatttttttaataaaggcactcaagacattttcgaagaacttgaaaaccgatctgtgtttttttcctttcctatggatttggacttttctatgttgctagcttatcccgaagcttatggagttgaaaaagaggagccggatgagtcaacaataaaagcagtgcttggcaaaagctataacaatatttctcaatatagcgtagatgaacagagttttttcgctacatatcatctacgttttaaattaggtagtaagcccgccgcacacattgatgctctagcgaaactaagcgacaaaaaattaattgcgaatatgccagagtcgcttaatagactagttgatgccgttattgccaaacttggagaattacctgaatga

SEQ ID NO: 75411 - DNA, 1668 bp, Klebsiella pneumoniae
atgattcctattgaagcatggcaacccgcagatggattaacgctggaaccaaatgcaaaacgagcagcaaaagcccgtaaacgttgcttagctcttaccgctggaccgggcgcaggtaaaactgaaatgcttgcgcagcgggcagatttcctgttacggacagggacatgtcggtatccgaagcggattctcgctatctccttcaaggttgatgctagtagaaatctaaaagagcgcgtcgaacggcgctgtggtgcagaccttgcctcccgtttcgatagttatactttccatgcatttgccaagcgaataattgatcgctttagaccagtactgaaaggaagagaggcattagattcagactatacgatcgttgataagaaaatcagtatttctcgttcccaaatagaatttagtgatcttgttccgttggctattaaaatattgcaaaactcaaaaattgctcgtaattctattcgtcagacttacagcgatattttccttgatgaatttcaggattgtacaaatttgcaatatgaattggttaaacttgcttttctagggactaaaatccggcttactgcagtaggtgataccaagcaaaaaatcatgggttgggcgggagcgatggatggtatattccaaacatttactgatgatttcaatgcagttccacttaacatgtaccgtaatttccggtcaaagccacaattgctgcgagtacaaaacgaaataatccgtcggcttgatcttgcatctgtcatgccagatgaacaattgaatggtgacgaaggtgagattcatgtcgagagtttcagaaacagtcaagaagaagccatttatttggcaaatattattaatgactggattaataaagaaggattggcaccaacagaaattgccgtcttagtttctaagcagttagatctctatgctgaccacctaatgatggagctggaattacgaggaattccatatcgaaacgagcagcaaatgcaggatattactgttgagccagttgcacgtttaatcgtagattatctttcatgcctctatggaaagcgtgaacccaaggcttggatccgtctgatgaatcagctgattccttttgctgatgaagaagtacagtcctgtgcgcgaaaggaccttgatcgtttgttaaaaaaacagcgcaaagaagcaactagtgctgaacagcttgattcacctttttcttgttggtggaagtttgtaaaggagtttttaaaacatattggctctgatacaatcgtagccctatcacctgattacgaatcacacaagcgtctacaggaagtttttcgtgataccaaagcaaggattgaagagttgcttgaaattgaatcagatttgccacaagctcttggacggtttacggatgaccaagcagtcagaattttaaccattcacaaaagcaaagggcttgagttcgattctgtaattataatggcggtggaaaacgagattttctttggtaaccaagatgagaatcgatgtgcattcttcgttggtgtttcacggacgaagagacgattatttttaactcatgctgcacagcgtgaacgacctgctaatgccaaacgttgggaagtccatcgaactgttcaatccgaatatattggttatgttacaccatttattaaacggtaa

SEQ ID NO: 75412 - DNA, 1806 bp, Desulfitobacterium hafniense; identical to SEQ ID NO: 71834

SEQ ID NO: 75413 - DNA, 1809 bp, Desulfitobacterium hafniense; identical to SEQ ID NO: 71835

SEQ ID NO: 75414 - DNA, 1767 bp, Bacillus amyloliquefaciens; identical to SEQ ID NO: 74898

SEQ ID NO: 75415 - DNA, 1377 bp, Bacillus amyloliquefaciens; identical to SEQ ID NO: 74899

SEQ ID NO: 75416 - DNA, 1986 bp, Acidithrix ferrooxidans
atgaaggtcgcgttcgttcacgtcagcggctttcgcttgttagacgatgctattatctcgcttgaaggcgacacgaccatcatcgtcggacggaataatagtggaaaaacttcgctcgttgaagcgttctacaaattccttgggaccgacaaggtctcgttcacgctggatgacttcaaccttaagagtcttgcggaatttcggagtgctgccgaattgtggcggcaggcagagcaagctcgtgttgatggcaattcagtggacgcagagcaacttgagagtgatgccattacgctcttgccgaatatccgcctcgacgtcgaatttgtctatgatgaggcggagtcactcgccccgattagcgatctcatcttggatctcgatcccgacaggcatgacgttttgctttcatgtcgctacgtggcgacaaggcccttggaatttctaaaagcttatagcgagtcgggtttcgaagacatcgttgattttttacgaaagaggatgcacgcattttttgatcgcgaattcctagcaatcgataaggccgatccgacgaaccttcgaactgttaactccgcgcaagcaaaagcggccgtactttgcgatttcatctacgcccaaaacctcttcgatgacacctcttcagatacaggacacggcttgtcgaagggattcgagagctactaccgtgctatcgcaaaccctgacggtacaatcgagagtctggaagctgctctcgtagatgtcgcctcgaagctcgacagtgagtacacgacactgttcgctgacgtctttggggacctgaagcactttggagctggccgcatgcctagtctccaggagataaggattgtgtcggagttcagtgctgccaatcttctcaacggcagcaccagagtcatgtatgcccacgaatcaggtaccgatctccccgaagcacacaacggcctcggcttcagtaagttgatctttatcatcttgcagtttgtatcgttttttgaagcgtacaagaagcggcaaccgcgttcaggcgttcagctgctctttcttgaggagcctgaggcacatcttcacccccagatgcagactgtgttcatcaaaaatgtgagtgactacctgaagctaaagcccgaatggaacgttcaactcgttattaccacccactcatcgcacgtcgttgcggagagtggattctcctgcctgcgctacttcgacactacaagcaatagcctcaagatcaaggatctcagcacgttccgcacggatcttgaggtaagcgatgagacgactctcaagttcttgcagcaatacatggcgctgcaacggtgtgacttgttcttcgccgataaggctattttcgttgaaggtacagtcgagagactcgttctacccaagttgatcaagaagtctgctcctgccctccagcacgagtacatctctgtgatcgaagtcggcggcgcctacgcagtaaagttcaagaagttgatcgagttccttggtataccgacgcttgtgattacagacatcgactccgcagatccaaaaggtcgccacccaaagactcgtaccgacacgactggggcgatcacaactaacgtcaccctgaaggagtggctacctcagtccactatggtagccgatctgttggcgaaggccgacgccgacaagatttcaggtgcggttcgcgttgcatatcaagtaccagaggtagctggttctggaacggggcgtagcttcgaggaagctttcatactcgcgaacgccgatcaactagctaatgccactagtctcgcctcaaagcgtatcttcaccggcgacgatggcaaatcgctttccgctgatgccattcgtgctgacgcatacgagatcgcaggccgcatagatagcaagtcagactttgctttcgacattctgacacttgaggactggatcactcctcgatacattgaggaggggctcaagtggttagtacctccgatagagtaa

SEQ ID NO: 75417 - DNA, 1635 bp, Acidithrix ferrooxidans
gtggttagtacctccgatagagtaatcgagtgtctagaaaccaaacaaagcttcatcgttgaggctggcgctggatcgggaaagactcgcacgctcgtcgaagcgttagcccacctgttagccgtcgaggcggggcggctgctgagcggaaatcagcagatcgtctgcattacctatacgaacgtcgcagccaacgagatcatgtctcgaatcaatagagacccgcttgttcgcgtctcgaccattcatgaattcctttggtccgtcgtgcgcggctttcaagccgaacttcggacggcgatcgtcaaaacaaatgatgccgctgggtcgagacgcattgagaacctcgacctcaccgacaccccgattgactactggcagtacccacgcaaatgggaagacggcaagatcagtcacgacgacgtcgtagccctttcggccgccttgttcgacgaatatccgaagctagtcagactggtagctgatcgttacccgatcatcttcgtcgacgagtaccaagatacccaccagtcaacaatcaaactgctcctcgataacatgcttgccgggaattcggaacgcctgaccgtcggactcttcggcgaccatatgcagcgcatctacaacacgggtgtgggcaaggtcgaacggactgaacttcgtattatccagaagacggagaactaccgatgttcaatagcggtaatcgaattactcaataaacttcgacccgagttgcagcaggtacctggcgacacaaacgtacaagggagcgtgcgattcgtgtacgcaaactccggagtcagaaacccagttgcgaagatacgtgttaagcttcgcgctgaaggttggactgagcagaacgagaaggttctcatgctcactcgcaagagcattgcaagcgaccttgaatggcgtgatctactcgccgcgtacgaacagcggtcgggctttagcgttgatgatcttatgcgccgtgacgacgagtttggcgaactcttcaccaacattgaggcaatggccagcgcatttaactctgggcggtacggagtttttcttgcccttcgagctggcagtagtggtcgtattacccatcactctgataagaagatggccgctgaaatgattgctcgtctaaataaactccgatcatcagcaaccgtgggggaagtggctgactacgtctggagcgaaggtctgctgcggaaaccgcgacgtgtcgtatcgcttgaggagcgaattgcgaacggcgataacccagatcgcgccgagcgagacaacgcgttcctttcggcccttagggcagttccgtttgctcaagtgacgagcttcgaacgctacctaaactcggaaacaccattctcaacgaatcatggcgtcaaaggtgaagaatatgagaacgtgcttgtcatactggatgacaccctttggaatcagtacaagttcgaggcggtactagctagagacactagcaagacgcagtaccaacggagcttgaaccttctgtacgtgtcgtgttctcgtgcgaagcgcaaccttcacgtacttgttgtctcgccattatcgaaatccgcaattgacggtgcaaagcggatctttggcggtgagaatgtcagtgaactcgcgaacatgtag

SEQ ID NO: 75418 - DNA, 1848 bp, Paenibacillus sp. IHBB 10380
atgtatctatcagaagtgagaattacaaactttagaaaatttggtcaaggaactgacggagaacctggattggctcttagcctgaataaaggtttaaatgtttttattggtgagaatgatgctggtaaaactacagtgattgatgccataaagttcgtgttgttgactcaaagtagagagtattccagattggaaaaagaagattttcacggtacatcaagtgaaatgaagattgagtgtatttttaaaggttttactataaatcaggcaaaggattttttggaatggatcgcaattgatttagatagagaatacactcttcgcgtttttttaagcgccaaaagagatgttaaagggaaaatactaattgatgatatacgtgcaggaaatgataatgaggggcagattttacatagcaaggcgcgtgacttacttagagctatttatcttaagcctctaagagatgctgaaaatgagcttgccgctagaaggaattcaagattgtctcaaatttttctttcgcatccagaattctcggtgggggatgaacatagattagttgggattatcaaggatgctaatcagcaaattaaagagtacttcgattatgacgatgtgactagtgaagaaaaaaagatattgaaatcacttaacacatttttaatgaaattctctgataataaaaatttgttgaagtcaaatatagagttagccgcagttaaccttaaaatgatactagaaaagattgatcttttactagtcaatacgaaatctggcttaggttcacttaatcaattatatatagcagcagagttattactattacagatcgaaaagacggaaggcatcaacattgctttgattgaagaaatagaagcacatttacatccgcaggctcagataagggtcattgattacttgcaagaattaagcgaggatagtaagtctcctatgcagatactcctgacaacacacagtgttacattggcttcaagtataaagttgaataacttgatcatttttactgaagacaaagcttactctctagctgagggtaataccaaactacatagaggagactatagatttttagagagattcttagactccactaaagcaaatttgttttttgcaaagggtatcattattgtcgaaggagacgcagagaatttattactcccaactttggctgataaacttggaaaatcctttactaaaaatggagtttcaatagttaatgtaggaagtaccgcaatgctaagatattcaaaaatatttgtgagagaatctgaccctcaaatggttctacctgttgcaattattactgattgtgatgagaaggtctctagggtcgataaagattccgatactattattatgctttcggatagaaatccgaaagtaacaaaaaatgttagagaaataaaatatagtgatggcaatgttaaagcttatgtttctaatgagtggactcttgaatttgacgtagcttgtagttatttaaaaaaagagttgtttgcagctattctaatggcaaaagattatatcaatcaagataaagccttaacagaagaaagaaaaacaaaaaagatcaaagattcaagtgattatattacagaagctgaaaaaaagataagtgaatggaattttgatgattcgtttgaactggcttcaaatattgttagagatgtagtgctaaagaaaaatatttcaaaagctgtagtagctcaatgtttttctgaaatcttaaaagaacgtattttcacaactgaggacattcgagttattagaagtgacatctatctaaagtatttaattgatgctattgattacgtgacaggagtttag

SEQ ID NO: 75419 - DNA, 1977 bp, Paenibacillus sp. IHBB 10380
atgtataagttaagtgtaacagatgaagacattgaatacgcagcgagagttctgaatttaccgagtggttttgatgtgccaagagttaatgctataaaatgcatggagagtagagatatagtcgcttgtccaggtagtggaaaaacaacagtcttactcgctaagttaattattttggcaaggcatgtacccttacaaaataataaagggatatgtattattactcatactaacgtagcaattgatgaaataaaagagaggttaggcgacaaagccagtgaactgctctcatatcctaattttgttggaacattgcattcatttatcagcaagtttatagccaatcccgcatttgttaatttttattcttcaagaatatcaagggtatttgaaggtgaagattacaaatctcgactattaagaaaatttaaatctttgtatcctccattttcgggaagtaaactggatagatttctatacggaaagttaaatcaaaagttaaaagattcaaaggataacattgctatattaaaggctaaagaagatttactcctgtcactggaacttcattatattgataacattatttaccaagtatcattcaacaaaaaaactagcgcaataaaaaatccaaatactgaatcctacaaagagtatgtaagattaatagatgaacttctgaatgaaggagtatcctcttataatgatctacaaggactcgcactgaagtatgcaattgaatttgaaaaggaattgtcaaggatcttttcggaacggttctcatttgtttttgtagatgaaatgcaagatactagttctcttcaattggagatattaaataaggtttttgataagcagaaagttgtttttcaatgttttggcgatcctcagcaaacaatttatgaatctgaagacaagggatgttcatggcaaccaagggagcctctgttcattaaaaatagtaatcgaatgagtaaaagtatagcaaaagttgcagatgtcgtagctctgcaaccttatgatatgcaggggagagaagaacaaagagctgacttgcattcaccagtgattattacatataaagatgatgatgtatcacatgttcttgagactttcgccaagctaatcattaagtatcaactgaatgaacgggattcttcaacatttaaagctgttggtatggttaaagcgaggaatgaaggattatcaatcaccagttatttccctgaatttgataagcaagatgttaaaaagaaagttaataaagatttttctgaacttcaaagttatttggtaaagcttgaaaaggaagtagttaacagagaaggtgttaaggcttactaccatcgatttattctagcaatcctaagatatctaaggattagagatatcaggactaatgaaggtagatttttttcgaacgtctcttttctgaaatatttacgtgaagaagatgagaggttgtataaagcaatccacaaatactttgcaagaatagtgctgaaaatagaggaaggaaaatctgtactaataagctttaagtatattatagctttaatagtaaatcgattgtttaatcatgaggttgaccttcggaatgatcaatttatagaaggaactgctagctccccaactttagtcgttggagagactaaagagaacgtatacacctttaataacttaagtattgagatagacagtgtacatggagttaaagggcaaactcatacagctacgttatatttggaaaccttttatttctcaaaaacgaatgaaagtatcattgaatatttaactggagggcagaaatcaaacatagaagtacatttagaaaaacacatacgagttgcgtatgttgctatgacgagacccactgatttactatgcattgtacttaatgaaacagtttatttagaaaacaaagaacagttaaaaagattgggttgggaacatcaaatggatgtgctacaggagtga

SEQ ID NO: 75420 - DNA, 2022 bp, Paenibacillus sp. IHBB 10380
atgcaaatatcaaagttatgtctaaagaacttcagaagctttggtgacagcggaacaacaataagcttgaataaactttctggtttcgtaggagaaaactcttcaggtaaaactgcattaatacatggtttagttaagctttttggagtatcctcacatgatcgtgcgttagaaaaatcagactttcatattcccgttcaaactacaatagagtcgataaaggaacattggttatcaattgaagctcgaatagatttccctgaattagtagatagctctggagatagtcaaagtaaaaatagtttaccaccattttttaatcaactcgtggttcgttcaactgccgaggcaccttatctacgtgtgagattaattgctaaatggactgctggtaatactcctgaaggagaaattgaacaaaagttgtacttcgtaactgtagccgaaggaattgatgaatcagatgaggatttggtacctgttactccacatcaacgttcagcaatacaagtcatttacgtaccagcagtaagagagccatccatacaacttaaaaatgcttcgggtacaattctttggagaattttaaataacatctcatggccagatgatattgacgacaccataaaaataaaaatggagcctgtgaacgaattattcgatgggatagatggggttgctcagataagaagtgttattggtgaagaatggaagaaatatcataaggatgttcgatatcaagatgctaaattacagtttaacagttcaacattagcttcaatattaaaaaagattgaggtgtcattttctccaactcatgatttgggtgaatatagtgtcgataaacttggggatggacttaggtctttgttctatctatcgttggtgtcatcgttactggaagccgagataaaaattactggcaagtcaaatgcctctctgactctccttgctgtagaagaaccagaaaatcatatatcgccacacttacttggtagagttatggaaaatttaaaggatatttcaaaaaaggaaaatgcacaagttgtattaacatcacatagtgcttcaataatcaagcgagttgacccagaaaatttagcccatctgagaattgatcaaactagtttcacgacaattgtgaagaagattgttctgcctagtaagacatcagatgcatacacatatattaaagaagccgtgagagcctatcccgaaatatatttttcgagattggtcattttgggcgaaggtgattcagaagagattgttattccgagaatattggagataaacgaattatatcctgatgattatggaatatcgatcgtaccacttggaggaagacatgttaatcacatgtggaaacttcttaatgagttagatattccacatattactttattagaccttgatcgtgaacgaggtggcggtgggtggggcaggattaaatatgcaatcaatcagttattgttaaacggccgagtgcgtgatgaattattaacagtatggtatccagaaggtgatggttttagagaagatatccttactgaaaatcaacttgaaatttttgaaaaaaatccgatgactcctgagtggataaaatcgatgaatgatttttggctgccaagattaatggaggacaaatataatgttttctattcagcaccactggatttagactttcttatgttggaaacattccctgatgcctataaaaaaacagtgcctagaggccctagtatcccgagtcgtgctgatgaccttcagaattacaacaaaaaaataaaaggtggcattattgctgcattaaaaaatgaaaaatcaactggctatacttatacagaaaaacaacatgaacttatggtttggtataacacgttgtttctcggtagaagcaagccaagtacccatattgaagctttattaaaaatagatgatgatgacttacttatttttatgcccgaagtttttaccaagcttgttgagagagtaaaggaattacttgaaaggaatgtatag

SEQ ID NO: 75421 - DNA, 1923 bp, Paenibacillus sp. IHBB 10380
atgtcatatattagtccggaaaactggagtccagcagatagattcacattagaaccggctgcagaaatagcggttaaagctgagatgaataatcttattttggctggtccaggtgcggggaaaacggagctacttgcacaacgcgcttgttatctgctgcaaacaaatttatgtccatcacctcagaaaatattggcgattagttttaaaacagacgctgcagaaaacttgaaaaaaagggtagagttaaggtgtggtaaggaacttgcgtcgagatttgaatcaagaacatttgattcatttgctaagcaacttctagaccgctttagattaggaatcccagaagcctatcgaccagagaaagattacaacatagtattttctcaaagagaagtacaagatattgtcaccagctatatacaagagcgacatcctaatcgtcctaattggcaacaggaaattaattttagtattttatttagacgcttgtctgaggatagattgcctatttatgaagatggggaagacatctatacttggattttagtaaggctctgggatattctggttcatggaagagaagggctttcaagcacattaacgtttcccatgatatcaaaacttggagattatttactacaacataatcttttaattaaaaaggcgcttcagatgacttatagtcatgtttttctagatgaattccaagatacgacctatctccaatatgagttagttaagacgacctttttaggaacttcttcaatactgacaagtgtaggggacgataaacagcgaatcatgggatgggctggggcactctcggattcttttgaacagttcaaacgtgacttcaatgcaggtcaaattgagctgactcaaaaccacaggtctgcacccagacttattgaaattcagaacgttttggcaaaaataataaatgaaaattcgactgacgctagcgtttcaagttcacacagtgagcaagaagggaaatgtgaagtttggaatttccagactcatattgatgaagctatttttgtagcttcaaatatcgtaaaaagaattcagcatgaggatataactccccgagacatttgtataattgtaaagcaacaagaacaagtatatgcaagagcagtaattgaagaacttggacgacaaggagttcacgctagaattgaaaaggaataccaagatttgcttgcggaagagtgtgtgcaactaatcgttgatttttttaaactggcaacaatggaaaaaactcatgagtcatgggtacgggtatcagaattgttagtttatgtgcatgggtatgatctggaactggaccatcaaaaaatactaaggatggaattagatcttaatgaacacattttacaaatgagaagtgttttaaatcaagtatctaacgatgcggaactttgtaagcaacgaattgatgaaattgttgaggggattttatcttttataggaaatgaaaagctatttcgactatatcccaaatactcgaaaggatcatatttcaataagttaaccaaagatactgctgaaaaattaagcgaggcatacttaaaacatttaaattggattaatagcatagctgattttttagggctatttagtgtgcctattatgacaattcataagagtaaagggttggagtatgatacagtcatattcttagggctagaagatgatgcattctggacttttagaacacagagactcgctgacatgtgtgctttctttgttgcactatcaagggctaagaaacaatgtttctttacttttagcaattcaagagaaacattacgttttggggacatccaagtaagatcccagtccagtaataatatttcatctctatatcagttattgcaagaggctaatgttgatgttagagaatttaataatgtttaa

SEQ ID NO: 75422 - DNA, 1773 bp, Photobacterium iliopiscarium
gtgagtattttaattgatgtagttcgtatttgtggttttcgaggaattaaaaagctggaagttacccttcctcgaattgcagttttagttgggcagaacaatgcaggtaaaacttcaattgttaaggctctacaattagctatcggagactattcacgttatttgtcagaagaagatttccacatagcgcaagatgatactcgttcagatcaaatattagttgatgttcgaattgtttctttaaatagcgatgggactataagtaacgaattttcagaagactggcttgaagagtttggggataaaatccgacaagatgctgaaggtaaacaatttttagcattgcgcacactcgtaaaacctgactcgattaaaggtggcttttcagttgaacgctatacattagaccaatgggttccagttggatgggttgatatcgaggtagtatctaaaaataggcttcgtggcaaattacaagcgttacaatacatttcaatagatgctcaaagagatttacattctgaacttaaagaacgttcgtcattcatcggtaaagttttgtcaaccgtagaatacaacaatgcggacattattgagctggaaggtatgataaaagaggtaaatcagcaagcaataaacaagagtcagccacttagtacattgaagaagcacctgaacgctttaaatgattcttttgatggtaaaggacaagcagagctatcacctttccctaagaaagtcagagatctttcaaaacgttttagtgttcatttcggagaaaatgaaagtaactcattttcaatggaatatcatggtatgggtacaagaagttgggcttcgatactaacggtgaaagcgatggtcgaattgtctaatgaaaatcatgcagcagaagcaaagccattttttcccattgtagctgctgaagagccagaggctcaccttcatgttaatgcgcagcggacgttgttcaagcaaatgtcagaaatgccagggcaagtcatcattagtactcattcaccatacatcgcgtcgttatccgaattggaaaacttgaggtgtttatccaagtcagaaggaactgtggccgcttcacaacttattggagggctagacagtgaggatatcaaaacccttcgcagagaagttatgaggcttagaggggatattcttttttctaaggctctcattttgttcgaaggtgtgtctgaagagcaaattttaccagctatgtttgaatgttatttcagtcgctctccgtttgaggtcggcgtgagttgtattgccgtaggtggtaaaaattacaaaccatttatcaagatggcgggtagtttcggaatacctgtttttattgttagtgataatgatggtaacactcaagcagaagtccaatcccagattgtgaagactaaacaggaaactcctttgactcttaacgatgattcttttggaataagttatttaggtcacggtaatgatattgaagcagaacttcttagtttggatatgttggacgaaattaagaaagctatcgttttagccgaaactagaggaaaagacattcctggctgggtcgcagccaaagcagcagaggttgaagaacttacgggtgaacaacttcttgtgaaaatgcgtggaatgaaggctacttatgcgggatttttagctgatgttattcttacaaatgagaatggtaaacaacctgaacaactaatgccacttgctgttaagcaagcatttgacaaagtaaaggagtggacaacttatgattaa

SEQ ID NO: 75423 - DNA, 1905 bp, Photobacterium iliopiscarium
atgattaatctatcggatgcgcaactaaatgttgttcaatctccacttgagactgcgttacaagtattagcttcagcaggttcaggtaagacgcgtgttttaactgagagggttagatacatacttaacagcacgaaaaagggcagtgtcatagctcttacctttaccaataaagctgccgaagaaatgcaagctagattgatagagtatgacatcagcgaagaacgattctgggttggtaccattcattctgttgcgcagagagtccttgagcagtacggacataccattgggttacctagtgatttacacatatatgaacgtgataaagatagaatggaagtctttatgcagtcacttagagatgacggtatagacattgataactatttaaacgtatcgaactcgaaggaactacgtagtcgtgaacaggtactatctaaatacatggatacattttccataattaagagagagttactatcagaaattgatgtgctagagcgttatcctcaaaataataaactctggaagaactatgaagattatcaaagagctctcttaaacagtaatggtattgattttgatgacatacttctttactcgcataagattctgttaactcaagattgggtaggcaaagtctatcgtgcaaaatataaacacctttgtgtagatgaggctcaagatttaaatagagctcagtatgagttcattaaggtcttttgtggtagccaagtaaaaagtgtattaatggtcggtgatccaaaccagatgatttatggttttaatggatcttcgtcaaaatatcttaccaatagttttgtagatgatttctccccacttcaaatggtgttaaaccagaattatcgaagtactaaatcagtcattgaagtagctaatagactaaaaccagggtctcaaagagcaggtaattttgcgctacaaggtatgtttgatgttcgatgtttaagtaatgagcaagaagaaagcgattggatagttagaagcattaataatttgctttctctcggaactaaccaagagattgaaggtggaattacactagataagatggttgtaattgctagaaatcgttttgtattcaaatatcttgaagaagcattgcaagcagctggtattgatttccacttgagaaaaggtgagaggcgaaatgagcccacatcattgcttggaaaggttcttgattattctattcgattaaaactaaatccaaaagattgggtggatggaaataaactgtgcaatgctctaagtatcgagcctcctaaagtttggggggataagaatgtgctcagtatgattagtcagtcattagcggaaagccatctctttaacaaagagcttttgaagctagttcttcttgaagttgagaaactagacatatctgaacccaatataagaaaactcatgaaagtgcttgagtctgaggttgagaagatggtccatgatggaaatcgtggaaattcacatatagaagaactgaagcttagtatggaagaattacacgagttttggagttcatggattagtttcaaacaaaaaggtcttggagaaagccttcttgcatatcggaatgcgatctctttgggacaagtatcggaaacaaaagcacagtcaggattgactttgagtacagttcatacaatgaaaggacttgagagagacatagtttttttaatgggcatgtgtgagggggtttttcctgattatcgagccacatcttcagataaaatagatgaggagcgaaataacgctttcgttgcagtaactagagcgaaaaggtggctttatgttagttatccgcagtatcgagttatgccctggggggacactaagtgccaagccccatctcgatttattcacgagatgagccctagctaa

SEQ ID NO: 75424 - DNA, 1875 bp, Enterobacter cloacae
atgtatcttgcagagctcacgataaagaattttcgcaaactgcgtgaagccacgctgaaatttcaacccggtttaaatgttctggtaggcccaaacaacgtagggaaaagtgcagcaatcgatgcactccggacgcttcttgcaggtcatgatgagaattatcctcgcctcgatggttctgatagacaccgtccgcatgagggcgacccaactggtgatataagtttccattttgtcttccgagatcttagccttgaagatgaagcggactttattgctgccctcaagccaaatggggacaagacaatggaggcgcatatccatgtccagtataccgatatggataagacaggacgattcaaagtccggcgttggtgcggtgatcacccagaaatttcgcttacctcagatatgatggagaaccttcggggggtctatctccagcctctccgcgatgccgcgcagggccttcgtcctaaccgtaacagccagctggctcgattacttcatttgctcaccgatgatgcaggtcgtgacacaataaatacggctttaaagcaacttgacgaaacacttaaacaagacaaatccattcagagtacccataaagcgatatcaaccagacatgattccatgatgggtgctcagctagcgcaggagcttgccgtcgggctcagcgtgactgattttcagcgcctctcttcccgactgaccctgacggctgaagccatggagattgagaagaatggattgggcttcaataatctgatcttcatggcggtagtacttagtgaattggctaaaaatactgattctgctttcaggagtttgattattgaggaacctgaagcgcatttgcatccccaactgcagcgcgtattgctgcagtaccttgcagggattccaacgggtgaaggcgaaaagcctgtacaactatttgtcaccagccattccccaaattttgccagtaattcaaagctggactctcttgtatgcttgatcgaaaacgaagctggcgttgagaccttctttccacgtgatattaaatttgaaaagggaaaacgtgaaaagttagagcgatatctggacgtaacaagggctgaactattttttgcacgccgggtgatttttgttgagggcgcagcagaactcatgttgattgacgcgcttgctaagaagatgaactttgatctcaagggatatggggtcagtctcattagcgttgagggacttaattttgactccttcctcccgctttttggagagcaggggctgcgaatccccgtcgctgtagtaaccgatgcagatccatttgaagaagaagaagttgaagccgtggcagagggtgaacaggctgaagaggaaattgatgacttactttctgaggctgcctaccaggaagaaacagatgctcctgatgatgaagagcctgctggcaatgctgagaaaaagaaaaaagttaaaaggaaagaggtgtacccagcgttgggagatcaggtgcggttatcggcaaataccatcaagatgaagagtctggaggatgatttcgtgaaggtttttcatggattgaagacccttgaatatgatctggcactcattgaggcgaaccgcgacccaatgcttactgcattagccgacccgcatccaaaaatctctaaagctctacgtaatatagttgatgcacagccagacaataccgcaaaaaccaaagcgttgttctgcggaatgtttgagcgaaaaggcaacggcaatattcagaaaggtcgattcgcccaggcattagcagaacagatgtcgaaagaaaatggttttgaagtccctgagtatctcaaaaaagctattcagcacgtctgtcagggagtggtcaagccttga

SEQ ID NO: 75425 - DNA, 1728 bp, Enterobacter cloacae
ttgaaactatcaaaggaacagatagatatcatagaagcaccgttagggccaattgcggtcactgcgtgcgcaggaagcgggaagacagctacagccattaggcgcctgatcgccattcggcagaaaatgcaaaacagtcgtggccgcgttgtgctgttgtctttctccaatgttgctgtcaataccttcaatacaggatatgcggaactcgctgctggcctaccagacgatgctaatcgtcgaagggtggaagtcgatacacttgacgggttttttaccaaacatattttacgtccccatgcttacaggactatggccgcacctcaggctgcatacttggtgtcaggttcggagccttttcttgccaggtttaaatattggtgcgaaggtcacccccctttgccattaaaagacataaaaatatgcatactggatggggactttgtcttttattccgatgtaagaaatgaccttgaaattcttgataaaggtaaggttttaaagatcattcatgaccttggacgtttaggtgcttacactcatgagataggtcggtactgggtgtataggaccctggattctcaacctgcagtattgagggcgttggcagcccgctacccgcaaatacttgtcgatgagtctcaggatttgggaacactgcatgaggaaatcttaaagctactcattgctgcaggggttcaggttacgcttatcggggatgtcaatcaggggatttacggcttcgctggtgctgacggtgagttcctgaatagctacgaggagcgtgcagaggtgaccggctacaagcttactcgcaattatcgttccctgcctccaatcataaatatcgccaacattcttagtggccgccaagacgaaccataccgccagggggaacaaggtggagcttattttattggatacaaggattcggaacttcccaaattaattgatgcattcaaggcccgtattgatgagttaggcatgcaacatcaggatgctgtgctcctctgccggggagcagatagagccgcagtaattgcgggtaggactgcccctccaggacaaggtttagtcaaggtgttagcagaagcatcgttgttaagggatcagcatagtaactaccatggatgctttaacttggtctgccgggctattctcagcttattggaggatataccccatggcctcagttctaaacttcagggggtatcacatgatgctgagatgaagggactaaagcgattactatggtgtttcagtcgcaacgctgatttgggactcccttcgtctgcgcttgtggctaagaccgactggcactccaagctattaacgaatgttaaagtgcttctcgcagagattgaaaagcactacggatataaagttgctggcaatgtaggtactaaactcactaagaaattattaccagatcagacactaaccagtgcagtttcggctcaaggacacgggctaagagtcgagacggttcatcaggttaaaggggagtctatcggtgcggttatgtatgtggctaagaaatctaatatcaaagcactactttcaggtacaggtgatgaagaaggacgtatcgggtatgtcgcaataactcgggccaagaacttgttctggctggctgtaccacaatcatgccttaaagaattaaaagaagatctcattaaagccggttttcaggaatggatcacacttgccgtcattgatcctgcctga

SEQ ID NO: 75426 - DNA, 1755 bp, Legionella fallonii LLAP-10
atgttattaaaaagggtattgattaatggttttcgaaatttcaaaaaaaccaccgtaagtcttaataaaaaatcacttataattggccctaatgatataggaaaatctaacttccttagagcaattcgactactcttagatcgaaatttgtctgatgctgaaattgagccaagtgatgctgatttttatgcttttgaagatactcataaaatcgaaatcactctccattttcacgaagcaacagaagactgcataaaatcacgctttaaagaaaatattagtgacaaagatgagctaattattcaatatcaagcaattcgcgatccttcaactggccaaaaaaactataaaataagagttggcccatcaatggataatttaaaagatggtgagactcgcttttatcttaaagttctcaatcttcactacattagcagtaaccgagatctaaatgcctttattaagagagaaaagaagcacctacttggaaatgcacgagataatcgcactgaggatgagattgaacaggacgatgcttcgttgaaaaatattgaaacaatattgaaaggtgcaggaactgagatcgctggattaaattttgtttccaaggcaaccaataacctaaactctgagttagcttcgttgtcagtcttaaatgaaaactacaatgtgggttttgatacgggggcttctgatattagacagtatattgataacctctcgctttcgtcttcacaggaaggtaaaactgtggctctagggggcgatggcaaaaataatcaaatctatctggctatttggtcagcacaaagaaaagtattacaatatgacccaacagaaatttccattaactgcattgaagaaccagaagcacatcttcatccccatcaacaaagaaaactctcacattatttatcaagcaaacttcaaggacaaatactactgacgtcacattcaccatatattacttgtgagtttgaacataattcgattgtaagtctgtcaagaaatgaaaatggctcttatgctgcaagcgatggttgtagtccgattattcaaaatagtttgtataattttggtcatcgtttaaacgcaattcctgctgaaggtttttttagtacggttgtatttctagttgaaggtgtctcagaaactttattttataaagcactagcaaaaaggctggatattgatcttgataaatataatatcagtatcatccctgttgaaggaattggatttgagacatttatagaagtttatattaatcttggagtccggtttattgtaaaaactgattttgatatttttaaagtaccaaagaaaacatactatcgagccgctggtttacagcgcggattggcaatattaaataagtacaatcaaaatattaattctaataccgaaacattgattcaggctttaggcgactcacataaaaaacttcataaaagagaaattccagagttattaaaagatactgttgctaacctgaaaaatgaactaaagcattacgatatatttttttctgaaactgatttagaaactgaccttgccaaatctgcattaaagaatagcttaaaacaatggtacgaagcctctgatgagcaaaatctgattgaattaatgaaagaatataaaggagaacgtatgtttgaatacttaaaagagaactacgactcacttgcggatctaaatgattcagatatatctgaaccactttataagtgtgttgagcgtgcatccctgaaatga

SEQ ID NO: 75427 - DNA, 1614 bp, Legionella fallonii LLAP-10
atgaatatccctactctcgaacaaaaaaaaatattagatgaattaaattcctgtgtcgtagttgcaaggccaggaagcgggaagacgtttacattgtcatataaaataagagatattcttccaacacttccagattataagggcgtgattgcaatttcttttacaaataaagccagcacagaacttaaacatcgtgttttgaacttgggggttcaaataaaatcgagcttttttggaaccattgataagttttgtttaaccgaaattgtaatcccatttttacgtcataagttcggtttgcccaacgttgatgatgtaaaaatcattaaagcagacgaatctcaacttttaaaacagttatgtccagagggtattgtgaaaatatcatggaattctataaaaaacttatactgctcaggagaagtaatcttagaattatctggccgattagccattaacctactaagaaaaaatcgaattttaagagaatatatgaaggcaagatattcacacgttatcattgacgaatatcaagactcggggaaagagcaacatctgattttcatggaactatttaatttggggcttattgctatcgctgtcggagatttagatcagtctatctacgcatttgcaggaaaaagttctgattatttatatgaactaacacagagagatgacttcaaaaaatatccattaacggtaaaccatcgatgtcatcccagtattgcagcttactctttaaaactcatcaattcagagtttgttttaactaaccaagataaagaaaaacgagtttatagcaaaatagttcaaggtcatcatcccaatattgcacaatggatcgaaaaatcaatacaaccactacaaacaaagttctctgatgtgaagcttggaggaatagcaattctctgccgctctaacatttctgcaaaaatgataaaagaaaatattactaagtatgaggtgcaattgagagaagatacgccattggattcacttggttcgccttgggcagcgttcttttcagaatgtttatattgtttgtttgactctaaattaaatgttaatgaaatattcgacaaatatctggatggtgaagcgcttaaggactcacataaaaaatctttattaaagcttattgagctgaaaaatgaaactaatgaaaaaaactttaataaattaaaaggtgcacacaacattttaaaagaaaccgctcaactgttaattcctaatgcggaaaagatagattcagaacgagcattatttgaagtattaagttcagatgtttatttacaatcatatttccctcaaaaagatacacatattcaattgatgaccttgcataaatcaaagggtcttgagtttgatgtagttttccatttggacttataccaatggactataccctcttatgaagctgttaaaggtaatacaaacgagatgattcagtccgtaaatttacattatgttgggataacaagagcgaggcaagcatgcatacttgtcgcctcaacagaaaaatacaatacaaaaataaatgctgctaaagaagcaattatatcagaatttttaactcgagccgatttgtctagccttagaaaggaattataa

SEQ ID NO: 75428 - DNA, 1269 bp, Acholeplasma oculi
ttggaatcaaaatatgaagaaatatttgatgacataattgagacaatccatagtgatttgtttttaaatgatcccagttcaacattaaaagttcaatctgatattgacatagaaactatgctaaggtctaatgcaaaacttagatatattatggatgatatagaattatcagaagcgtataacggattgggtttcagtaatttaatatttatctttattgaaatttattatttcaactctttagtgttgaaagataataacccactaaatattttatttattgaagagccagaatctcatctacatccacaaatgcagcttacattttataaaaagttacaaaaggtcttagatgatagtaaaaatacttacataatattttcaacgcactcatcgcacttgttaagcataagtgatttcagtaacattaattacttttatagaataaaagacaatgtatcgattaaatcactagaaacatttattacagaaaatcaaaattttgaaatattcttaagaaaatattttaaacttaatacagctgatttattctttgctgataaagctgtattatatgaaggaagtgctgaacgaattttatttccagcttttattgaaaaatatgatatgaaaaataaatcaaatattagtaatcaacacatagcattatttgaagttggtggtagatatgctcatgtattctataaacttttagaatacctaaatcttaaaaccttagtgatagcggatattgatagtattaacgataaaacaagagtaacttgtaatattatagatgacattagcacatccaaaaagagaataaagacatcaaatggtgttatcaaaagctggtttgaaatgataggtaaagacttgtatgttctagatttaataaccaaatccaaagagtcatttatttcgactaatggagaaaaaagtatgaaattgacaacacaattaccaaaagaaccgaattatcactgtggtagaacacttgaagaagaaatgattatcaaaaatgcgataaaaatagttgaggatatcaataaaaaaataactgatgaaaaatttgataataagtttaaaattattaaaaacattattgataaaagtgaaaaaattgattctaaatttcttattgataatgccttcaatatagttgaaaaaattgataaaatgggatttgccttagaactcatagagaacttagacatttgggatctacctgagtatattgaggaggggctaaaatggttggagaactag

SEQ ID NO: 75429 - DNA, 1716 bp, Acholeplasma oculi
atggttggagaactaggtattataggccaaatcaaatcttgtatcaacaataaaaacaattttataattgatgctggtgctggatcaggaaaaacatttagcctaattcagacaatagaagccatattacaagaacagattaacaatcatcagaaagtactatgtgtcacattcacaaatgtcgcgaagaacgaaataaacgatagattatcattgaatactgataaaattattgttagtactcttcatgatttcatatgggactttatcaaacaatttcaaattaatcttcaattagaagtggaaaatctcgctacaaaaaaagttcaaaggattaaagatgaaattcaagaggcacaaaggaaaattgataatcccacaagaaatacaaatatagataagcaaatgaggattattgagaataatgaaaaaagacttcttaaatataaagatatagactataagaatctagaaattacttacgacgtatactcgggttatcacaagggcaaaatctctcatgatgatattatatcgataatgagtaattttcttgaagatgagtttttttcaaagcttctattaagtacttacccatatatattaatcgatgaatatcaggataccgattgggatgtcataaaaaaactgttattagccactagtaaatttaaaaaagaatttccaacaattgttggtatgtttggagataaaatgcagatgatttatgaagatgttgaatttaattttgactcactcgacttggtccaaataaaaaaagaggataactatagaacagctattgaaattgttgaagctaacaataaatttcgaaatgatggtttggttcaaaattgcaacaatcagtaccctaaagtgatatttggaaacttattatttgtttataataggagtcaagattataacctcaacaaatttattaacgatgatgttgctttttcaacgtataaaagattatatttagcaaataaaaacatcgcttatgaaataggattcacagaaataagtgatgtttttaactcggtattcaataaagatgcgaatgataagttatttaaactaaaagatcaatttatttcatatgtaatcaatggtattgttgacaaaatagttatgtttgaaaataaaaattactatgatttaattcaaaacattaattttgtcagcgttgaatctctaaatgatctattgtcaaaattgacgaatctaatcaccatgaaggatcaatcactaatcaaatatattgattttttcattaataacaagttaatagattataaaaggtatgaggaaattatttcaagctatgatggttttgataatggttttatttctcgaatgaaagatatagatataaatcaatacaaaaaactatcattacaaataaacaatcaaacaactctagatactttacacggtgttaaaggaaatgagtttgataatgttattgttaatattttcgaaaatcaatcatggaataaatacgattttgataatttatttttatttaaaaatatgaccgacaaacgagttatgagagcacgcaaattattatatgttgcttgtacgcgcgcaaaaagtaacttaattgttaactatattgcagacgcaaattctaaaatagatttaccaaaccttgagatttgtgttaaaaagcattttggtcataacatgatttttaaaactatggattaa

SEQ ID NO: 75430 - DNA, 1203 bp, Xenorhabdus nematophila AN6/1
ttgggacttgagtcactcatcaagcaggtcaatgatgatgctgtcaacaaaagcaaggaactcaaaagcctaaaatcccacctggaaaaactgaatcaatcgattggcggtactggcggtgcagaagtaactccctttccgaaaaaaattcgggacctgtcaaagaatttttctgtctattctggtgaaacagataccaattcgttttcgatggaatatcacggcatgggaacacgcagttgggcttcaatgttaacgattaagtctttcgtcgagattttgagtcacagacatattgccgaatctgagcctttattcccaattctgacagttgaagagccagaagcgcatttgcatccgaatgcacagaaaacactttatcgccaactctcagatacaaatggtcaattaattttaagtacgcattctccatttttggctgccatggctgacctttatcaaataagatcattggtaaaaacaaaaaatgggattgtggcacataaaatttctcacccaatgaccgatgacgagaaaaaatcaatttcacgtagtatattagctaaaaatggtgaattgctgtttgctaagtgcatgcttttatgtgaaggagtcactgaggagcaggtgcttcccgctatgtttgagatttatgcatcagctactccttggtctgtcggcctttcttgtgtcaatgttggtggaaaagataaatatattcattttgcgttgttgccatttagcttcggtataccaacatgtattatcagtgataacgacattaatcctaactctgggactaaaacacaggatgatgtcacgcaacaaatagaaaaattatcgaaaaaaatgtgtctgtcactgacaaaagatttttacgatatttattttcttgatgatggaaatgattttgaaaaagaattgattgaccacggcttgcgtgatgagattattgatgcttttgttttacttgcaacaacaggaaataaaaataacgagaaatttagagacgcaaaatataatgaatttaatcaacttactgatgaacaattattagaaaaaatgagtaaggaaaaagcatcttatgctggtttcttagcagatgtgcttctagcaaataaaagaataaaatcagttgatgatttagtaccacctaatgttcgagctagtttcgattgtataaaaggatggttagcatgttaa

SEQ ID NO: 75431 - DNA, 1896 bp, Xenorhabdus nematophila AN6/1; identical to SEQ ID NO: 72607

SEQ ID NO: 75432 - DNA, 2058 bp, Moritella viscosa
atgcagttaacaaaaataattgtttcagggttcaaaagtgtatctcctgaacataaacagagtattgagtttgaacccgatgttacggcttttatcgggcacaatggaactggtaaaagtactttactagaagctctcaacaaacttttctctttagatcgaagcctaagaaatataactcctgcagatttctacatgaaagaaggagcagatcccagtggggatagagatctctttattgaagcatggtttaatttccctcaaagcgatggtgtagaccccgctgtacctacattgattaatggattaacagtaaatagtaccaatggggatttaattttccgagttcgtttagatgcaaaagttagttttgattacaatccaaacggtgatgtagaagacgacatatggattattgatggcgatatggaagagccagaagaccacaataaacaccgcctctcatcagcacagcgtaacgcaattcaagtcaactatattccagccaacagagatcctatagctcagcttaaattctcttcaaaagcaatcttaggccgattgttgaaagcaataaattggtctgatagcgaacgaacttcatttgaagcccaagctcagtcactaaatactctagcgacagcaaatccagctttagttcaaatatcagaggctataaacactaactggcaagaaatatacaaaggacgtcacttaaatacagcgagtttaaacttccctttaagtgatgtagatgagattttacgtttgattcaattacaatttatgcctgatgcaacaggcaataaagtagatacaaataaattgagtgatggtcaaaaatcattagtctactttgcattgactaaagctttatttgacatagataaacatacaagaaatgcgcttcttgcaagccaaaaatctaacttcgatgctgataaaatgaaattaccaatattcagtatgatcgcactagaagaacctgagaatcacctatctccccactatttaggacgaataatcaaactcatcaaagactatggggatagctcattttgccaatctgtggtttcaacacattcagcttctcttgtcggccgtattgaaccacatcagatacgtcatttcaggttagatggagaaactagaagtactcgggttgccgctttgactttacccgacaaaacagatgaaaaggcaaaatacattagtgaagcagtcaaagcataccctgaaatatatttttcaaagatagtcgttctagttgaaggtgatagtgaacaagtcataatccctaaaattttagagctatatgatacaagtgtcgactcattcgccatatcagttgtaccacttggaggtcgacatgttaatcacttctggaggttattagacacgctaaaaataccatatgtaacactcttagattttgatatagatagaaatggaggtggctttgggcgtataaaatacgccatagagcagttatctaaatatgatgaatcagagatgtatctccacaaaggagttttgaaagatattcctaattggagtgatacaagaaatcctgttagttttaattttacctacagggaagaagggtctccggaagggaaagttataaacttagttcaacgactagaagagaagaatgtttatttctcaagtcctttagatatcgattactctatgatttgcgcatttccagatattttctgtgagaaagacacatcatataatgaacgaggtccaacagaagggaaagtagatgaagaagatggtgatacccaaaagagacaaacggcattgcttaaatcggtattaaaaaaagggaatatcggattacgctatcaatttggctccgagtgggaaaagtattttacttggtatcgttacagattcctctcaaacaaaagtaaacctgcttctcatgtacgtatgtttgcgaagattgaagacaagtacaccccaactgaaattcaacagaaaattccgttagaactaaaaaggttatctgaaaaaataatcaatctagctgaagaggttgttgaataa

SEQ ID NO: 75433 - DNA, 1680 bp, Moritella viscosa
atgattgattggagaccttcagaagggattaattatacagatgaattgaaacaagttattaccgcagaggggtcaattgcggtattagctagtgcaggttcaggaaagacagagctgttagcacaaaaagctgactatctattcgcaacaggtaaatgcacatggcctaggagagtcctatctttaacttttaagagagaagcacaatacaacatcaaaaaaagggtcgtgaagagatgtggttcaaattccacaaggtttgactcttttacatttcatgcctttgcaaagagtattgttgatagatttaaaagcttattacctgacgaaaaaaagccaatcgatacttatgacattgcctcaaaaagtagtgaggcagatggtataaataaacttacgatgaatcaaattattgttctatcaataagcataataaacagtaatgaaacaatcaaaaagctcttagttgattcatattcacacatatttattgatgagtttcaagacactacgaatgagcaatatgaattaatcacctgcatatttaaaggtactgacgctaagattctatctgtaggcgatatgaatcaaagtataatgatatgggcgggagctagaaaaactgtatttaatgactatataactgatttctcagcttcttataagtttttattaactaattaccgttcatctgaggacattcagagagtcttatcagtatttcaaacattcatggaaaatccggctaacataagttacaactcggatgaatctctagggtgtacgataagtatttatagagatgaagttcatgaagctgcacatatttctaataaaatagtggaactgattaattctggtattgctgccagtgatatatgcatactgactaagcagcagtcatcaatctacacacaaattgttagagattcgctgagcaaattaggcattaataatcttgatatgtcagagctacaagattctctaaaagaaccagttggggaaatattctctctttacataaaagtactaatttgtcctgagccaaagttcacgattaaattacatgatttgttattaactattaataacattgagcctaatgacgataaagaagaggcgctctcttcaagcttctaccgttttatacattaccaaaaagaaagtgtcacagacgcaatcactgttgatgaacttttatctaaagtaaatgcttttataagttatgttgggttcgataaaatcatatctaagtggaagcaatataaaacagagtctttttatcatgggctctggcgagtcttagagctacatctaagagatgtattctcaaaggcaacatcaagtgttgaagctgtgaaattatttacagctgataatgcagttcaaattatgaacgtacataaatgtaaagggcttgaatatcacgcggtcttttttataggtctagaagaccaagcattctggagttattcaagagctcaatttgaaaataactgtgcgatttatgtagcaatatctagagcaaaagagcacctcgaaataacatactcactaaacagagagcataggattaatcaatcgtttaataataaagcatcctcttgtaatagtcttagtgaagtatattcgacattcaccaaacactgtaaaataccactaaaagacatgacagtataa

SEQ ID NO: 75434 - DNA, 2100 bp, Candidatus Omnitrophus magneticus
atgcatttaaaaagtttaaaaataaccaatttccgaaaatttgggcaggaacacaatgttgttgaatttgtaggggcaaaagatatttcctcgaaatccccaagcatcaacatcgcaccatccacaacgctcattgtcggcaagaacaattctggaaaaacaaccattacggaggcattaaagaaatttctcggcaagggcggaacgtcgttccatgcgaatgatttcaacttcatatatctgagcggtctacttgatgagtacaagagcgacaagtttgaaaaattgcctacgatagaattcgagatagcggtcggaatagattttgatagtgactgcgatttggtgacaaacattgcgccttttatgaacatcgaaaatgctcatacttctgaaaaggaaagggattttcgggttgtgttgaagtatgaagtgaaagaaaaaacaaagtttgaagaagcagtcaaattggctatgggaaagaaaaagaatgactctgtgttttttcggaagtttttggaattgattaataataccgatttcagcatgaactattacgattccgaaggtgttttgctcgccgattccaagtttaagattaatgatttgattgatatagcagttatcaatgcgaataagataatcgatgacaagagtctttctgagaccttcaacaggataataaaattccgttataaattagaaagcaagcccgaagttaaagatgctgttgaggttgaaatcgataagataaacagtacgataacagaaaaagtttcagcaccgcatgccgcttctatcaatgcggcactgagcaggattgagtccagcgatcatctggaagtcaatctcaggccagatttgactttcgaacagataatttcgagcgtcataaagtatgagtacaaagaaggaaaattccatattcctgaggggcagttcgggcttggctactcaaacctgatgactattatcggcgagctgattgaatacatcgaaaaatatccgaagcaagaatgccacagcaagatcaatcttatatgcatagaagagcctgaggcttttatgcattcgcagatgcaggagctatttattaaacacattaacgatgcagtttcttttctgctaaatgacagcaagaaggaaattaatagccagctcattattactactcattctcctcatatccttaacagtaaaattcatagcggtaattctttcgacaacatcagctatattacgattgcagatagtttttcaaacgtggtaaacctgaatgacaggaacgtgatggaggacaagacagcggcaggtgtccaaaaagattccggagcaccgtcgaagcagacagttgatgatctaaaatttcttaagaaacacattaagtataaagtgtcagagcttttcttttctgatgctgttatttttgttgaaggcgtcacggaagagacgcttctgtcctactacattgatcaggacgaaagtttaagcagatattatatttcaattttcaacatcaatggtgctcatggacttgtttaccacccgctaataaaacttcttaaagttcctaatctaattataacggacttggatataaagagaactgataccgaaaaagacgattgtcttcaggtctctgacctcgcgggaagagtaactacgaataagacgattgctaagtacaactctggcaaagagaagctggacggaatcagcgggtctttcgaagacggcaacataaatgttgtttttcagtgggaaaaaacggaaggctattatgcaacaagttttgaagaatcattcatcctgacaaactatgataacaatatcctgaataaggttctggctagtattaagccggatacgtatagtgaaatcgtcggtacgccagtagccaagaataagcttaaagatgcttcatataagtttcagagcaaactttcaaaaagcaaaagcgatttttcaaatgaactcttatatgaaattgtcatctgtgatgatgtgggggcaattcctaagactccgaagtacatagttgacgggttgacttggctcaaaggttcattgaagaaacaggctgaagaaggcggaaaatag

SEQ ID NO: 75435 - DNA, 2361 bp, Candidatus Omnitrophus magneticus
atgagcttgtcaaaaatatctcccacttcaaaaaaagaggaggaatctattcaggagctaattaattcttgcatagataaagatgaaagcatcgtcttcagcgcgggggcaggggctgggaagacctatgcccttactgaaagcttgaaacacataatacgccagcatggagatagactatcacggcataatcaaagaataatatgtattacatacactaatgtcgcgacaaatgagataaaagatcgtctcggcaattctgacattgtacgagtttcgacgattcatgaaagactttggtctttaatcagtagctatcagaaggagctggtgcgagtacatacggcgaaggtgcaggatgagcttgttaaagtaaaacatggattgctcgaaaaccaagaagaaaaggagtcgaagcaattcaaggcttatcgcgaactctctgaacaagaaaaagacgatttcaaggctataatgattgccagaaagagtgacttctatagattttatgataagcctgcaaaggaattcaaatcatcactggaagcccatctgggaagctatactggattgctgagcaatgtggcaaacttcaagaaaactgtaagtactatttacaggattgaaaattacaaagaatgccttgagaaaataaacgaaggtcatccgaagtatggagaagttaagtatgacgaccgatataatttcgatattttgcacaagatgataataagccacgatacactgcttgaatatgcgctaaagatgattaagtcttatgacttgcttaaacgagttattctggacacatatccgtacattctgatagatgaatatcaggacacgaacaaaagcgttgttgagattatgaagtttatcgaagatcatgcgaagactattaagaggaaaatctttatcggctatttcggcgattctgcgcagaatatatatgaagacggcgtcggggacgatctaactttggttcatccggggctaaaggttatcaataagcagttcaaccgcaggtcgcatttggaaataattgacgttattaacagaatcaggaatgacgatattaaacagaagtcaatatacgatgattgcgctggtggatctgttgaattctatacagggtcaggtgatgtcaaaaaccttttcatcgaggaatatcgcaggaagtgggctgttgactccggaaacaagcttcattgtttagttttgttgaataagtctgtcgctgaatttaatggtttcccggacatctataacgctttttcagacacgtcgtattataaaataaattacgataggcttaacaacgaattactcagcaacgacctgtcgaaactcggggatatcccacacctcttttatcggatccttaagtttgttaataaccttaacaacccgcatacatccatagctcacatagttgataaaaagatttattcaaggatgactttcttcaaaatgagagagctagttgttttgttaaaaagtctcagtggagcgtctttgggggaatatgccaatgacatcttcgataagtacaaaaactcaggaaataattattacaaacaagtcgtccagaatattttcgaactcgaacgctactcttatcatgattttacgaattaccttctcgatgcattatttctcaacattggaagtggaaggttgaatgatttcaaaataacacttacagatgaactgtcagtgagtgatttcttaaaacaaacagatatcgagtttttcaaacagaaattagaacagtttcttagcggagaattcttttcttattcggatataaacgaagtcactgcttttagaaaacgattggacatttttattggtgaacagaacgcatccggcatcgctttgaaagacgctgactctctcaagaaaagaatcgacggattatttgaggatgaaatattatcccttatcgatagggatgaagtcgagacggcaaaaactaaactagatgccctattgagtataaaacttgagcagtgggcactttggtttgagttcataaacgatgtccggaaatcagatatcgtataccatacttatcacggaacaaaaggagcggaatttgataatgtgatcattgttatggagaacgattttggccgaatgaacaaagacaaattttcgtcttttttcaagaacttgaataaccctccgctttctgatgaaacggagatgttcaagtttaccaatacaagaaatttgctttatgtttcttgctcccgagccataaaaaatttgcgaattctatatttagacgatatttctgactttaaagaaggcgttgaggctgttttcggtaaaaccataccgtatatgccgtcttaa

SEQ ID NO: 75436 - DNA, 2139 bp, Burkholderia pseudomallei
atgcacatctctaaatttacgctggtcaactaccgcaacttcccgagcacaacgctgacgttcaccaagggcgtcaacactgtcataggcgagaatggttcggggaaaacgaatctttttcgggcaatccggcttctgctcgatgacaacatgctgcgctctgcctacaagctggacgagtcggatttcaatcgaggcctgagtgactggcgcgggcactggatcatccttagcttggagtttgacgaaatcgggccggacgaggcgattcaagctctttttctgcacggcactggcgttgtggctggaggtccaatcggccgcgcgacatacaacctcatcttccgccccaagaaggagctcaggctgaagctcgcacaacttgccgctttcgacatcgcagggcttaccgcaatccgcgaggccatcaccgccgctgactatgagacgctgttcacaggcaggagcgaggcggacttctgtaatccagcggtctacaaagaactcgtaggcgacttcgacaattgcatcttcagtcccgagattgacgatcctagggttggtgcgcgcgtgccagtctatctctccgtcgcgaaagaggtgtccttcacgttcattcaggcattacgtgacgtggtggcggagttccataataaccggaccaatccgcttctaacgctgcttagagcgaaaagcggtgacatttcgccggctgtgatggcgcctattgtggagaaggttctcgatctgaacaccgcgatcgaagacctcgaagacgtacaaacagtccggtcgaatattcgcgatacgatcaaggatgccgctggagagacgtattcaccaagttcgctctcgatcaggtctgaactgtccgatgaacccgaaaagctgttccagtcgctccgcttgttcgttggtgagtcggaagaagaccatgagggcgccattcacgagctcagtcttggcggcgcaaacatgatttatctgacgctgaagctactcgagttcaagtaccagcaggcgcatcaagcgatagcaaacttcctgatcatagaagagccagaggcccacattcacacgcacatccagaagaccttgtttgatcgaatagcgtatgaagaaacccagatcatctactcgacgcattcaacgcatatctcagaaataagcaatatacagagcgttaacatactgggccgatgtggccgcgcttgcgaggcataccagccggcgacgggtctttcaccagatgaggtcggtagcctgcagcgctatcttgatgccgtgcgcagcaacttgctctttgccaagagcgttgtgctggtcgagggagacgccgaagaaattctgattccggtgctgttcaagaaggtactgggacttagtcttgacgagctcggtataagcctcatcaatatccggagcacaggcttcaagaatgtcgccgttctcttccatgagtcccgaatccgcaagcgctgcagcatcatcacagaccttgactccgcattcatcgacactacgccggtggcgggcgagccggcggctcgcgcaacacataagcagcgctgtcttgcctcacaggtatccggtgcagcgcgcaaggtcgcgcttgacgcgtttgcggcaccgaatccattgctgtcggtttgctacgccgagcacacgttcgaggttgactttattgctgctggcaatggggaggtcgtcaaaagggtcgtgcccgacgtatacgcctcgcccgctactatcgcggccgctgaggccgaactgacatcgggagacaaggcagctttcggggggcgggtgctgaccatggcggcgagccaaggcaagggatggtttgccgtattgctatccaagaaaattgaccacaaaaccatcttgcccggttacatcaaagatgcaatcttctttgctcggccgactctcagcaaagagcttttctttgacatttacgaataccgcatagcccaagcgctagcggtcggtgacattccgaatgctgtcgcagacacggctcgggcgaggctggccgagtaccggcagggcactattgatctggcagcactcaagacggcgatgatgccttgcctcccgggcgaccagattcacggcattcttgcggaggtggcgtaa

SEQ ID NO: 75437 - DNA, 1794 bp, Burkholderia pseudomallei
atgttcgcctgggccgccagcgaacttaatgcggagcaggcagaggcggtccgcgaagcaggtagcgtcttcctaatcgcatgcccaggcagcggcaagacacggacgctaacctataagactgcttatgaactgtcgcgtcttcaatccgagcggcagttcgttgtcgctataacgtacacccatcgcgccgccgatgagattcagcagcgaattgatgacttaggggttgataccgcgaggctatggatcggaacgattcacgcgttctgccttgaatggatcatcaagccctatggcatctacgagccagctctcgcgcatggctatcgcatcatcgaccagcacgaaaaggagatgctgttggagcagctctgccggccgtatgcaagagagcgaattaccttttttgattgcgagtactacttcgcgcacgacggctatcacttgggctgcccgaatccggccaaacaccaaagcctgcatgcaatattggcagagtacttcaggacactcgaagcgaatcgacaaattgatttcgagttgctgctgtggtacgcatgcaagctcgtggagcgaatgcccgacatcagccgtcttctgtctcaagtgttttcgattgtgctcgtcgacgaatatcaagacaccaaggaaattcagtactcgatcgtcgcttcgatcctgcgttccggtgcgggagcgacgcgactcttcatggttggcgaccccaatcaggcgatctatggctcgcttggagggtatcccatagagctggctagcttgcgcgcgctgaccaacctggcgattacgccgatgcagctctcgcttaactatcggtcatcggcccgaatcattgagtactttggcaacttcaacgtctacaacacgcagattgttccgggcagcgaggatcaaaactacccgagtcttatctcgtacaacacccaggtggcccgcgacgacctcatcgaagaaatcgcaagactggttcgccacaacatcgaaaacttgggcattccgccgcatgagctttgcgtactggcgccccagtgggtgcacttggcgacgatcacacgtggccttgctgccgcgctaccgcagtaccagttcgacggccccggcatggtgccgtttgcgagagatactgagaacttttggtacaagctttcgcgaattgctctgaccgagccgtcgcccggcatgtacactcgtcgtttgcgctgggctgaggaagtgcttcgcgatcttcgacacgccggcgtggacacgtcgaacttttccgccaagatgtttttgcgggagtcgaatgcaatatacgtccaggagcatgcgggtctcgaatacctgaggcggtactttgatgaaatcttccaacgcctgcacgttcagtactccgagatcggacagctacgagatcaccatgccgcatttttcgagagttccgcgcggcgcattgctcgcctacagaacgatggcgtggctggcatcgccgaccttcagttctttaggcgtgtctttcagaatcgcgagggcatcacagtgtccacgattcacggagtgaagggggctgagttcgacgtggttctggcgtttgcgctcctagagggcatggttccgcatttcaatgatcggaacggcccggagagtgcgaggaagcttctgtatgtgattggctcgagagcgaggaagaacctgcatctattctcagagaggggccggccgcgtgggcggaacgatgtttattttccaactcagagcctgacagcttgcgtcttcgactatgacgtggtctga

SEQ ID NO: 75438 - DNA, 795 bp, Elizabethkingia sp. BM10
atgagagttaaatcaatccgtattcagaattttcggaaactacaatcatgtacagttgatttttctgaaaaagaaacaatttttgtaggagcaaataacagtggtaaaactactgctatggatacgttgatggcttttcttaaaacaaaaagtttcaaaactcaggattttacactttgcaattggaaaagtttaaacgaagttggagaaaactggattaaggcagatgagttaaaaaaagaagataagtctgtaaaactattagaacaatatctaccagtattggatttatggattgaagttgaaaattcggaacttcattatgtaagtcatataattccgactttggattggagaggaggtttattaggtataaggctaagatttgaacctaaagatatggatgaattgataaaagaattcataactctttataataaatcaaacaagctatcacaagaaaaaggaaaagacttcaaactatggccaaaaacgttttgggatttttgtgaacgtaaacttaatgctcattttacaatcaaaacatatttgctcgatccggataagtatgatgaaaagcaagacttgctagaaaataatatagcgttagatggagatgttttacaagggctaataaaaatagatattattaatgctcaaagaggattcggtgatgcaaattcagaaactgtcgaaagcaacaatagcaggaatttatcttcacaattaagagcttattatgataaacatcttaatccaacattagagccaactgaaaaagatatagatgcatga

SEQ ID NO: 75439 - DNA, 552 bp, Elizabethkingia sp. BM10
atgcatgaaggtaataatcctacactaaatgagatattgaagaaaatacaagaaacaaatttgtttaaaattccgctagttctaaaaattgttctacagagaagtggtattgatatagaaaatagtgttgacaatgatgaaatagatgaagttctcatagcatgggaagaagcattaaaagccagtttttcggagattgtaaaatataacgaatatatctatgaagattcgaaatttggaacgcatcaaggtgttaaaggtcttgaatttgagcatgtaatggttattattgatgatgaagagtcaaaaggatttatgtttagctacgataaattatttggtttaaaacctcttactcccactgacaagaaaaatatagatgagggcaaagaaacaggaatagatagaacgatgcgactgttttatgtagcttgtagtagagctaaagatagtttagctatagtttcttatacggatttgccagaggagttaagggaaaatgttattagtaatgggtggttcagcgaagatgaagtagaagttattatttag

SEQ ID NO: 75440 - DNA, 2013 bp, Elizabethkingia sp. BM10
atgaaaatatcgacaattaaaataaaaggctataaatcgtttggaccggacgaagtagtaatccctttgcaagataaattagctgggttcattgggttgaatagcgcagggaaaacctcagctttagaaacactaaggaaactttttggttcatcattaatagaacgagaaatttatcgatcagattttcatataggaaaagatgaagatccagaggatattacacaaagagaactttctatagaagtgagaattgattttccaacaaaaggagaagaatcggttcctcatttcttctctgatatggttgtggataatgaagatggaaatccttatttgcgcataagattggaagcaagctggcaaaaatcagccaatcctcagggagatatcgaaattaaaacttattttattaaagtggccgaaggagagccagaagacactgacagtaagagaattttcccaaaccatctaagaagccttatccaaattttatatgttccagcaattcgaaaaccagcagagcaattaaaatatgcctcgggtagtattttataccgcgtcttaaaaaaaatcaaatggagtgatggttttaagaatgattttgacgaaaaaataggtgagatcaacaatgcttttaagggattaccggaatttaatgttattcagacttccattactagcttttggcaaaaattccataaagacgagcgttacaaagaaacaacacttggttttggaggaagtgattttgatgctattttaaaaaagttggaaatatcatttagtccaacaggtactcacaaaccatttgggattgatgagttgggagaaggatatcgttcattattctatctgacattggtatgctctcttttagatgtagaagaagtattggccgaggatgaagacgaagaaacaattggtataactagacctctccttactattttagcaattgaagaaccagaaaatcatattgctccccaattattaggaagggttattaagatcctcaaaacgattgccaaaaaagaaaattcacaagtattattatcatctcatacaccagccatagtaaagcggcttgatccggaacatattcttcatttcagaattacagaagaatatgaaactgaagtgaaccaaatattacttcctgataaggcagatgaagcatataaatacgtaaaagaagctgttcacaactacccggaaatttactttgccagattagtggtgattggagaaggagatagtgaggaagtcatatttaacagacttatgaatgtaatgaatgttgattttgacgataatgttatcacctttgcccctttaggacaccggtttgtaaatcatatttggatattattaaatgctttgcatattccatatataacccttcttgatttggatatagaaagagaaggtggaggttggggaagagttaaatatgcattgaaacaacttattcaacttggaataaataaaaaagagttattgaaaacttcagacggtgttctttcagatagcgatctgaaagaaatgcatacttgggatttagttacaaaagaggaaattgaaagtttaaatagttgggtcaattatttgaaaaagcataacatcttctactctaatcctctcgatctggattttttaatgcttactcattatcctgaattttacaaaaaagcaattcctaagggaggtggtcccagagttccagataaagatgaagaacctaaggaatttgaagaaaaattaaatggagccatacaagccacattgaagtcagaaaaagcaagtggcgaaacctactcagacgaggagaaagagctcatgatttggtataattatcattttttaggtcgaggaaaaccatccacacatattcaggtgctatcttcaatgagtgatgatgaaattaaagacgatctaccttcaatatttactgaaatttttaaatgcatttcttcaattttaaaagctgaccaaggtgatgaaaagagttaa

SEQ ID NO: 75441 - DNA, 1854 bp, Elizabethkingia sp. BM10
atgaaaagagttaaacctgaattatgggtacctgtagatgatatgcaacttgagacaaccgctcttcatattgcaaagagttcggaaaaccatttaatagttgcaggacctggagcaggaaaaacagagttgttagctcagaaagcctgttatcttttacaaactaatagttgcccttttccttataagattttagccataagttttaaaagagacgctgcttataatttaaaagaaagagttagtcaacgatgtggagatgaactttctaaaagatttgattctttaactttcgattcatttgcgaagcagattttagacagattcaagcaggcattaccagatcgatataaaatcaataatgaatataaagttgtacttagcgatcagactattttagattattatcgttcagaagacattaattattttaatataacccataaggatacaatattagcattacattctgcccagttatcacaaatcagcagcacgtatgaggaaaatatcaggaaaaacgtatgggagaaaatgttaaaatcagctccctcggaattatcttttaaaatgatcatgagattggcagaattaattattaaggtcaatcctaaaataaaacaatgcttacaacaaacttataaatatgtttttcttgatgagtttcaggatacaacagatattcaatatgatctatttaaaagttgtttcctagacagtgatagtttttttacagctgtgggagatgacaaacaacgaatcatgatttgggcaggagccagaaaaacagtctttgacgattttattgctgacgcggaagctactcgtgttccacttactataaattttcgctgtgcaccacaattagtaaaattactaaaccatcttacgcaacatttgctaggtaaaacagatttcgcaataccttcccccaaatggcgggcggatcaaggggaatgctctgtttgggtatttgaaaatccaaatgatgaaatgcagattttgttccaagaagtatctaattggattaaaatggatgatttagatcctagaaatatctgtattcttgttaaacaacaattatcaacgtatgcgggaaaattaatagattatttcaatctaaatggcataaaatctcgtgacgaaaacagatttcaggatatccttactcaagaggtctgcctttatattatcaacactttgtataggatatttgataagaagaataatgaagctaaaaagcatgtttttaatttcttaagcaatgttcatacagaattagaagataaccaacttttaaaactagagggaactataaatacatttattaatgaaataagaaaggaatatgccggatcaacattgacagaagaaaacattaaagaacttatagctaagatcgttgcgtttgcaggtaaggatagaatagtagctttttctcaaagttttagcaattcatctgacttagattcatatatagaaaaagttcagtctgaattaattcagaattacagtacctcgaatgatattatttcatcattagatatgcttatcggaaaggatacaattcctgtaatgactattcataaaagcaaaggattagaataccatacagttattttcataggtcttgaagacggagctttttggtctttccagcgtcagccagatgaagataagtgtaccttttttgtggccctttcaagagcaaaagaaagagtaatatttacatttagtaaacaacgagaagataggtttggcagattgcaggctcagagtttcaccaatattgaaattctatttcaggaattagaaaattcaggtgttgttaatataatagaaaggaaaatttaa

SEQ ID NO: 75442 - DNA, 1584 bp, Listeria monocytogenes; identical to SEQ ID NO: 73566

SEQ ID NO: 75443 - DNA, 2142 bp, Listeria monocytogenes; identical to SEQ ID NO: 74665

SEQ ID NO: 75444 - DNA, 1584 bp, Listeria monocytogenes; identical to SEQ ID NO: 73566

SEQ ID NO: 75445 - DNA, 2142 bp, Listeria monocytogenes; identical to SEQ ID NO: 74665

SEQ ID NO: 75446 - DNA, 1707 bp, Lechevalieria aerocolonigenes
gtgcgtatcgagtgcatccgggtgaccaacttccggaacctcgcggacctgtgcgtggcgatccagccgggcactgtcatcgttggtgagaaccgcgcgggcaagagcaatctgttgtacgcgttgcggctcgttctggatcccacactgtcaccgtccgaccgacacctcgggcgagaggacttctgggacggtctgtcggacggcagcgacgactgggatcccatggatgcgcgcgaggtcatcgagatctccgtggatctggccgacttcgaggacgacaacaccgtgttgagcacattgagcgatgcgttggtgcagtcggatcccctccgcgcgcgactgacctaccggttcgcaccgctggataccggtgtcgccgggccgggagcgaaggtcaaatatagatggaccatcttcggaggcgacgacgaagggaaccagatcgacgccgatctgcgcggctacctgtacttcgcgtttctcggtgcgctgcgcgacgtggacgcggacctctccacgtggcggcgctccccgttgcgagttctgctgacggctgcagccaaagctatcggcgacgacgatctcagccgcgtacgctcggcgatgagagaggcgaacgcgcagctcaacgatctggcggagatcaaacgggtcggcacgagcatcagcgaccgcatgatggagatcctcggtgcgaaccaggcgctggagaccgaactggctgtagcggcggaggatccgctgagattgatccgcaccatgaagctgttcgtcgatggcgccgcgcgccggcatctgagcacgacgagcctcggcaccctgaacgtgctgtacctcgcgctgctcgagctcgggctggaggaacgccttgcggagcaggacatcgcgcacgtggtgatgacgatcgaggagccggaagcacatctgcatccccacatgcagaggctcgcgttccggcggctgctggctgatcaccgcacgaaccgttcgattctcgtgactacgcattcacctcacatcgccagcgttgcttcccctcgcagcctggtggtgcttcgtgacgcgggcgggagaactgaagcggctgcggctagcgacgcggcactgaccgacgccgagtgggacgacatcgcgcgatacctcgacgccaccagagcggaactggtgttcgcgcgtcgtgttctgctcgtcgaggggtatgccgagcaagccttgctgccatcgatggccgcggccgtggggatggacctcgacaagctcggcatcaccgtgtgcgtcgtgcacggcacccacttcacgtcgtatgcccggttctgcgaggcactcggtatccggtgggcggtgatcacggatggcgacggcgacgcgggaccggcacgtgctggccgcttgctcgccgcgctgtccttgaacggagatccgggggagcacggcatcttcgtcggaacgtccacgttcgagtacgacctgctgcacgcgcaccccagcaacgtcaaaccttgtttcggcaccctctgggagctgagcgccgatcgggcgcgggccaccatggagacatgggtttcgcagtggcccgagatcggaacctacctgaccacgatcgacaaggcgggtggcaagggacggttcgctcagcgtcttgcgtcacaacagatctggccgccggactatgtccacagtgccttgaggtacctggcgggatga

SEQ ID NO: 75447 - DNA, 1767 bp, Lechevalieria aerocolonigenes
atgggcccgcttacccagtcgatcggggagctgtcggcgaacgaacgccagtggcaagtgctgaaccggcaaggccattgcgtcgtccatgccccgccgggcagcggcaagaccaagttgctggtcacctgtcttgcctacgacctgttcaacaggattcccgaacctcatggcgcggcatgcatcacctacaccacggccgcggccgaggagttgcgcaggcgcttggcgtcattgggggtctccgcgcggccgacgctcttcgtgggaacggtgcacagcttcgccatcaaccggatcatcggcccctttgccgccctgctcggcaagcccgagctggtcaaggcgtcgatcgcgagcgacgagcagcaggaggaggcctaccggctcgcggtcggctcgcggttcggatcgtcgtgcaactggaaggagaagcgcaagcagatcgagttccaccggcgtcgcctgtccactgtggaggaatggaaccgcggcggagaaggacttctggaggcctgctcgagctacgagtcgttgctgcgcggtgacgggctgattgacttcgagggggcggtggctgccgccgtggatctcgtcgaacagcacgaggttgtgcggcgggtgctctcggcgcgatatcgtcgcctgtacgttgacgagtaccaggacctcgcgccggggctcgatcgactggtgcgagctctctgtcttcggcccgactcggacgtcgagctactggccgtcggggacccagggcaggcgatcttcagctggaacggcgcgcggccggagctgatcagcgaactgagctcgcttcccggtgtgagcgccgtgcacctggagcacaactaccggtgtggcgaggagatcatccgggtgtcgacgcgggtcgagcgcgtcgggcggaaggtcacggccgtccgcggtggcggcgaggtgctggctgtcttctgccctgcgggcttcaccgagcagtgccgccaagccgctgctgcggtcggactggcgcacaggcgcggggtgccgctgcacgagatcgcggtgatctgttcgatgaacgctcagtgccgcgaggtcgcggaggtgttccgcggtgccggcctggccgttgccgtgccaggagtcgagtacccgcgtgctccggtcacgttgttcgtcgagtcgtgtgcggcgtgggcgatgctcgggcgtgagcagagtggccaccggctcggcgccatccaccggcgatggcggaggttgctcggtccgacgtggacacgcgacacggacgtgcggttgaccgagctgttggtcggttaccgcgacaaacccgtcacctacgcccgcaggatgctcgcggacctcctcggcatggggctgcgtcgagccatggcacgccctgcccagtccgacaacgccaatgcgctggaccggatgcagcacgcggtggaactcggagcgttggcggacgcgactgtcgtggatctggccagccgggctatgaggcgcgaccgggtgaacgtcacgaccatgtcgtccagcaaggggctggagttcgaggtcgtattgctcctcggcgcggacgaggggctgatgccctactggagttcggccaacgatccggccaagcttgaagaggatcgcaggaagttctacgtctcggtcacgcgtgcgcgcagcaccgtgaagattttctactcgcgttcggtggccacctccgccgggcgggcaaagcccgctgagccgagccggttcctctacgagataggcctgctgcaccgctaa

SEQ ID NO: 75448 - DNA, 2121 bp, Enterobacter aerogenes
atgtatattagccaattatctatcgttaactataaaaacttcaaacatgaaaaatttaagttccgaaaaaaatcggtaaacaacatcattggtgaaaatgcctctggtaaaaccaatgttttccaggccatgagattgattctagatgattcattacctgcaaatgcaaaatttctttccaaagatgattttcatcgaggactaggagagccgtttgggcactggataataatctcactccatttttctggtttaggtgatacggaagaacaacaagttttagcaaactacatattaaatgatggagaagatcaaaagacctcaacaaaaggcaattataccttcatattcagaccgaaattttcataccggcaagagcttcacgaaattagcaatgctcatgaagacctctgcactcgcagagacaaaattcttgagttctgctcctcacatgcgatatcaagggaaacttatgaacctgtagcctttgttcgaacaaaaatcgatctcacagacgaaagcgtatacagagaccacgtcggagacttcaaacagtatatattcccagatcccaatttagaaagcgaagagctaattggcaacaaaaaacctccatacttttctttaatcaatgaagtcgcttgcacatacgtaaaagcacttagaaatgtcgttgcagatctcaagtactacaaaaccaaccctctatacaagctattaactctaaaaagcaagcagataaatgatgaaaaaagtattgttgatgacatagttaatgtaaaccaaaaaatttcctcgataccggaaattgaaaatctcagcaatgatatttcccgttcattggtaaacacaataggatcaacctactcgcctaagattcaagtatcatcacaacttccggaagattttatcgaattagtacaatcacttggtttagttgtggaagattctttaagctatcaaggtacaggtagaatagaggatcttagcttaggcggagcgaaccttatatatctagctctaaaactttatgaatatgaagcaattcgtgacagcgaagaacatataacgcacttcttgatgattgaagagcctgaagctcatatccatacccacatccaaaaaacactttttgaaaacttcaactttaaaaacacacaagtatttgtatcaactcactctacacaaataagctctgtatcaaaaatttcatctatgagcatactttcgagaaaagatacaaagacggaagtatatgcgccatctagcaacctagaacctgaaaatattcgatgcattgaaagatatctagacgctatccgaagtgacattttatttgccaaaagtgtaattctcgtagagggtgatgcagaattaatacttatacctgcactagtaaaaacgacgctaggtgtaagcctagaagagatgggcatcagcctaataaaaatggatggaactgtattcaagcatatatctgatctgtttcatgaagatagaattcgcagctattgctccattctcactgatttagacaaggcattcataactcgtgaaaatgactctttcgcaaatgctgaatatataaaatcacagttaaatgctcaaaagtcaggagcagagagacagagtgctctagatgagtacacagctaacaacagctacgtcagtgctttttatgcagaaaacacatttgaaaccgagttgattagttactccgaaaacgtcaacctgtttaagtcggtgatagagacaacctataaaagaaaagcagatcgtgaagcagctatcgccaatataacttctagcaacacgcctaaaaaatatcatcacgcattaaagttcgcaaaaaaaatagggaaaggatggcttgctgctgagatggtagaccatataacaattgataacataatccctgaatacatcctaaaagcaattaagttttcgctttctgatagacacatagacgcaatagctctaaaaatgatggagtataatgttgaatcaatgggtcaagaagaacaagatgaaataaatgcaagtgacagttttgatgaaaaaatagctatctataagacccattatgacaatgacactttcatacgcttttgggaaatataa

SEQ ID NO: 75449 - DNA, 1749 bp, Enterobacter aerogenes
atgccttataggaacttaaccgatgaacagatggatgctgtcgtgctcgatgacagcatgttgctgtcagcctgcccaggctcaggaaagaccagaacgcttgtctcaaagctctatcatataatagataactctgaaaaactttcaattgggaaacgaaaagtagctgctattacatacaccaacattgccgcagatacaattcaagaaagacttctatcgtatggagttgaaagcaaatcactctgggtcggaacaattcatgccctctgccttcaatggataataaaaccaaatataaacatgataccaaggctatgcggcggctttgttgttatagatgaacatgagaaagaaactaagctatcagaacttaaagaaagatatgaattccgagtttatgacaatatcgacactgctcttaatcaagattacagaccaaaatacccagcagggactagagagcataacctgatccttgattaccatagatatttatcagaaaacaattatatcgatttcgacttaatactaaatatcagccatcgacttctacaatctaaacctaagctatgtaaacgcctaggaaatcttttctaccatatacttgtagatgaatatcaggatacctcagtaatgcagtatgagatactgaaatgtattatcatacaaaagcagacaaaaataacattgataggagatcgagagcaggctatttacacaggcctaggcgcaattgttaagagcaaaccagagctagagagtttttttgagcttgacttccctttacaagaaaagcgcctgacggggtgttttcgcagtagccaaagaataattgaccattatcttaaataccaggatgagggctacaaaatagactctaaatccgacctaataaactacccctccgtcgttcatttggagagaagtcttcataaagacaacctttccgattatgtagcagatattgttacgcagcaccttgcacaaggcattcctgaaaaagaaatagcaattctatgtcctagttggttcgacgttataaacatctcaaataacattagcaaactagataaaggctttaatattgatggcgtcttgatctcaccaataccaaaaaatcaagacaacctttggctgacattaataagattaacccttaccaagccaagcattaacaactacataaaaagaaggcggtacgctaacgagctttcagaaaaattaaataatatatcttatgatgaagaagccataaatccaaaaacgatcctcagcgcagttaattcgatttccataaaatttgacagagagattgatgagtggatagaggaagttatagtcaggttttgcgaaagacttagaatagagctgacaaaaaacaacttatttaatgaagagatgaaaagcatattaaatgcaacaagggacagaataaataagtatgaaatgaactatagagcttcagaccttgaaaaatttttttcatcttccaatggagtaaaaataacaactgcgcactcaaccaaaggtgacgaatacgatgtagttatatgcaccggattgttgggaggaaaaataccgcactggaatgacataatagattgtagcgatgcacatcaagactatgttgctagaagacttctgtatgtcatttcctcacgcgctaaaaaacatctttacttaatttctgagcttggtcacagaacaaataggggaacaccatataggcctacaaggcaactatag

SEQ ID NO: 75450 - DNA, 1785 bp, Enterobacter cloacae
atgtatctgtctaatttaaggatagccaacttccgaaatttcgagacggtagatattcccctggatggtaacattgttttgctgggtgaaaacagagtaggtaagagcaacctgctgttcgctatccgccttgtgattgatccaacattacctgattcagccagacagctaaaattatcagatttctgggatggttgcgatttatccacttcccctcaaattgaaatacatcttgagttcgctgatttcgacagcgacgcttcactctcagcgctgctaaccgattttcgcatagcagaaaacccagccttggcgagactcagctacgtctttcgaaagaaggaagatattgcaggagaacccaagtcaagtgaggattgtgaatttatcgtgtttggcggtggtcaggaatcacgcaccatccccagtcgcgttcgtcgccggatagccatcgatatgctagatgccttacgagacgctgaagcgcaactcgcatcatggcgtaactctccgttacgtcctttacttgaagatgcgttcggttcgctaagtcgagtagatctggacagggttgccagcgcccttgaatcagcaacgggtacaatggaggcattcactcctattaagaatcttgaggaatctctgcgtggtggcatccttaatcttgccggtactgctcacgatcttaatgcgcgtcttcgttttgcaccaacagacccgctcagattgatgcgctcactatcaatgttcatcgatgacggaaaaagaggaatcactgaagcaagcctcggctctgctaatgtggcattaatatctcttaaactggctgagtttgcctggcgccgcgccaagaacgaacgaaatttctcacttctctgtattgaagaacctgaagcacacctgcaccctcaacttcaacgggctgtttttgataagctctttaataatgccgataaggcgcagtcactgattgtaacgagccattccccaactctggcaagcattgctccgcttcgttcagttgtacgcctttgtagagatgattgtgggcgtactcacgctttttccctagctaaacttcctgtaacaactgatgaactcgatgatattgagcggtacctcactgcaaccagagcggaattactttttgccaaaggagttatatttgtggaaggtgatgctgaagaggttttaattccgggatttgcagaagccatgggactcaaccttgacgagcttggtatcactgtatgtagtgttgcaggagtgaattttgaaccttacgttaagcttgcaggcagtttgggtattcgcatagctgttataactgattgggatccacttgacggaagcaaacaacctttgggaaaagcacgagccattagtatctgggatgctttctgtgctgtccgtccagaaatgcacaagcttagtgctgaagagaaggcttggtttgtggataaaggttttgaggagtgtagcgacgtatggaaaaaagccggtatatttcttagtccgcaaacatttgaagtttctgtagcaaataccccaatcctgaaagacgcgctacttaatattctcgatgcgcaaggttttggatcacttagatcctccagaattgcctcctggagaaccggtcaggatccagagcctgcgcaactcctcgcgatgatatctgatattggaaaaggtcggctggcggcgaaactcaagaaaaaagcctccggcttagcaccaccggaatacatcgcagcagcgattcagtatgtggtgtccaatgtctga

SEQ ID NO: 75451 - DNA, 1794 bp, Enterobacter cloacae
atgtggtgtccaatgtctgaccggcacgcactgtcaatggcgttaagtgagctctcatcgaataaagagcagtatggcgctgccaccgagcaaggacactgcgttgtcattgccggccccggtagtggtaagacaaaaacgctcacgaccgccatggcgcgagccttgatggatgatattactgatcctcgaggcgttgcctgcattactttcaataatgagtgtgcagctgaacttgaagaacgtctgtcttgctttagcattgcctgcagcgaacgaaactttattggtactgtgcacagctttgcattaaaccaagttttaataccctattcgcgctgtatacctggtttgctacctaatgactttcgagtggcgacacgagacgagtgccgtgccgcagttgaggctgcttatctggcaaaatttggcgcaatcggggaccctcatacccggtggaagtttgcagaagaaaagcggcgtcgggacgttaaccgactgttaccatcgtggcggagtaacaacccggagcttgcagatttcatcgaattatatgaagcacatcttaggcgttcaggtcttattgactttgatgatatgccgctaatcgccttccgtatgctcagagagcatgactggatctgtaatggtattcggtctcgctatcccgtcttattcgtagacgaatatcaggatctgggacatgcccttcatgaactagtgttgctgctgtgctttgatgccggaatacggctttttgcggtaggtgatgctgaccaatccatttatggattcaatggtgcaaatccgcgattgttggatagcctcgtttcacgtgcagatgtgaaaacgttccgtcttcgcttcaactatcggtccggcgctaaaatcattagggcatcaatgggagcactgggagaagagcgtaattatcgtgggccagatggaacggcagaaggagaaataggatttcacggagtagaaggtgattatgaaaaacaggcacgttatatcgctcaggatttaatcccctccctgacagcacggggatttaaacctgagcgcatcggagtactttaccgggcagcttggctcggagataaagttgcggatgcgcttaaagccgagggcatcgcactcatgcgtactgacaccaatgcattaataaaacgcaattcacgccttgcccgcttcatcgaggcctgcagccagtgggtaacagggggatggaaagaagcgtcccctgcctttaatttgctgctgggtcaggcactttctttagtctatggccgccgtgcaagccgtactgaagaacaagtgctcaccgtacaactcatcacatttttacgaagcggaattgatcaggctgaaactgctcatcaatggcttttgcgattcgacaaagaacttatttccggctggcagataatcacggagaatccccaggttgagtggaatgttgttaaagagctactgaaacgaaccgatcctgcattaaagcaagatatggctctgatcgtatttgccggaaaggaagaaagtaccagacgaattacactgagcactctacatagtgcaaaaggccgagaatttgatgtcgccattatgtttggcgttaacaagtatgattttccgggtaaacgcgaccttgtttcagacaatgcattacgcgaggcacggcggttgttttatgtcggcgttacacgaccacgcaaagagttgcacatggtttatagaaaaggtgaacattccccttggattgcggaactctatcatcgcagccagcagacttag

SEQ ID NO: 75452 - DNA, 2397 bp, Enterobacter asburiae
atgaaaattgaatatattgatatccagaactacagaaagcttaaaacttgcagaattcgtctgactgacgaagaaacactgctcgttggggcaaataacagcggcaagacgtcagcaatggatgcgcttattttctttctggatcaacgaggaagaacggctgcgagcatcgcatcgggtaaatctccatcttcacgaaaattaggcgcagccgatttcaccctatcaaattggcatcagcttaatcaatttggtcaagcatgggcgaacgccgaagaggttggcgaaaaaatcagtgactggcagcccttatgcccaacgctggatgtctggttaaaagtcgagaaaaatgaagtccatcgggtacggcacctaataccgacattaaaatgggatggcggactgttaggcattcggatgatttatcaacccaaagatcttgatgccctaaaagcagactttattgcccacttcaaggccgctgagcagcttaaaatctcggcagaaaaaaatgccgaaaaagctcaaggtggttcagcatctgagctcagtgatttcaaattttcagtctggccgggatcgttgcgtgaataccttgaaagagaggtgtctaaagcttttgagataaaatcttacatcctagatcccgcaaaacttatcacggaccaaggaagcaaattcctccctcaggttcttgtcgaggggcaacttccgctagatttttatcctttcaatggactgttcaaagtagatatcattgatgctactcgtgggttttcagatccctatgtggcaacaggttctcagcatggtgcctctaatctggctagccagattaaccagtactacaatcggcatttaaatcctaccgatcttccttgtgacgaagatttggatgccctcgaagccatcgcctatgctcaacactcctttgatggaagacttaacaaggtgtttaacaaacccttgaaagagatagagacgctggggtatccggggttcagcgatccccatatcagattatctagcagggttaatccgatcgataatttggaccacgaagcggccattctttttgagatccagaaaactagccacgccgcaggggtgcctctgatgagtctgtcagagaaatataacgggcttggctacaaaaatctgatatccatggtttttacaatgatgagctttagggatcaatggatgcgcgtcggtaaagccggcctaagaaaaccagaggaagatgtctttgttgagcctcttcaccttattctgattgaagagccggaagctcacctgcacgcgcaggttcagcaggtgtttatcaaaaaagcttattcggtgctgcgcaatcatgatgatttgcggacttccaagaggttctcgagccaactggtggtcagcacacattcaagctaccttgcgcatgaagtgggctttgaaaagctcaggtacttcaaacgtaaacccgctacaggtccgcatgacgtgccgactgcggacgttattgatctgtcctgtacttttggcaacggtaaaatccgctcggatgatgtcttacaaacggctcagttcgtggctcgctatctcaaaaccacacactgcgatctcttttttgcgaacgggattattctagtcgagggggcggcagaacgtatcctgatgccgcattttatccgtaataatcccaacgctaatacaagtttggacaacagctacatttcgattctggaggtaggaggagcccatgctcaccggctgagggcattgattgacatacttgggattcccacccttgtcgtcactgatacggatgctcaaaagcctccactcaaactaccggcagatgttcaaaaagttagctcaggaaataaacccaaagctatcaggcctgaatttggcaagggatatattactggcagccataccataaaaatttggctcgatgttgagggagggctggatacggtccttagaatgccggagcatgagaaaattcgtggtaaggtcaggattgcatttcaatatggtattcccattaaatttggaaaagaggaggaggccgaggctttcccttacacatttgaagatgctattgcattgacgaatcccgagttgttcaaaaaagtagaaaaacctaccgggatgatgaaaaaaatgcaggatgctcttaacctcgatacgcttgaacagtgctgtgaaaaactctatttggcactcaaagatgacaaagccgagatggcactcgatttattgtactgtgctgaccccgccgaactcgccgcgcctaaatatattcaagaggggctggactggcttaaaaaagagctggaagtggcgagtagagaccttacgccggaagtgccgaaagtcactgacgtttgggagggggaataa

SEQ ID NO: 75453 - DNA, 1869 bp, Enterobacter asburiae
atggagacaccatccacgaacgaacctgtggtagaagagcttttcagttatcttgatctggagaatcccagaagttttctgctttttgccggtgcgggatctggaaaaacccgtacgttggtcagtgtgctggagaaaatgaaacaaaggtattcttcggagctgtctagatgcggaaaaagaataggcattattacgtttacaaatgcagcctgcgaggaagtacaacggcgattattttttgatgccaatttcatggtttcaaccatacacagtttttgctgggacttgatcaacccatttacatcagatataaagttatggcttaaaaatgaactcgagaagagtattgaacaactcacccgcgacattgaaaaaagcagaaaacctgatggtattacggcgcaaagaaacagacggagtttagccagcaaaacgaaacggctgcaatacctcgataaaattcaaaaattcagctattcccctacaagcaacaggcctgaaaaaggggcgttaaatcatagtgaagtgatcaacgtcaccgcttatctcctccaaaatgaagctctactcagagagattttatttagcagattcccagtgcttttgattgatgaaagccaagacacgaataaatatcttatcgaatcgttaattatgacacagcaggagcatcccaccaaattctgcattggattgttcggcgatatgatgcagcagatattcagcgggggaaaatccgacttagcctctcctctaccccctggatgggagtcaccagagataataattaatcaccgttcaccagtgagaattgtcactttgattaactccatcaggcaattcaatgatgcatatattcaggagccgcgccctgacgcccagcctggaactgcgcgcttgtttgtggttgacatgaacacccacaaggaaagagccgatattgagcgtcaggtcgctgaatatatggctgaacaggcggctgatactgaatggaataacaaacaatcagtcatggtactgacgcttgaacaccatatggctgccagacgtggtgagttcgaaaacttctttctgccccttctagaggtcgaaagattgggtgatgcagcaatcaatggggatagtcaagagataacattcttatcctcacaactatggccacttattgacgcaattcgcagtgatgatgattttaaaattgctacaatcatgcgtaagtactcccctgttttttcgagttcgcgcctcgaatatgcagacgatccactattgctcttccgtgaagcacaatgccaaatagacaagataaaagtgcttcttggcgagaacttggcgttccccattctagaagtgtgcaaactgattcatgaaggggaattgctgatcttgcctgaggctttccagcttcacctagcgctggtgccacataaggatgatgaatccacggaggaagtggacgtcaacaaagagcatgaagcatggagcagatctttgagcgcatccgtccgtgaactggaaaattatattagctatatttcatctacatcttcctacgatactcatcagggagtgaagggactgcagtttcctcgagtcatggctattctggatgatgaagaggcccgtggattcatgtttagttacgataagctactgggcgtcataccgcactctaaaacggatcaggaaaacgaaagtgcggggggtgactcttcgcctaaaagatcgcgccgccttttttatgttatctgcagcagggcacaggagagcctcgctgtcgttgcatacactaaagcgccctatttagttgaacggaccgtaattgagtcaggttggttcgtaaaggaagaaattatgcatatgtga

SEQ ID NO: 75454 - DNA, 1701 bp, Enterobacter sp. 35666; identical to SEQ ID NO: 75206

SEQ ID NO: 75455 - DNA, 1626 bp, Enterobacter sp. 35666; identical to SEQ ID NO: 75207

SEQ ID NO: 75456 - DNA, 2139 bp, Enterobacter sp. 35666; identical to SEQ ID NO: 72908

SEQ ID NO: 75457 - DNA, 1800 bp, Enterobacter sp. 35666; identical to SEQ ID NO: 72909

SEQ ID NO: 75458 - DNA, 2112 bp, Enterobacter sp. 35669
atgtatatcaataaattagctattagaaactataaaaactttcgaagctcaaatttctactttgttaaaggctcagtgaatacaattatcggtgaaaatgcttcgggaaaaacaaatttatttaatgcgatgagattaattctagatgattctctcccaatgaattctaggattctatctaatgaggacttctaccgtggattatccgaaccctttggtcattggatcataattacgctatattttgatgatttaagtgagtcggaggaggaacaggtccttgccaactatacagtaaatgatggtaatgataagtctataaaggaaggtaattatacttttatatatcgacctaaatttcatattcgacaaaagctgtatgagttaacattagaagatgacaatgtggaagcaagatccgcttcttttactgaatttgcatctaaccatattatttctaaagaaacatatgaagcagtagcttttgttagaacaaaggttgatttgaataatgacgaaatttataaacaagtagttggtgattttgatagttactccttttcaaatcctaatgatgatgatgctactgtattaggggttaagaagccaccttactttgccttaggcagcgaagtcgcttgcacttatgtcaaagcacttaggaatgtagttgcagatcttaaatattataaaacgaatccattgtataaattacttactttaaaaagtaaacaaattgatgatagaagagatattgtagaaaatgttaaagagatcaatggtaaaatttcagctatacctgaaattgagagattgagtaataagatatctgcttcattacttaatacagtaggctcgacttattcccctaaaatattagtatcctcacaacttccagaagatttcacagaattaattcaatcacttggcttagtggttgaagattctctggattacaatggctcaggaaagattgatgatctgagtcttggtggagcaaacttaatttatcttgctttaaagttatatgaatacgaagaaataagggatagtgaagagcatattactcacttcttgttaattgaagagcccgaagcacatattcataatcatatccaaaaaacccttttcgataacttcaattttaaaaatacgcaagtgtttgtttctacacattcaacacaaattagctctgtatcaaaaatatcatcaatgaatatattatcacgccaaaatggattcactgatgtatatcatccatcgtttggtttgacgccgaaagaaatttcttccgtagagcgatatcttgatgcaattcgtagtgaccttttgtttgctaaaagtgtcattctggtagaaggcgatgcagaacttattttaataccagcaatggtaaaagaaacgttaggaattagtttagatgagttgggtataagtcttatcaaagtagatggcactgtttttaaacatatttctaatcttttccatgaaaaacggttgaaaagaaaatgtgcaattctcacggatcttgattcggcctatgtaaaagtagctgataatatttttgatgcggattttgtcgaatctctggtagatgccgaagatgatggattacgaagaaaagaagagttagataaatatattgaaggtaatgagtttataactgttcattacgcagaaaatactttcgaaactgagcttgttcgctacgatgaaaacaataacttgtttatagaagttatgaaaaccgagtataaaaaagaagcgtattttaaaaaggctgaatcagacgtaaattcatctgatctcagagttcggtataaaagagtattaaagtttgcaaagaaaatagggaagggatggttagctactgaaatggtagaacatcttagtgttgataatcgtgttcctgattatattttacaggccattcaatttgttcttcgggatagaaatgttgagcctatatatcaaaaaatgcttgactacaatatgtctttaatgggggttaaagcatttgactgtataaatgccgaaaaagatttttctagtaaaatgatagaatataagaaacacttcaatgacagttttgtaagattgttggagttatag

SEQ ID NO: 75459 - DNA, 1752 bp, Enterobacter sp. 35669
atgccatatagaaatttaacttctgagcaaatggatgccgttaaattcaacgggaatttattattaacggcatgtccagggtcgggtaaaacaaaaacattggtttctaaactttgtttcattttagaaaataaagaactattttgtattggtaaaaagaagataattgctcttacatatacaaatatagcagccgatacgattcttgaacggattatgtcattcggcataagtagtgaatctttatggattggaacaatacacagtttttgtttgaattggattataaaacctaatgtagataagataccaagactttgccgaggatttagtgtaattgatgaacatgaaaaggaatttctcataaatgaattaaaagaaaaacatggcctatctgcaaatgataaagtttttactaatttagattttaaccttggtcagttttattcccgtgggaccaaagaacatttgattgtaaaagaatatcataatcatttgtatgagaaaaaattaatcgattttgatttgatattaaatctgacttgtcgagtgttgacaaaatacaatgcactttgtgaaagattgtctttacttttaaggtgtattttagtcgatgaatatcaagatacatctcttatacaatatgagatactcagacaaattgtattaaagaaaaatacaatgattacttttattggggataaagagcaagctatatacactggtttgggggctgtcgtaaagaatagagatgaattaattaattgtttccaacttgataatctaaccgagatgaaattaacggggtgtttccgtagtagccaatctattgttgatttttatagtaaatacaaagacgaagattatgagattaattcactttcagataataaggatttcaactcagtaatttttaaagaaagcgaggtagatgtttctcaactgccgatttatgtatcaggtattattagaactcatttggctcagggagtacttccaaatgaaattgctattctgtgtcctggttggtttgatgtgataaaactttcaaatgatattgttactcttaatccggatatagaaattgatggagtcatgatctctcctatacctaaaaacaatgagaatctttggcttgctttagttaaactatttttaattaggagagttccctctaattttaatactagacagaagctattgcgggatttccttcaagaattaaatgttgttgcaccctatactgaatcgttgtctcctaaaaaaatattaaagattattaataaaatatcattatctgtggattataattgtgaaattgatgtttggttgagacaggttataacgagattttgccattctattaatttgggcataagtaatgatagctactattatcaagaaatggaacttttgattaatgccacattgaaaagaatgttaaagtataatatggcttataaagcaaatgaattacatttgtttttcaattttagaagcggtgttaaaatcacaacttgtcattcgacaaaaggtgatgagtatgaagtggtcatttgcactggattactaaatgggaaaatacctaattggaatgatattataaattgtagctcagagcatcaaaattatgttgcccgtagacttttatatgttgtttcttcgcgtgcaaagaaacatttatatatgatatcagagagaggttacaagacaaaaaggggatatccatatcagacaactccacagctttga

SEQ ID NO: 75460 - DNA, 2139 bp, Enterobacter asburiae
atgcatatatccaagctcagcctggtcaactaccggaactttcccaacacgaagctgctgttccagaagggtatcaacactgtcatcggcgaaaatggatctggcaaaaccaatctctttcgcgcaatcagattgctgcttgatgacaacatgattcgctctgcctaccggctggagcataccgactttcatcgcggcctagggcgctggcagggacattggatcatcatcagtcttgagtttgaggaaatctctgcggatgaatcagtgcaggcgctcttccgacatgggacgggcgtaattgaggaagaggcgaacggcaaggccacttacaacctgatctttcgtccgaagaaggaaatcaggctgcgactttctcaattgaacgatggtgatcaggcaggcctcgacgccatcctgaacccggtcaccatcgacgactatgaaacgattttcacaggtcggagtgaagccgacttcaacgacgaggccttctataaggatgtggtcggcgacttcgcgaatgttcgattcaatgaagaggttgaatttcgtgttatcggcgcgaagattccgaacgtgctgtccgtctccaaagaaatttcgttcactttcgtccaggcgctacgggacgtcgtctccgaatttcacaacaaccggacaaatccgctcttttcgcttctgaagggcaagagcggcgatatcgaccccgtggcgttccaggctatcaccgacggggtaaaggcattgaatgactccatcgaagcgttgccagacgtgcaggtcgtccggacggatatcagagacaccatcaaggatgcggcgggtgaggcgtattcgccgtcttctctttctatcaagtcggatctgccagacgaagctgacaagttgttccagtcgctcaagctgttcgttggcgaatcgggggagagccacgaaggaccgatccacgagctgagccttggtggagcaaacctgatattcctcacgttgaaactgcttgaattcaagtatcaaaaggctaaacagtcgatcgccaactttctgcttatcgaagagccggaagctcacattcacacacatatccagaaaacactgttcgacaagctcaaatacgacgacacacagatcatttattcgacccattcgacgcacatctctgaggtcagcaatgttcagaacgtgaacatcctcggcagagaaggtgatcgttgcgaggcataccagcctgcaattggcctaaacccagaagagatcggcaacattcaacgctacctggatgctgtccgtagcaacttgttgtttgccaagagcgtcctcttagtggagggcgatgcagaagaaattctcgttccgatcctgatcaagaacgtgctaggcgtcagccttgatgaactcggcatcagtttaattaatatccgcagcactggatttcagaacgtcgcggttcttttcgatgatgcccgaatccggaagcggtgcagcatcgtcaccgaccttgacaagtccatcattgacacaacgccggcggcgggagactccgaagggctgctccggcgcaagggcaagtatcaggcatcccaggaaaaaggggtcgccaggaaagcgttattggaagacaccttcaaagataacgggtgggtttctccattctttgccccccataccttcgaggtcgacttcattgccgccggcaatgcgcgtaaggtggtcggcatccttcctgatgtctacaaggatgcaccaaccatcgcgacggccaaggcggagctcgaatcagcggacatcgcgttgttcggtcagcgcgcattgaccatggcggacaactacggcaagggatggtttgccatcttgctgggaaagaagatcgatccgcagaccgccattccgaagtacatcttggacgccatcgcttttgcgcatccggtggtcactaaggaagtctggtttaacgtgctgagctaccgcgtgaactacatcgatgcagaagatatcttcactgcgtctgccgtattcgacgactttagggccaagctgctggccttccgaaatggagacatcgacttcgtcggcatccgaaacgagatgcttgccacgttcccagatgatcgcatcaacgatgtactcgcggtgttctga

SEQ ID NO: 75461 - DNA, 1800 bp, Enterobacter asburiae
atgttcatgtggaacaaagatgatctgaatcccgagcaggaagcagccattctgaagccagggagcgtctttctcatcgcttgcccgggcagcgggaaaacgcgcacgctcacctacaaaatcgcctatgagttgtccaggctgaaatcgaacaagcagtttgtcgttgccatcacttatacgcaccgtgccgccgacgaaatccacgagcgcattgagagccttggggtggatacatcccgattatggataggaacgatacattcgttctgtcttgaatggatattgaaaccgtacggcatctatcacgaagcgttggatcgaggcttccgtgtgatcgatcagcatgagcgcgagaaaatcctggaggcattgtgcaagccttaccagaagccaaaaataacattctgggattgtgagttttattacaccgaaactggatatgtgctctcctgcccacaagattggaagcattcgggtcttcacgtcatattgggcaagtattttgagattctgcacgaaagtcggcagctagactttgagctcattctttactatgcgtaccaactgatcgcacgtcatcctgcgatcagcactcttctggcacagttgttctctttcgtgctgatcgacgagtatcaggacaccaaacgaattcagtattcgatcatcaccgccattctgaaagctggtcaaggtgcgaccaaggcctttattgtcggagatcctaaccaggcgatttatcaatcgcttggcggatatccgattgccttcgaggatttcaaggcgatggccaatatcgatttggacgaactcgaactgtcgcggaactaccgttcttctgagcgcatcattgagtacttcggaaactacaacgttcacaacacacgcatcgaagccgcatccgaggacaaggcgtacccaagccttatttcattcgacgacacagtgagcaaaaatgatctggacgctgagctcatccggctcatccgtttcaacattgagactatgggcatctcacctcacgaggtgtgcattctcgcgccacagtggacgcatcttgcaagcatggcacgtcgtttggtcgccagcatgccggagtactcattcgatggccccggtatggttccctttgcacgggacacagagaatttctggtacaggctttctaagattgcacttactcaggcatcgccgggaatgtatgtgcgcagactgcggtgggccggggagattctgaatgacctagaggcggccggggctagcgtgtcgaagctcacgcggaggtccttgttgagggagtgcaatgcaattaagatcgatgaaacagatggtcttacctacttgagcgcatttttcgagcgtctgtttgcaaacttagcaatcgactttcgccttttcacgctgcttcaagagcatcacgttgccttcttcgatagttcgcaagcccgggtaaatcgattgaagagtgaaggtagcgaatttataggcgatattgagacattcaggaaggtatttcagcataggactggaatcaccatctcgacgatacacggcgtcaagggagccgagttcgatgcagtgatcgcttatgcattattagaagatatggtgccgcatttcaatgatccgaacggtcaagaaagcgcgatgaaattgctgtatgtcattggttcgcgggcaaggaagaacctgcaccttgtttcggaacgaggtcgagttcgccagtattctggcgaagagtatcaagtaactcgcaagcttgcctcatgcagttttggatacgatcaaattccatag

SEQ ID NO: 75462 - DNA, 1980 bp, Enterobacter asburiae
atgaaaattacacaaatggagatcaaaggttttaagagctttgataatgtagggcaaactataaatataaattcattcaccagcttaattggagggaacggaacagggaaaacggcagttttactcgcattaacaagaatgtttggtgtcaaaagctccgatagaattattcaagttgatgatttttatgttcctcctggggatgaaatcgatactcaagatgaaagagagctatcagttcgtgtaaaattcgaattcgcagatttggaagatggtgaggacaatacagttgcagatttctttaagcatttagtttcaagtgaagcggcagagattccatactgtactgcaaaattaaaagcaaaatggacaaagactaaccttgcagaaggagatatagaaagcgacctagtgtgggaaatcggggagtatgaaaaaaatataacagcatatgaaagatcgaaaattcatgttcattatgtccctgcataccgagatcctgcccaacaactgaagcaaacagccggaaccatcatgcaccgtctgataaatgcagttgaatggtctgatcaaatggcgtcaacagttgatgaggttgctgtatcaatcggaaaccagttccaagaagaagttggggttcagacgataacatcgtcattaggtagaaattggaaaaccctcttcactgggggttactttgaaaagcttcaaattaagccagtagtgaatggaattgaagatgtattaaaacatatcgacactgtctttttacccagtccagatacacaaccattaccaactgaaagattgagtgatggtatgaaatcattattttatttatctttagtcaaatctgcgtttgacattgaagatgagataatcaattctgatgggaaacagttatcaatatcagtagaagcattagaccccccaaatctaactataatattaatagaagaacctgaaaaccacctttcacctcaatatttaggaaggatagttaaactgtgtgaagagatatcagagaatgatcgggcacaggtagttttgactacacatgcaccatctttacttaatagggtggagccagagaatataagatatttccgtcttcatgataataaaaatacaattgttaaagaaatattattaccaagggaagataaagatgatgccgagaatgttgatacttttacatatgtcaaggaagctgtaaaagcatatccggaaatttattttgcaaaagttgttatacttggtgaaggtgatagtgaagagatcgtcattcctaaaatagcacaagtaaatggaatagagcttgacacttcattaataacatttgcaccattgggggggcgatatgttaatcatttttggaaacttctaaatgagctttcaattcctcatgtaactcttctcgattatgatttcaggagaggaggtggaggttggggaaggattaaatacgcgataaaacaacttatttcaattggagtagacaagaatatattgcttaaaatgagtgatggggttttgtctgacgaagatttagaagtaatgcattcatgggatgaagatagggatgaagaaattgcatggatagagtcgttaaaggaatatggtgtgtacttttccttcccttatgatttagattggctaatgctaaatgaattctttgaggattataaaaaatttgttcctgaaaatggaggaccaagattgccaaaggatgatgatcctgaatataacaagaaagttaaagctgcaatagcttcagttttgaaaaaagaagaaaaagatattgatattagtaagtttgatgacttcgagaagtacttttggtaccgttacttatttttaggaagaggtaagccattatcgcataattatgttctatcaaaaatggaagacgataagttaagagataacagtcctgaagttctcaatgaccttatcgaaacagtaagaggtcttttgtga

SEQ ID NO: 75463 - DNA, 1848 bp, Enterobacter asburiae
atgccaataataaaagatgatgattgggttctaaaagacatccaagaagtagaagacgaggctatgaaagtaatacggaatagcacaggacataatcttgttcttgctggtcccggtgcaggtaaaaccgagttattagctcagaaagcatgtttcttaattgagacaggaaagtgcagggataaaagaataattgcattgtcctttaaaaaagatgctgcgcaaaatcttcaagatcgagttaactcacgacttgacttgaaatatagacaaaagtttgagtcaacgacattcgatgcattttgtaaaagcattgtagatagatttaagagtacacttccagtggtgtatcggccttcagatgattatgaaatatattttcctgaaaataaaaaattcgtagaagaggttaaacgagatgccgttggttttgagggactaactgcggaggaacttaagaaattaaaacataacaatttcgaaaataattatattgttaggccttataaaaagggtgaagagcattcggtagatgctcgtattaaacgatttgtttggttccgtttattggaaggaaaatccaaagtttcgtttaaaatgataaacttccttgcgaattatatcataagaaacaataagttcctttcaaatgctattaattcgacttacgaatatgctttcattgatgagtttcaagatactacttatcaacaatacgaaattttcaaaagtatctttttagataaaaaaataaaaataacagctgtaggtgatactaaacaaagaataatgggatgggccggagcattgcatagtgcatttgagatttttaaaaatgactttgcgattgaacatcataatgaattattgagtaatagaagatcgctgaaaaatcttataggttatcaacgcatgatggaggctttcatgaatcatgctgataacaaacctgagatggagttaatcgagaatgaaggttcagcaaagttaatacaatttgatgaaagcaatatagaaggggcatacatagcattatgtatccaaaaatggattgaaaaaggggttgatgaaagagaaatatgtatcttattcagaaatccgtctaagcattacacggataaaatcatctcatctctacaagacttggatataaagtgccgcatcgagaatacctatcaggaattactcaatgaagcaatagttcagttaatcttaaaaatgctaatgtttacctgcgataaaaaatcgattgaaggctggaattctacaatggaacttttatgcaatataagaggggtaaataaaagcagagatattactcgtttggaaaaagagcttagtcgttttataaaatcgaataaggacatcaatggaaatgttgttgatcatatatatggattaataagtatatttggtatcgatgagatcaagtcttacttcccacaatatataaatggaaatggcttggactatactattaattctctttcacaacatctggaaaatttaggtatcaaagataataaattagcagctattgatatgttactcggaaataaaacgataccacttatgacgattcataaaagtaaaggtttggagtttaaaaaagtcatcgtcgtaggtcttgaacctggtgcgtattttggcgatgaagaagagcagatagaaaatcaaaaaacagtctttgtggcattttcacgagcgattgaagaggtcatattaactcgctgtgcaaaaagagctaactggtgggatgaagtatgttcacaaaatttttctgagatcccattgataacggatatgctaacctattgtggtcttgaagctgagatttataaagattaa

SEQ ID NO: 75464 - DNA, 2139 bp, Enterobacter asburiae
atgtatatttccaaactgaccctggtgaattacaaaaacttcaagaacacgtctctgcggtttcacaagggagtgaacaccattatcggggaaaacggctcagggaaatctaacatcctgcgagctattcgcctcctgcttgacgacaatatggtgcgttctgcttatcgtctggaagagggcgatttcagccgatcactcgaccaatggcagggacactggatcatcatcagcatggagtttgacgagatcaccactgatgaatccgttcaggcactctttctccacggtacggctcccttggacgatgggccaatacataaggccacatataatctcattttccgacccaaaaaagacatcaggttgaagctggcagccttagaattgtttgattttaaagaactctcggagattcgtgacgcaatcaccatcgatgattacgaaacgcttttcactggacggagcagtgctgatttcggaaatccagcggtataccgaagtatcgttggagattttgatatatgtgatttctcatcagagacggagtttccagaaattggggcaaaggtgccgggcttcctttcagttacgaaagaggtctcgctgactttcatccaggccttgcgcgatgttgtttctgagtttcacaacaatcgcactaaccctttactcactttgctgaagagcaagagtggagatatcaatccactaacgatggaaccaatctccgagatggtccgcggacttaatgcctcaatcgaaggacttgaggatgttcagtcagttcgcaatcatattcgtgagaccattaaggacgccgcaggtgaaacttactcccctgcttcactctcaatcaagtcagatctccctgaagaagcagataaactttttcagtccctgcgactattcgttggtgaatcagaagaagggtacgaaggtgcaattcatgagctgagccttggcggtgccaacctaatatacctgactctcaaactactggagttcaagtaccagcgggaaaagctagccatggccaatttccttttgattgaagagccggaagcgcacatccatactcatattcaaaagacgctgttcgatcgcatcgcatatagcgatgcgcagatcatttacaccacgcactcaactcacatctccgaagtcagtaatgtaagcaatgtaaacatactgggccgtcacggagcgttttgcgaggcctatcagcctgccagaggtctagatcccacccaaatcaatagcatccagcgttatttggacgcggtgcgtagtaatctcctcttcgccaaaagcgtgatactcgttgagggtgatgtggaggagatcctgataccaatactgattaagcttgtactgggcgtaagcgttgacgagttgggcatcagtgtcatcaacattcgtagcacaggattcaagaatgttgcggttctcttccatgacctacgtattaagaaacgatgcgccatcatcactgatttggataaggccttctttaatatcaccgtacaggcaactgataatgccattgtggcaaagataaaggcaaaagctgcgggatctcagaaagccggtttagaacggcaggccgatttgacagagttcacagcagaaaatccatggattgaaaccttttacgccaaacacaccttcgaggtcgactttgtcgcagccggcaaccaagaggctatcgtccagaccattccggtggtttacaaggatcagggaaccagggaagaggcgaagcagcaactcaagtccggagacctgcaacaaatgggtagtcgtacgctgacaatggctcggcaagagggtaaggggtggttcgcgcttttgctcgctgaatacctcactccccaagtccagatacctgaatacatcatacaggccatccattttgcacatggcaaatttccgcgttcccttattgtcagaattctccagtatcgcgctgaataccgatatggagcagatgtggcaaatctgccagcgaaacaattatttcttcaggagataaatcgttttgcgcaaggagatattggcctggctgagttcaggataacaattggacgtttattaccgggagaccccattattgtattcttagggaagttgcaatga

SEQ ID NO: 75465 - DNA, 1785 bp, Enterobacter asburiae; identical to SEQ ID NO: 74087

SEQ ID NO: 75466 - DNA, 1905 bp, Enterobacter asburiae; identical to SEQ ID NO: 74534

SEQ ID NO: 75467 - DNA, 1665 bp, Enterobacter asburiae
atgattactgtcgaagaatggcagcccgcagatggattgacgctggaacctaatgcgaaacgtgcagcgaaagcgcgtaaacgttgcttggcactgacagctggaccgggggcgggtaagacggaaatgcttgcacagcgtgctgacttccttttgcgaacaggaacgtgtcgataccccaaaagaattctggcgatctcatttaaggttgatgccagcagaaatcttacagaacgcgttgaacgcaggtgtggaagatatctggcttctcgctttgacagttttaccttccacgcattcgctaagcgcatcatagatcgatttaggccggtacttacgggagaatatgccttagatgctggctacaccattgtagacaaaaaaagcggggcgtctcgtcacgaaatagcattcggcgatctggttccttatgcaattaaaatattgcaaacgtcaaaaatagcccgaaatgcaatccggcaaacttatagtgatattttccttgatgaatttcaggactgcacaaatttacaatatgacttggtaaagcttgcttttaaggggacaaaaattcgactgactgctgtcggtgacacaaaacagaaaatcatggcttgggcaggtgctctggacggcattttccagtccttcacaaaggactttaatgcggtgccgctcaacatatatcgcaatttccgctcaaaaccaactttgctgcgtgttcagaacgaaattattcgtaagttagatcctgactctgtaatgcctgatgctcagttggaaggggacgaaggggaggtttttgcttgcaaatttgaagacagtcaaactgaagctatctatctggctgacctaatttatgaatggattaacacagagaagctacctccagctgaaattgcagtcctaatctctaagcaaccagatttatatgctgatgacctcttcagagagttagagcaacgcggaattccctaccgcaatgagcagcaaatgcaggacatcactgtcgaaccagtggctaggttaatcgttgattacctatcatgcctgtatggacatcgggaacctaaagcctggattcgtctgatgaatcagctggttccctttgctgatgaagaaattcaaaccaacgtacgaaaagatcttgatcacctgattaaaaagcatcgtatgggggtgtctgaagcaaaaaaaacggacaatcccttttcggaatggtggacatttagtcgctctttcttaaagcatataggtttacagatgcttgttgccttatcgcctgaatatgagtcccatgatcgtcttaaacaggttgtgcgcgatgtagaagcacgtattaaagatttactgaaaatcgaatctgatttacccctcgcattaaaacgatttagtgatgatcaagctgtacgcattttgaccattcacaaaagcaaaggattagagtttgattcggttgtaatcatggctatagaaaatgagattttttttggtgatgaagaagagaatcgctgtgcgttttttgtcggtgtttcacgagcaaagagacgccttattttaacgcatactaacaagcgtgatgaacctgctaatgccagatattggaaagtttttaggactgctcgagtagagtatttggattatgttcttccgtttgtgaggtaa

SEQ ID NO: 75468 - DNA, 1701 bp, Enterobacter cloacae; identical to SEQ ID NO: 75204

SEQ ID NO: 75469 - DNA, 1626 bp, Enterobacter cloacae; identical to SEQ ID NO: 75205

SEQ ID NO: 75470 - DNA, 1980 bp, Enterobacter aerogenes
atgaaaattacacaaatggagatcaaaggttttaagagctttgataatgtagggcaaactataaatataaattcattcaccagcttaattggagggaatggaacaggtaaaacggctgttctcctcgcattgacaaggatgtttggtgtcaaaagctccgatagaattattcaagttgatgatttttatgttcctcctggagatgaaatcgatactcaagatgaaagagagctatcagttcgtgtaaaattcgaatttgcagacctaaaagatggtgaggacgattcggttgctgatttctttaagcatttaatttcaagtgctgcaggagagatcccattctgtatagcaaaattaaaagcaaaatggacaaagactaatcttgctgagggcgatatagaaagcgatctggtatgggagataggggagtctgaaaaaaatataacggcatatgaaagatccaaaattcatgtccactatgtccctgcttaccgagatcctgcccaacaactgaagcaaacagccggaaccatcatgcaccgtttgataaatgcagtcgaatggtctgaacaaatgggggcaacagttgatgaggttgctgtttcaatcggaaatcagttccaagaagaagttggagtccagacaataacatcttcattaggcagaaattggaaatcccttttcactggtggttacttcgaagaacttcaaattaagccagtagtgaatggtattgaagatgtattaaaacatatcgatactgtatttttaccaagtccagatactcaaccattaccaactgaaagattgagtgatggtatgaaatcattattttatttatctttagttaaatctgcatttgatattgaagatgagataataagttctgacggcaaacaattatcgatatcagtagaagcattagatcctccaaatttaacgataatattaatagaagaacccgaaaaccacctttcaccacaatacttaggaagaatagttaagctgtgtgaagagatatcagaaaatgatcgagcacaagttgttttgacaacacatgcaccatctttacttaatcgggtagaaccggagaatataagatattttcgtcttaatgataataaaaatacagtagtcaaggaaatattattaccaagcaaaggtgaaggcgatgcagaaaatgttgataccttcacatatgttaaggaggccgtaaaagcatatccagaaatttattttgctaaagttgtcatacttggtgaaggggatagtgaagaaattgtaatacctaaaatagcacaagtaaatgggatagagcttgatacttcattgataacatttgctcctttaggtgggcgatatgtaaatcatttttggaaattactcaatgagctttcaattccacatgttactcttctcgattatgattttaggagaggtggtggtggttggggaagaattaaatatgcagtcaaacaattaatttctattggtgcggataaaaatgaattattgagggtcacttcaggaattttaagcgatgaagatcttgaagaaatgcatacgtgggatgagaatccagataatgaatcgggatggatagagtgcctgaaggattataatgtttatttttcctatccctatgatttagattggataatgcttaataaattctttgaggattataagacatttgttccagaaaatggaggcccaagattgccaaaggatgatgatcctgaatataacaagaaagttgaagcagcaatagcttcagttttgaaaaaagaagaaaaagacattgatattaagaagttcgatgactttgaaaaatatttttggtatcgctacttatttttaggaagaggtaagccattatcgcataattatgttctatccaaaatggaagacgataggttaagagataatagtcctgaagttcttgatgagcttatcgaaactgttagaggattactttaa

SEQ ID NO: 75471 - DNA, 1848 bp, Enterobacter aerogenes
atgccgactattaaagatgcagattgggttttaaaggatatccaagaagttgaagacgaggctatgaaggtaattcgaaatagcacagaacataacctcgttcttgctggacctggtgctggtaagacagaattattagctcagaaagcctgttatttgattgagacaggaaaatgcagtaagaaaaaaattatcgcattatccttcaaaaaagatgcggcaaaaaatctccaagatagagtaaactcacggcttgattcaaaatatagacataaatttgaatcaaccacatttgatgcattttgtaaaagtatcgttgatcggtttaaaagcactattccagaagcttatcgtccatcagatgactatgaaataatctttccgaataataaagatttagttgaagaaattaaaagagaggccgtaggctttgaaggattaacatctgaagaattaaataaattacaaccttataattttgaagagaattatatagtaactccttatgataaagcattagaacatactgttgatggcaggataagacggtttgtgtggttacacttattaaaaccaaaatcaaggctttcattcaagatgataaattttcttgctaattatattattagtaggaatcaatatttatctaatgctataaattcaacatatgactatgcttttatcgatgaatttcaggacacaacatataggcaatatgagatttttaagagcattttcttgcgtaagaaaataaaaataacagcagtaggtgatacaaaacaaagaataatgggttgggcaggtgcaatgcacaatgcttttgatgtgtttaaaaaagactttggaattgaacaacctaatgagttagttagcaatagaagatcattaaaaaacctcataaattatcaacgcatgatggaagctttcatgaatcatgctgatataaagcctgatatgatgttgattgaaaatgaaggttcagctaagttactagaatttgacgaaagtagtattgaagggggatatatagcattatgtatccagcaatggattgctgaaggggtaaatgaaagagatatatgcatactgctaagaaatccggctaaacaatatacagacgatatcatttcagcattgaaaaattcagaaatccaatgtcgtattgagaatgagtatcaggatttattaaatgaagctgtagtacagttaattttacaaatgctaatgtttgtctgcaataggaagtccatagaaaattggggctcaataatggaccttctgtgtaacataaaaggagtaagtaaaagaggtgatgttacacggttggaaagaacacttagtcaatttattaaatcccatcgggttataaaaggagagattgttgattatttatattcgttattaagtatatttgggatagatgaaataaagtcttactttccgcagtatatgagtggaaatagtttggaatatagtgtggaatctctttctcggcacctcgaacagttagatgtaagagataagacatcagatgctattgatttgttacttggtaataaaacgatacctcttatgaccatccataaaagtaaagggttagagttcaggaaggtcatcgttgtgggtcttgaacccggtgcttattttggtaatgaagaagagcaaatagaaaatcaaaaaactgtctttgtggcattttcaagagccattgaagaagtattaatgactcgttgtaaaataagaaacaataattatggcaggcctttcagacagagttgtaatgaaataccattaataacagatatgataacttattgtggtatcgaggctgagagctatccaggttga

SEQ ID NO: 75472 - DNA, 1704 bp, Enterobacter cloacae
atgtatattgataatgtttatttgaaaggttttaggaactactccgatagttttataaaattaaaccattcaacattaataataggaagtaatgatgttggaaaaaccaacctattgtattcattacgtattttgttggataaaagtttttctgatttggatatagaacctaaaaatagcgattttcatattgatgaaaaaggtaatcaatgtgatgtcctagagataataataaattttcgagaggtaaaagaggatgctgttctttctaagttagtggggtatgtaagtgaagattcacaaacattcataaaatacaaagcgcaaagaacttcattagattataagttgtttataggtcacacccagtttgacatggttgagattagcagtagattttatcttaagtatttaaatctacgttatgtaaactcccaaagggaccttgctaaatatatatctacagagaaaaaacatctgcttcggcttgcacaggaaatgagaaatgatgagcaagttaaaaaggatgaagatactttaaattcattaagcgatttgctgaatagtgttaacgataaagtaaaagaaattagttatgtttcgagtgcaaccaaagaattaaacgatgagttaaagaaattatcatataataatgagaagatttctgtaatgctggattcaggtgcaatcggggttgaccagtttattgaaaaattagagttaagttcaaacacaaatggcaaaaaggtaatgcttggtggtgatggattcaataaccaaattttacttgcattatggaaagctaaaagtgtacgcgagcatgatattgaaaatgaagtggtaatatattgtgttgaagaaccagagtcacatctctacccacatcaacaaagaaaattatctgagtatttgattaataagttaccagggcaatctcttgttaccactcattctccgcagattgctgtaaactactctccagattcgataataaaaatatgctcttctgaaggagaatcttacgcagcaagcgaagggtgctctaattgcatcagtgaggcttggcagggaatgggatatagaataagtatactgccagctgaagcatttttcgctagtgttgtttttttagttgaaggtccttcagagatgctcttttatcaagctcttgctaaagaatgcaaaatcgatctggatttctttaatataagtatattatcagttgacggtgttcaattcgaagtttacagaaaaatacttgatgcattcgagattaaatgggttgctcgaacagacaatgattcatcaaaagtgcctagaaaaaatgagtggcaatactcgggacttaacagagctttagttctttgcgggatgaatcccctcgaaaacgaattaatggaaatctcacaagaacaaagactcaaaaagtattatcattataaggacgaattaaagaaaagaaatgtttttgtttcagttaatgatttggaaggtgatattagtattgaattaagcgaacaactaaaagaatatgtgggagtagatgatgaagaaaaggctgctgaatatttaagggggaagaaagcaatccgtatgcaagatttcttaaaggagtattcccatacgctaaaaactatttctacaggtgaattaattgcacctcttttggctgctgtaatgctagctacggaggagatgaaatga

SEQ ID NO: 75473 - DNA, 1623 bp, Enterobacter cloacae
atgattgattttacccatgagcaaagagtagctatagattatccatccagtatggtactaacagcgtgtcccggtagtggtaaaacagctgtaatagtagagaagatcgttctcgatttgtctatttgtaaggaatttcagggtgttattgccatatcatacactaacaaagcaagtgatgaacttaaaagaagatgtttaaaagcattgccagattcaaaatcaagcttttttggaacaattgataaattttatttaactgagataattcatccttttattaatcacctgtggggaagtgtaaataatttacaggtagttaaatttaatgatttagattcttttgccaaagatagtctttctattttttataatgatgaatatgtttgtgaaaacatcgacacatttgattttaaagaaatcaagaatctatacgctaaaggttttttagttttggaatttgttccattgcttgcatattttatattgtgtaagtctttggcttgtcgtagatatctttgcaagaaatatacttcgatgtatatcgatgaatatcaggatgctggatttattcaacatcttatatttttgaagatatttggatttggagtaaaagctgttgccgtgggtgatattgaccaatcaatattcttatacgcaggaaaaagttctaaatatttaatgtcattattaggcgaggatagtggattcaaaccatttgaaataacgatcaatcagagatctcattcttcgatagtcaactatgcatcaagaatgttgagtgaaaactgtgaattgttagttaccgatgatactcaggtatacagaacaacaattaatggttcacagcaagaggtcgctaaatggattgacgataatatcaacaatgtaaaacaaacttttgggatttctaaagaaagagaaattgcactgcttgcggcaacaaatagctctgttttattgatgtctggcctcgttcgaacaaaattgagagcatatattgatgacgatctgtccaaacttggaggggacgtatctcttctaataaaggaattattgagttatcggtttaatgttcttgttacagctcaggagattattgatggtttaagtatcaaagtggttgaacgaaatgcattgagagaaatgcggaatgtcattaaatgtgttagaaaagccgatgatttacattttattccagcattacgtcaggctgtaaagttattaattaataaagatctttcggctcagcacatcgatgctgtcaacgctgtattgcaaaataaaatgatgttgaataattacttaccggttggtgatgatgaattacaacttatgactcttcataaatctaaagggttggaattcgactttgtgtttcatttagatctttatgattggatacttccgcgtcgagagtttatcgagggaagttttgatatagttttttcaaactatgaccaatgtcttaatctgcattatgttggagttactagggcaaaaaaagcggtggtgctaattaactccacagagcgtttaaattatcagcatgaattaaaacgcgcgaagccttctcaattcttgtcgttaagaggtgttgaagggctatacagaaatatttaa

SEQ ID NO: 75474 - DNA, 1701 bp, Enterobacter cloacae; identical to SEQ ID NO: 75204

SEQ ID NO: 75475 - DNA, 1626 bp, Enterobacter cloacae; identical to SEQ ID NO: 75205

SEQ ID NO: 75476 - DNA, 1701 bp, Enterobacter sp. 35027; identical to SEQ ID NO: 75206

SEQ ID NO: 75477 - DNA, 1626 bp, Enterobacter sp. 35027; identical to SEQ ID NO: 75207

SEQ ID NO: 75478 - DNA, 2139 bp, Enterobacter sp. 35027; identical to SEQ ID NO: 72908

SEQ ID NO: 75479 - DNA, 1800 bp, Enterobacter sp. 35027; identical to SEQ ID NO: 72909

SEQ ID NO: 75480 - DNA, 2139 bp, Enterobacter asburiae; identical to SEQ ID NO: 75460

SEQ ID NO: 75481 - DNA, 1800 bp, Enterobacter asburiae; identical to SEQ ID NO: 75461

SEQ ID NO: 75482 - DNA, 1980 bp, Enterobacter asburiae; identical to SEQ ID NO: 75462

SEQ ID NO: 75483 - DNA, 1848 bp, Enterobacter asburiae; identical to SEQ ID NO: 75463

SEQ ID NO: 75484 - DNA, 2139 bp, Enterobacter asburiae; identical to SEQ ID NO: 75464

SEQ ID NO: 75485 - DNA, 1785 bp, Enterobacter asburiae; identical to SEQ ID NO: 74087

SEQ ID NO: 75486 - DNA, 1752 bp, Enterobacter aerogenes; identical to SEQ ID NO: 73074

SEQ ID NO: 75487 - DNA, 1776 bp, Enterobacter aerogenes; identical to SEQ ID NO: 73075

SEQ ID NO: 75488 - DNA, 1701 bp, Enterobacter cloacae; identical to SEQ ID NO: 75204

SEQ ID NO: 75489 - DNA, 1626 bp, Enterobacter cloacae; identical to SEQ ID NO: 75205

SEQ ID NO: 75490 - DNA, 2310 bp, Enterobacter cloacae
atgtcagcagcagacgccactacatcattatctggacagatatcccttcggtttgttgagctttgccagttccgccgacttggtaaggtccagcttgagattgatcctaagactactattctcgtcggtgctaataatagcggcaaaacatcaattctggcagcgctgcgccacttcctcgcagatggctcgtcatttggtgctttcgacatcagtgtttctcaatggccaaaattgcgggaacttggaagagtttgggacgcattagaagaagacccgtctacgtctggcgcatccgaaggtgaatgggaagagcaacttggaaccttaatttcggcgatgccaacgctagatctatggttcgatgctaaggccggcatgttccactatgtctccccgttcttgtcaaaattcagttggaaggggggcggggtaggtgtccgattgcgtctggaacctgctacgaacattgaggatctgaagcagttggcttggaagtatcacctgacgagaatacctgtgaaggatatgggaaaggattcgcttgcgtggccgattgatcttcttgatttttggctgcgagaaccttctcaactcggccaagttcgggcctacaagttagatgccgataacaaccctttggacgggataaagacctacgttagccaggtactggatgctgactcaagcccaattgatcgtaagcatcttcagaaacttataaaagtagactttgtggctgcacagcgtggccttggtagtgaggaagctgattcccggtctgcttctggcacccatcgcataggtttattctccaatcagcttctcaaatttgctcgacagcatctaaatgtggcagcaacaggtcatgggcaccgagctgacctcataaaagctgttgctgatgcccagcaggaactagataaaaagattcatgaggctattggtccatcggtagaagaggttaaagagcttgggtaccccggcttgcatgacccccaagagattcgtttccgcacgcgcatacagacagccgaattactcgaccatgggacagctgttcaatacagcatgcagaaggattcactagaagagcttctcccggaatattccattggtctcggttatcagaatttacagtcccttagttaccaactagtttctttcaaagctgctcgcctaaatcctgaaaagggcgctcccgcacctgttcatctggttatgattgaggagcccgaggctcatttgcacgtacaggtacaacgtattttctcgggtaaggcacataagctcatcagtcctaacggtagcgatgagtcaggtcttaaaagccaactgattatcagtactcattctagccatttagctcatgctgagaattttgaccggctacgatatgttcgccgcgttgccaagagtgaagaacaaaacatgcctaccactgaggtggttaatcttgggcaagtttttggtgatgataaaacaacccgtcaattcgctgaacgttattttcgcgttcaacacacagatcttttatttgccaatgctgcaatctttgtcgagggggttgctgaacgaatgctgttacctcttttcattgaaagagattttgcaacactcaacagtcgctatctgtccttccttgatattggtggcagccatgctcatcggctaagagctctcgttgaaagactccgtattccaactgtaattattactgatatcgatccagttgaagaaagaccaggtaagcctaaaaaaaatggggatccgactacaaccttagttgctgtggctaatacaggacaacccggactgcaatgtgggaacccgactcttcgcggatggcaccctaagttgcaacagcttgaggatttcaagaacccgaaaaatgagcatcttgtctggaaagaaattgccgagtgttctgtacgttttgcatggcagttgcctgtagtcgaagctgatggtcaatggccaagtacttttgaagactctctaattctgagaaatatcccttggtttaagcaacttattgatgaaaaagtcgatggcgatgggaagcaaatcaaaccgccgaagggagcactgggctcagtagcaagacaggtcgctgaaaatgataatattccagaactgctcgcagctctgcataaattaatgcatggatcttttaataaaggagactttgccgcaagtatctttgaaatggttgctgcggatgagccgatagtctgtcctaaatatatcgaggatgcattggaatggctccagacacagcttgagccaagcaaggaggtgatgccatga

SEQ ID NO: 75491 - DNA, 1950 bp, Enterobacter cloacae
atgactaactcatcagcccttgacgacaatgatcgcgatgcaggggtagttgaagagatttgcggctaccttacagacataccaccccgtaactacttcctttttgcaggggctggttctggtaaaacacgaactttggtagaagttttgcgtcgccttactggtgtgactgagcatgagaaggggggacaattagcacggtccctgaagatgtatgggcgttcgattagagttgtgacctacaccaagaatgctgtctctgtaatcaacagacgtcttggggacaataatttagtcagtgtgtctaccatccattcgttttgctgggagttaattaatgggttcaacgatgacattcgggagtcccttatagcagtaaaagaagctcaactcgctaaagagactgcagaggcacaagcgaaaccgaggggtattactgcagcaaaacagcgtgaccttgacgaaatcacgaatgaaatcgaggttcttcggacaactgaagtattcaaataccatcccgatcgcaatacatatggacctggtgcactaccacacaattacgtactcgatgcgacagcttggttgcttcaaaataagccaacactccaatccattctcaaagatcgacatccaatcatactgattgatgagtcgcaggacacgatgaaaggtgtactggactccttgatggtgcttgccaaaaaaagtgagagagatttgactcttggtctgctgggagatcatcgacaacgaatttatatggatggtcatgccgatcttccaagcattgttccggaaagctgggcaacgcctgagttacaaatgaatcatcgcagtcaacgacggatagtcacactgattaataaaatctgggaaacagaacttgaaggcaggacacaaccaacaaagggttcagcacaacatccccgaacggaaaaagctggtggaacggttcggctcttcttgggggatacatcacgaagtccagaagataaagtgcttagtgaacgctggtgcgctgagcgaatgtttgaaattagtggtttagcagattggaatcaagggcaatatcagttgcttgcgcttgagcataagcttgtcgccactcgtggctcgtttcttgatgtctatgaggcaatggttctgttagatcccaacgctgcagcaccatctggcagtggggacaataaggggccttcaacagtacaaattttgcttaatgagctggtgcatttagaagcctgcgtcagtgatgaaggaatcgttaatgagtttaaggccaccgaggtttttcgacgttatggcggtttagacaatatgcctgaggactcagaatcaagagttgaacgtactgatgaaatgctcgaggcgatagcgatatttgcaatggcttgcgccaactctgagtcaacgatcgctgaggtgttagcgccagtcttgagtgcaaacttattcgaggttgatcatcgactcctagaggcttatgtcgacaagtcaccagccccgcaagctcctggacgtggtgaggatgagtcaaagcaaaccagaatgcgccgtggatggtgtgcactgtttgcgtctccatggaaacaacttaagtgctatcggaattaccttgctgggatttcagagctcgcaacacatcaggtagttaaaggctctgagttcaatcacgtcatggttgtaatggatgatgctcttgctggtgggactctcatcaagtacgacaaaatttttggtggtacgcagttaagtccaacagatagaaagaatgcagaggctggtaaggagacaacaattgaccggactttacgtttgctgtacgtgacttgtagcagggcgcaagaatcgctagctttagtgctttggtcgtccgatcctgctgcagcaatggctcgaatcgaggagagcatgtggtttactaaagatgaaatacaggtcattccatag

SEQ ID NO: 75492 - DNA, 2139 bp, Enterobacter cloacae; identical to SEQ ID NO: 74086

SEQ ID NO: 75493 - DNA, 1785 bp, Enterobacter cloacae; identical to SEQ ID NO: 74087

SEQ ID NO: 75494 - DNA, 2352 bp, Burkholderia pseudomallei 7894
atgcacattgagaccgtttggatccgcaacttccggcgccttaaagacgcccgcatagacctagcatcagatatttctatctttgttgggtcaaacaatagtggcaaaacttcagctgggcatgctcttcaacttttcactgcggcgtcgagagaccgattttcgctgcatgacttcagttcggactgttgggacgatataaacgccttcggcgaaggagcggaaggctcagagttgccaagcatctcgatcgacatctggctgcgcgtgggcgccattgatttgcaccgcgtcgtggacctcttgccgagcctggcatgggaaggaacccgtgtcggaattcgcgtcgagttcgctgcaatcgatgcaccagcgctaagaacgagtttccgggaagcccgaaatcgtgccaggcgtgcgccggcgcccccgaatcaggcaaacgcgctacagcaagcggttccgcgcccccaggcagccgaagcgcccccagaacaacggcaagccaatggtgaatacctgccacaacctcgcacactctgcgactatttagctgacagtattggcgatcatttaaggcgtaattttgagctacgttactacgttctcgatagcgctcagttcggccccgacttccgccccgctgctggctatacacctttgcgtatgacgcacgacaaaggtcgcggcggccgagagatactgtccagtttgatcaaagtcgatttcctgcatgcacagcggcatctgtcggactctggtggtggagctcgatccgaagatttgtcgcggtgcttgagtcgtttctatgaaagaaacctcgagaaacacgaggaggactatgaggcccaacgcgcgctctatcagtcggaggcactgctcaacgaccacctcgaacgtgttttcggcccgacactcgagcggctctcgcatctcggctatccaggcctcaacaatcccaagctgttgatcaagaccgcactgaaccctgcaacgattttgagcagccatgatggtgctcgggtgcattacgcggttggaccagaagtaggcatagacacgcagacgacactgccggatcgctacaacggtctggggttcaagaaccttatctatatggtggtagagcttctagacgcgcatgccagatggctagatatagaagagaaccgtccgcctttgcatctgatcttcatcgaagaacccgaagcacatctgcacgctcagttgcagcaggtgttcattcggaaagttctggacatcctcgatattcccgatgaagatgcaccgcactgcaccagtcagattgttgtttcgacgcattccccgcacgtgctcttcgagcgtggcttccaaccgattcgctatttccgccgcgttcgcgaggccggagttcagcgatcggaagttctcagtatggcttcgttctatgaaacagctaacgacccgaacgaccctactgaccgtacccgggatttcctcgagcgctatctaagactcacgcattgcgatctatttttcgccgatgctgccattctggtagaaggtaacgttgaacgcttgctgatgccgcagatgattgccaaggttgcgcccggccttctgtccacctacgtgagcattctagaagtcggaggagcattcggccatcgattcaaaggtcttatcgagttcctggggctcactaccctgatcgtcaccgacatcgatagtgttgtggcgcctgcggcagccgatccagcagcacccgacgatgaggatgatcccgatgccgatcccgaccttgaagaagcagccgaagatcgagccgcagttcgaggcggacgcaaagcatgcatggtcaatgagcccggagcattgacgtcaaatcaaacgctaatccaatggcttcccgggcgcagcaccatcgccgatttgctcaacgcgaccgtcgaacagcgcattcaagcccgcactgttgctagcgatgcgttgatccgcgtctcatatcagacatcggtgaacgcaagttggcgtgggacaacagcggccatggtcggtcgaacattggaggaagccttcgcgctggagaatctggtctggtgtcaggatgcggcacgcgctgaaatccgcctgcgcgttcgaggctgcaacagattgtcccttgaacagatcgcacaaagtctgcatcgcaaaatcaagagcgcgaatttccgcaagaccgactttgcattggcgcttctctcacaggacccatccgcgtggacggtgccagcctacatctctgaaggtcttctctggctcgagcatgaggtggttccacatcctcccgaaatcgcgcctcctccgatcaacgcaggagcagtagcatga

SEQ ID NO: 75495 - DNA, 1896 bp, Burkholderia pseudomallei 7894
atgacactccgtgctagccaacctgatacaccggcagatctggaactgagagcgtgtctggatgaacgtcctcaacgaagctttgtcatggtcgcaggagctggatcaggaaagacgacgtcgctcgtcaaagccctcactcatcttgcgcagacacggcgacgcgaactcaagatgcgcggtcagcggattgcgtgcattacatacaccgaggttgcgaccaaggaaattagcggagatgtcggagatgacgggttattccatgtctcgaccatacatagctttatgtggtcggttgtacgcccgttccaaatcgatctcaagacgtgggtgatctcgcgcattcacgaacagatcgctgaggcgcgagaacactacaacagaccgcgcacacgccccgccactcggcaacgtttggagagagaaattgctcgccatgagcgccacctagaagaggtaacacaccgaacgcacttttcgtatggggcgggacgcgacttcgcgcgaggtgtcttgggccatccagacgtcattgcggttgcggtggaattaatcgagcaaagccagctactacgcgacctcatcgccagtcactatccggttctctttgtcgacgagagccaagatacccgtgcggatgttgtggccgcatttcgcctcatcgccgaaactactcctcttgagttttgcctaggcttctttggcgacccaatgcagaagatctatgccgatggtgctggcgcgatagatgcccctgctacgtggagccaaatcaccaagccggagaacttccggtgcccgcaacaagtactcaggatagtgaatgcaatccgcagagccggcgatggattggagcagacgcgcggcaggatgatgcgcgttgacgatgttttgatcccagtcgccgggactgcgagattgttcctactgctggcagatgagcgtcggtcggcgaagctatcaagggttcgcgaatggctccgacggacgaacaatgatgagctctgggttagcgaggatcgcgccgcagacgttcgaacattggttgtcgttcatcgtatggccgcgtcgcgcctaaactttcccaacttgtatgcggccttgaacgacaactctccgcagaatttcaaagagggtttgaaagatggcagtgcgtggccactccgtccattcttgacatacctgctaccgctagcaatggctgtccgagatcgccgcgactttgacgcaatgacgttgttgcgttcgcagtgtttgctgttgagctcggtgggtctggctggcaatgatgcgcccgaagtactaagaaatctacgagcggccaccgagggccttacaacgctcatgcactcaaacgatgcgacgctcaggaccgcgctgattttcgcatctaacacggggttgctgcagcttgacgaggcctggtccaagtatcttgatgacgatgctgaggcccttgctgccgatgacgatcccgaagtgccttccatcatcgccttcctgaactgccaagttagcgagctgaggggatatcgtcactacctcgaggacctttccccatttgccactcagcagggtgtcaagggcgctgaattcgaacgtgtccttgtgttgatcgacgacgacgaaggaaggggccagcgtctcttctcatacgaaaaatacttcaacattgctccgctctcggagacggatcaagagaacatcgatgcaggcgacgacaacgtgatcgatcggaccagacgcctcttttatgtctgctgttcacgcgcgaaacgggatctggcggttgtaatgttcgttggcgatctcgcggccgcccgagggaagatagaggaaagcgggatttttatgccggacgacatcgttgatgaggccgccctggaactcgactga

SEQ ID NO: 75496 - DNA, 1785 bp, Burkholderia pseudomallei; identical to SEQ ID NO: 71756

SEQ ID NO: 75497 - DNA, 1800 bp, Burkholderia pseudomallei; identical to SEQ ID NO: 71757

SEQ ID NO: 75498 - DNA, 2352 bp, Burkholderia pseudomallei PB08298010
atgcacattgacaccgtttggatccgaaacttccggcgtcttaaagacgcccgcatagacctagcatcagatatttctatctttgttgggtcaaacaatagtggcaaaacttcagctgggcatgctcttcaacttttcactgcggcgtcgagagaccgattttcgctgcatgacttcagttcggactgttgggacgatataaacgccttcggtgaaggagcggaaggctcagagttgccaagcatctcgatcgacatctggctgcgcgtgggcgccattgatttgcaccgcgtcgtggacctcttgccgagcctgacatgggaaggaacccgtgtcggaattcgcgtcgagttcgctgcaatcgatgcaccagcgctaagaacgagtttccaggaagctcgaaatcgtgccaggcgtgcgccggcgcccccgaatcaggcaaacgcgctacagcaagtggttccgtgcccccaggcagccgaagcggtcccagaacaacggcaagccaatggtgagtacctgccacaacctcgcacactctgcgactatttagctgacagcattggcgaccatttaaggcgtagttttgagctacgctattacgttctcgatagcgctcagttcggccccgacttccgccccgctgctggctacacacctttgcgtatgacgcacgacaaaggtcgcggcagccgagagatactgtccagtttgatcaaggtcgatttcctgcatgcacagcggcatctgtcggactctggtggcggagctcgatccgaagatttgtcgcggtgcttgagtcgcttctatgaaagaaacctcgagaaacacgaggaagactatgacgcccaacgcgcactctatcagtcggaggcactgctcaacgaccatctcgaacgtgttttcggcccgacactcgagcggctctcgcatctcggctatccaggcctcaacaatcccaagctgttgatcaagaccgcactgaatcctgcaactattttgagcagccatgatggtgctcgggtgcattacgccgttggaccagaagtaggcatagacacgcagacgacactgccggatcgctacaacggcctggggttcaagaaccttatctatatggtggtagagcttctagacgcgcatgccagatggctagatatagaagagaaccgtccgcctttgcatctgatcttcatcgaagaacccgaagcacatctgcacgctcagttgcagcaggtattcattcggaaggttctggacattctcgatattcccgatgaagatgcaccgcactgcaccactcagattgttgtttcgacacattccccgcacgtgctcttcgagcgcggcttccaaccgattcgctatttccgccgcgttcgcgaggccggagttcagcgatcggaagttctcagtatggcttcgttctatgaaacagctaacgacccgaacgatcctactgaccgtacccgggatttcctcgagcgctatctaagactcacgcattgcgatctatttttcgccgatgctgccattctggtagaaggtaacgttgaacgcttgctgatgccgcagatgattgcgaaggttgcgcccggccttctgtccacctacgtgagcattctagaagtcggaggagcattcggccatcgattcaaaggtcttatcgagttcctggggctcactaccctgatcgtcaccgacatcgatagtgttatggcgcctgcggcagccgatccagtagcccccgacgatgaggatgatcccgatgccgatcccgaccttgaagaagcagccgaagatcgagccgcagttcgaggcggacgcaaagcatgcatggccaatgagcccggagcattgacgtcaaatcaaacgctaatccaatggcttcccgggcgcagcaccatcgccgatttgctcaacgcgactgtcgaacagcgcattcaagcccgcactgttgctagcgatgcgttgatccgcgtctcatatcagacatcggttaacgcaagttggcgtgggacgacagctgccatggtcggtcgaacattggaggaagccttcgcgctcgagaatctggcctggtgtcaggatgcggcacgcgccgaaatccgcctgcgcgttcgaggctgcaacaaattgtcccttgaacagatcgcacaaagtctgcatcgcaaaatcaagagcgcgaatttccgcaagaccgactttgcattggcgcttctctcacaggacccatccgcgtggacggtgccagcctacatctctgaaggtcttctctggctcgagcatgaggtggttccccatcctcccgaaatcgcggctcctccgatcaacgcaggagcagtagcatga

SEQ ID NO: 75499 - DNA, 1896 bp, Burkholderia pseudomallei PB08298010; identical to SEQ ID NO: 71759

SEQ ID NO: 75500 - DNA, 2355 bp, Burkholderia thailandensis 2002721643; identical to SEQ ID NO: 71708

SEQ ID NO: 75501 - DNA, 1920 bp, Burkholderia thailandensis 2002721643; identical to SEQ ID NO: 71709

SEQ ID NO: 75502 - DNA, 1704 bp, Vibrio sp. S512-13
ttggaaataacgtctctttatttaaaaggctttagaaactttagtaacgcactgattaatttcaacaagagcacactagttcttggctctaatgatgtaggcaagagcaacatgcttcatgctctgcgggttatgcttgacaagagcttatcagaagtagatatcgaaccatccgagctagactttcatataggaaatgaaggtattgctgaacaggcagagataatgattacattaagtcagataactgaagatgctgtcttatctatattaaagggaaatgttagtgatgaaggtacaacaatcctaaagtatgtagctcaaagagccgacttaagttataagattttcgtcgggcattctctagaagaactacaagaggtatcaagcaggttctacctcaagtatgtaaatctcaagtatattcagtcacaacgagatctagaacgctttatcagtaaggaaaaaaagcaactgcttcgaattgcccagcaattattaaatgaaaatgatgcaaaaaatgatgaagcattacttgccaatatcagtaatgacctatctgcactgaatactaaaatttcacaattaaaatacgttaaatcagcaactaatgatgtaaacaaagagctgaaaaaactagctcaccaccattcaaactatgaagttcaactcgatactggtgcaattgaagtcaatgacttcatcgacaaacttcaacttggcgcaataactaatggttcaagtgtgatgcttggtggagatggtaggaacaaccaaattcttctggctctttggaaagcgaaaagtattatcgagcacgacacggatcatgaggtcgtgttttacgtcattgaagagccagaggcccatttgcacccacaccaacaaagaaagcttgctagctatctgatggatgaattacctggtcaaactattatttcatctcactctcctcaaatagcggttaacttcaagcctgactcaatcattagactattcagtaaaaatggagcaaccgttgctgccagcaatggttgctctaattgtattgctgaaggctgggaagatatgagctaccgcatgagcatcttgcctgctgaagcctttttctctaacggtgtattcctagttgaaggtccatcagagatccttttctacaatgaactagcagaacagttaaatattgaacttgattatgaaaatctctcaattctctccgttgatggtatttcttttaaagtatacgttagcattttgaatgctttagaaatcccttgggtaatgcgtactgacaatgatatctccaaggtccctcgtaaaaatgagtggcagtatgcaggcatcaatagatgtttagaattagctggctctttaaaatatgctaacagttatatctctctatcacctcaagattccgtagattacggatattggcatttggtttcatcacatacagctgaccaaggaatatttttatccaaagtagatttagaaacagatttaataaatgaactatctcagaaagtgctcgctgctttagaactgactgagaactcaaaagctattgagtaccttcaaaagaaaaaagcacttcgtatgcgagaactcttaagaaatcttaagacaagcttaagcctattgaattcaggggacttagcaaagccattacataaactgttagcgataagtaaggcagtatcatga

SEQ ID NO: 75503 - DNA, 1623 bp, Vibrio sp. S512-13
atgagcggctttcaacctacaccacaacagcaagttgctatcgattttgatggtagcatggtcattactgcatgtcctggtagtggcaaaactactgttatgacggaaaaaattcggaaggttactccttgcttaccagaccacaaaggcgtaattgcgattacatttaccaagaaggcaagccaagaattaaagcaacggtgcaaacataatgcatatgacatgaaacaaagcttttttggaactattgatagtttctgcttaaaggaactaatcctaccttttgtttctagactatggggaggacaacctctggaatgtaaagtcattaagcgccttcaagagccttactcgctatttctgaataaacaatatcggtccccaacggcagataacatattaaatgatgatggtttcaaacgcctttatgaatctggttttctttggatgaactcattttcagctcttgcactacacgttttaaatcaatcaatagcagcgcaacgctacataaaagctaagtactctcatgtttttatcgatgagtatcaagactcctcagaagcacaacatcagctattcatgaagttatttgaacttggactcacggctactgctgttggcgatacatcacagtcagtatatgaatttcgaggcggtaaccctgacctgttaaatagcctagtatatgataaaaacaattttgaacattatgaaattaacattaatcatagatgtcacccttctattgttaactacgcatctagactactcaaccctaattttcagttagtccaatgcgagcaaatgtacatattcagaagaaccattactggaaatcttacaaatgcagctcaagaaataaccggttggatatcagattggatttctaaaaatgagtggggaataactaagccatctgatattgcaattcttgcaaaacaggaaagatctctccgcttattaacacatggtttaaatatcgattacagaatctattcagataaccctcttgatgaaataggctctgattgctcagatttttactcgcacctattagcatttaaatatggcgcaatacctaacattcaagagctcattgataatcaatttgatctatttatcacagaagataaaaacttatattcgattaggagagcggtcaaagcgattcgtgaaatagaccaggttgagaaacttgttataaaatttcatgagctagcttctctagtaggaattgatgatactgagacgtcagataatgctgtacgagaaattcttcagaaacaagaactcataaagcagtttaccccattgaatgacagtgaaattcaagttatgactttacataagtctaaagggctggaattcaaagttgtatttcattttgatctagaagaatggtcacttccattccaacaggttgaaaataatgattgggataatccaatttatcctagcttaaggcaagatataaacttacattatgtaggcattacacgtgcagagaactgctgcattctgatcaatgtgacacaaagacaaaatagaaacggggggtttagtcagtcgaatccatcctattttcttaggctacctcaactcgaagggctatatgcttag

SEQ ID NO: 75504 - DNA, 1584 bp, Listeria monocytogenes; identical to SEQ ID NO: 73566

SEQ ID NO: 75505 - DNA, 2142 bp, Listeria monocytogenes; identical to SEQ ID NO: 74665

SEQ ID NO: 75506 - DNA, 1584 bp, Listeria monocytogenes; identical to SEQ ID NO: 73566

SEQ ID NO: 75507 - DNA, 2142 bp, Listeria monocytogenes; identical to SEQ ID NO: 74665

SEQ ID NO: 75508 - DNA, 1704 bp, Vibrio sp. S457-15; identical to SEQ ID NO: 75502

SEQ ID NO: 75509 - DNA, 1623 bp, Vibrio sp. S457-15; identical to SEQ ID NO: 75503

SEQ ID NO: 75510 - DNA, 1953 bp, Vibrio parahaemolyticus
gtgcatatcgagagaataaatctacagaactttagaagcttcggaccagaggggcagaacataactgtcgaaccggatctaaccaccttggttggagcaaatggtgcagggaaaacggtcttgatgcaggccttacagcgaatgttcggcatttccaatgaacagcggacgattcgccgtcaggattttcatatcccctcttcggaagaaaatatccctagtaagcggactctaacgcttgaagccattgtcgcctttcctgaactggatgatgaagacggagaccactccgtgatacctgacttctttcaccatatgagcgtgactgatgaggacggcaagctgaaatgccgtttgcgtttggacgcggaatgggaagatgatggttcaatagatgggtacattacgagccagtttcgcgcggttacgacatggggtgagccagaggatgctgattttcacaatgtgcgcccagcggatcgctctcgaatccaattaatttacgtacctgccacacgatgtgcagtttcccaggtatcagcctttctgaaaggtcggctttggaaagctattaactggtcagaacaagttcggtcaacttttactcaaaaggcaacagagctgaatgaatcctttgagggtgaaaatgcgattagtaccgtgactggaaagctcacagaccgctggcaagagctgcattctgctggaactgatagtacaccgaagtttcgtccggtcgacctacgttttgaagaatttgttcgtaaggtagaggtactgctgcaccctgatgaaagtggtcgcgatcggagcattgaggagctaagtgatggccaaagttcgttgtttcacatcgccatgacttcggccactcttgatgttgaaaccgagatcttagcccaaccagagagtgaagattttctcggtacagacttgcccttgccctcgttgactattttggcacttgaagagccggagaataacctagccccatactatctatctcgaatcataagccaaatcagcagcctagtgcatggcttaagagcacaagcagtactatctagccattcgccgagcattctcgccagaatccaaccaacgcaagtaaggcacttcaggttagcaacagaatcaaacaccactgttgttcgtcaactgactttacccgatgaagagaatgaagccgcaaagtacatccagcaagcggtgagagcctatccagagttgtatttcgctaaggtcgtggttctcggagaaggggcttctgaggaggtaattcttccttcgatatcagaggctatgggcataccaattgataaatcctttgtcgccatggttccattagggggccgccatgtaaaccacatgtggcgtttgctaacagatttacagatcccctttatcacattacttgatctggattgggggcggcacggcggtggttggggaaggattaagaatgcagtcgccaagttgatagagtatggggtcgacccaagtaagatatttggacattacctcaacccgttaggatatcagcataacctcactgcatttgatacctattcggttgctgatttgaccaacattagctcttggaccaacgctctcaggcactacggtgtttacttttcaagcccattagacattgattattcgatgttgaaagcatttcctgaccaatatcgagttgccccagatgaaagttctaatggaccatctatgcgtggcgaaccaggtaatgcggttatgggtgatgaaggaaacccagaattctattcaggtgacgaacttgacttacgttggtacagatacctgtttttaggtagaggtaaaccaagtacacacatccgagtgcttgggactattccgccagctcagttagcccagaacgcaccagaagaactgcgagctttagttcagtctattcacgcaactcttcaaagctag

SEQ ID NO: 75511 - DNA, 1896 bp, Vibrio parahaemolyticus
gtgaagtttattcaacccgaacattggcagcccaaagggatcgaaaatcttgagccaaatgcttggcaagcactaaggcgacgagaatccacaagcgtcatcgctggacctggagcgggaaagacagagtttttagcgcaaaaggctgcatatctgcttgagacaggcctatgcccaacaaacaagaaaattctagccatatcattcaagaccgacgctgcaaaaaatctcgcagatagggtggaagaacggtgtccagaagagctaggtagtagatttgtttcgatgaccttcgacgctttttctaaaaatatagttgaccgttttcgtatggcgttgccaccacagtggagaccaacaaaaccatatgatgtcacttttgcaactcgccagcagataaccagttttttaggtcgagagcggcaaaaaaatagtcatatctccggattgttgaatgctatagccagaataaacccaataacttttgagtctacatttgttggctcaaggagacttggtctagcttcgaacgacataggggagcggactctttatgataattggttagccgaacaagtaagttgcggagatgaagtgccatcaaagctgacatttatgacaataaatcggctggctgaatatataattcgtaccaatgaccatgtgcgacgagctctgagagcaacgtatccatatgtctttgtggatgaattccaagatacgacttatggtcagtatgatttcctgttgtcagccttcggttatagtgaaacaacagtaacggttgtgggggattataagcagaggatcatgggttgggccggagcccgaggtgatgcgtttcatcagtttgaggccgatttttcggcacaacgatatccgctgttgcttaatcaccgctcttctcctgaactggtcaggatacaacatgttattgcacaagctattgaccatgaggtgagagaggttcaaacaagtaaccatagtcaggtatctggtgatgcagcttggatttgttttagccgtaacgtagatcatgaggccagttacttggcgcagtggattgcgaatgacatgcgaagcaggtcattgaatccaagggactattccgttctggtgcgtcaaagacctgaagattacgaagagcagttatcttcatatttaactcagtatgggcttcgcttgcgaaatgaaagtgtgaaaataggtaaaactactcttcaggacttacttgctgaggagctgactattttgttttctaatcttctaaggctgggacttgggcatcgaaatgcgcaagtttggaatcaattatcagcagatgtacaactgcttcgtaacacaaccccagaagatgaaaaagcactgagacaggttgaacgccgattagcattatttatttctgaactcaaggagttgatgcgacaatcgcttacaccagacaatgctcgcctcgtatttgaacgaattattgcctttattgatttgaatgatcttcggaaaacatttgctcgttacgcgactggagatctacttgaaataaacctagcagcacttgaagagttttttacaaactgtgttgatacccagagttcctggggaaatttcctggaagaatttgaaggtaaaaatcagattccgctaatgactattcataaaagcaaggggctggaattcgatacaactattttcatggggatcgatgataatgcttggtggtcctatcgacctggcgattccgaagggttatcgacattttttgtagcactgtctcgtgcgaaacaaagggcgatattttcctattgtcagcagagaggacaaagaaccaaggtcgcagatttttatgcgttgttgacgactgctggtgtacaggagtatgtgatcccacctagctaa

SEQ ID NO: 75512 - DNA, 1584 bp, Listeria monocytogenes; identical to SEQ ID NO: 73566

SEQ ID NO: 75513 - DNA, 2142 bp, Listeria monocytogenes; identical to SEQ ID NO: 74665

SEQ ID NO: 75514 - DNA, 1584 bp, Listeria innocua
atgaatcatattaaaagaatgcatatcaaaggattgaaaaaatttaaggacattgacattgagtttaacgagaagataaatattttagtgggtgaaaatgaaagcgggaaaagtactatactagaggctattaatatagtgttgaatcaacaatatagaagtatagataagtatatattaaaagatttgatgaatataaattctatgaaagactttcataaaaatccacaagtaaataatttgcctagcattacaatagaaatagaactagaattggataaccaagcgaatgtcgatactatttattttcgtggtataaatgataaagataagggacaatttgaaaagtttgggatattatttgaatgtgaatttgataaggaattcgaagatgaattacgaagcgaaatcgaagatggtgtgattccgtttgaatactataaactaacttggagcacattccagggcagttcctataacattatgaaaaagccattgcgtactatttcgattgataactcaattacagactccaatagctcatttaattactttaataagtcgttgtttgataataaatactctagctcagataaaatgaaagcaagaaatagttttagaaatgaagtagatttaatttttaatgctttaaatttggaagggctagggaataatcgccagtttggtattaatagtaaaaagacaattttggataatgttcttacggtatatgaagaatcaatttctcttgaaaataaagggaaaggcatggaaaatctgataaagacagaaattgcattaaataaatcgaaaaataagctagatgttgtattgttggaggagccagaaaatcatctttgtcattctaatcttttgaaaatgttagatgaaattaaaaagaatactaatgaggcacaattgatattaactacacatagcaacatgattgcaagcagactggacttaagaaatattctttggattggttctgatgaagctatcagtttaaataaaattgatcaagaagatgctattttctttgaaaaagccgatcaaaacggaatcctaaaccttcttttatcaaaaaaagtgattttggtagaaggaccaactgaatatatgttattaccgattatgtataaaaaaataataggtaggtcgatggaagaagattttataactgtaatttcatgcaatggtatagcttataaaagatacttagcaattgcagagtctgctaagaaaaaagtggcggttataactgataatgacggtaaacagaacgtcatagattcaaaggaagaatacaataaagataaagttttacaaagaatatttactgacgataatctatctaattggacatgggaagtctgtatgtatgagttgaatacaaattactttgaagaacacgttattgtgaataatacttcagcgtatctatttaatcaaaaggactatggtaaagtactaggaaagatgttaaataataaggcagagatagcctattcagttctaaaagatgttgatgatttgaaaatccctgaatatgtagaaggagcttttatatggataaacgaataa

SEQ ID NO: 75515 - DNA, 2133 bp, Listeria innocua
attagtaatacaaacaattttgcttcagatgttgtgaggatggaagatgaagatgctaatatttttcatcatttagtaagtttaaatggaggtaacgaatttaacaaagagcaagtaaatgctattcgatttgatatgagaacacatcttaggattatcgctggtgctggaagtggaaaaacgcaaacaatttgtgcaaaggcagcttatttagttttgaaagaaaaaattcaagaacgaaatatagtgatgtgcacattctctaaaaaagcaagccaagaaatgaaggaacgtgtcaacgagtttcttggtggcaatagtcgaatagaagtattgactttccatggatggtttcaaaaagagtacaatgtacttattaaaaaatatccgtatctagaaaagtatgggatagcgggagaggtacccggaaaaggctctggaaaagatagccatgataggattttaatgaatttaattaagcagtatcatttatataattttgataaatatgaagaaaaaccaattaatgaacgacttagttattggcgaaatatgggatataatgatgaggtaattgttgcttttatagcaagacattttgatgacaaagaaatattaaaggatcaactacttagtgaagttttttcagagatgttaaaagaattggaacgaattaagagaagagagaaagtcattaattttgatgatatgttgattaatttaaagtgtgtattggagaacgactcaaatgctctttctttaatacaaactcgatatcaatatatatttattgatgagtttcaggatatcaatcccttgcaaaaacagataattgaacttatttgtccaccagattacgagaagagtgttatcaattctgctaaattaattattgtaggagacgatgatcaaagtatttatttcttccgtggtgctgaaccacgttacattaaagaatttgatagacaatacaggcaaacgtcaatagagttaatgactaactatcgttctattgctcctgtggtacatataggaaatactctaatatcaaacaatcaacatgatagaataaagaagtctatgatacctcacaaattaaatgtaggggattgttatgcaaatgtttttcaaaatgaacaacaagaagctagctggatagcaatgcagatattaagcttatcatcagacgagaaaccattccaagatcaaattggtaaaccgaattatacggaaacaatcgtattataccctaataaaaatcaattaaaatctatgattattgctttacaggaaaaaggaattccctttgttacaaaatcggatgatgatttacttggtatatttggtattaatttcttcaaacaatcatttaatctattaatggatattattgatgcagaaacgatagaaataaaaaagcatttatacaagcaactcataaaaaatatttgtttatattattatataccatttgcaaaaagtacaaatttagtttcagatgagaccaactatacttcggaaaagttaactgattttatatccaacgaaaaaaatattagcaaagaagagatggcagttattaaatcaatattccaagatattaatgagtttacaaaaacagaagaattggatattaaggcttttgttaattggcttgtaaaaactccaaaagtaaagaaagaattaattgatgaagaaaaagattggttgcttaaagaggttagcaatgttaaaacgctaaaagagttaatacttaaatataaagcagcgagaaccttaaaagaagagatggctgataaattaagagagtatgataataataactataatgcagtgtatctattaacgattcattcaagtaagggattaggatataaaaatgtttttgtaaaaggtatttataaaaactcactaccagactatcgctcagtggataaagaaagtattgaacttcagccgttaattgaacaagcatctccaccaacaacaatggaagagcaaagaagattgatgtatgtagcgctaactcgagcaaaagaaaatctttatgtaacttatcctagagaagtaaacgagaagcctacgcttgtatcaccatttataaaagagtctaatattatgtttagggtgtaa

SEQ ID NO: 75516 - DNA, 2307 bp, Vibrio parahaemolyticus
atgccagacatcccccgtgaaactgaagtatccaaaggtattaagcttcgatttgtcgaacttagtaatttccgtcggctaggcaaagttcagatgaacattgatcaaaaaaccacaattttggttggggcgaataatagtggaaagacttctattcttgcggcgctacgacatttcctaacagaaggtgcccgctttagtgcttttgacatcagtatatctcattggtcaaagctgcgagccattggcaaagtgtgggaagagctgaccgaagaccctttaactgttaccgaaccagaagaaaagtggaaagatcagctccagatactgctagaaaccatgccagtcttggatctctggtttgatgcagatgttggaatgtatcactatgttgctccatttctatccaaatttagctggaaaggtggcgcagtcggtgttcgccttcgactggagccagtaacaaacattgaagagctcaagcaattagcatgggcttaccgcactgttcgtttaccagttaaagatatgggggaagattcattagcgtggcctatagacctgcttgatttttggctacgtgagccattgaagctcgggcacgttcgtgcatacaaattagataccgataacaaccctattacaggattggtaccctatgagactcagaaacttgatgttcatacaagtccaattgaccgaaagcacttatcgagattgatacgtgttgatttcatctcagctcagcgtggattaggaagtgaagaatccgagtcccgtccctcctccggtcttcaccgagtaggtatgttttcaaaccagctaatcaagtttgctcaacaacacttaaacgttgctagctctggacatagccagcgtgtagaccttgttaaggccgtggcacttgctcagaaagacttagatagtaagattcacgaagccatcgccgattcggttaaggaagtgaaagaacttggctatcctgggctgcatgatccccaagagattcgcttccgcactcgaatccagactgctgaccttctcgatcacagtacagctgtacagtacagtatgcagaaggattcaatagaggaactcttaccagaatattctattggacttggttaccagaatctgcaatctctcagttaccaactagtttcgtttagagcagctcggcttaaacctgaaaaaggttctcctgtacccgtacatatagtaatgattgaggagcctgaagctcacctccatgttcaggtgcagcgtatattcccaaacaaagcacataaactaatcagcccgacagagaaagaaacttcaagcctaaatagtcaattgcttataagcacccattcaagtcatctagctcattcggagaattttgaccggctcagatatgttcgtcgtgtagcgaagagcaatgcgaccccaatgccgacgacagaagttgtccacctagccgacgtctttggtgatgataaaaaaacacgccagtttgcggagcgctacttccgcgttcaacatacggacttgttgtttgctaacgcagctatttttgttgaaggtgtagcagaacgaatgttggtaccacttttcatagagcgttatttcaaggaactgaacagtcgctacgtttcctttgttgatattggtgggagccacgcccaccgactcaaacctctcatcgaaaagctccggatccctacagtaataattacagatatcgatccttgtgaagaacgggaaggcaagcctaagagaagtggcgaaccaacgaagaaactagttgctgttgcaaacaccggacaatcagggcttcaatctggtaacccgaccttaaggtgctggcatccgaaattgcaacaacttgacgatttcaaaactccgacaaaagagcagttggtttggaatgaaatccaagattgccatgtatatttcgcttggcagttacctatcgatagtgctaataactgttggcctagcacatttgaagattcactggttcttacgaatatctcttggtttaaggggttgatggatgagaaattcgatgaaaatggagaggagattgaagtgcctaaaggggctcttggctctgtttcaaaaagggttgttgaagcccaaaatcatgaccagctactgagcgaccttcacactctgatgcacggctcttttaataaaggcgacttctctgccagcatctttgaattagtatcttcaggcaaggatattgaatgcccgaggtacattgccgacgcattaacttggttacagaagcaacttgagccacgcggattgatggaatga

SEQ ID NO: 75517 - DNA, 1956 bp, Vibrio parahaemolyticus
atgagcaaaaaaaatatcattacggataacgacagagatgcaggcgtagtcgaagaaatttgcggctaccttactgaggttcctcctcgcaactactttcttttcgctggggcaggttcagggaagacgcgaactcttgtggaggtcttgcgtcggatgactggagtagtagcacacgaaaaaggggatctgcttgccagaagcctacatacgtacgggcgctcaatacgagtaatcacatacacgaaaaatgctgtttcggtcattaacgggcgcctaggggataatgacctagtaaatgtatctaccatacacgcattttgctgggagctcatcagtggatttaacgatgatatcagagcggctctaattgcaatcaaagaagctcagcttgaaaaggaaattgaggaagcgcgtgcaaagccaaggggcattactcctgccaaacaacgggatttggataagataagaaaagatatcgagggatttagaaataccgatctatttatctaccacccggatcgtatgacatatggtccgggagcgcttgcccataatcatgtacttgacgtgacagcatggcttttaaaaaaccgacctaccctagcgagaatcctaaaagatcgacatcccattgtactaattgatgagtctcaggacacaatgaaaggtatgctggatgccttaatagctattgcagaatctagaggatgtggcctaactataggactgataggtgatcaccgccaacgtatctatatggatggacatgacgatcttccgagtttagttcctgatagctgggcgaagccagagctgaaaatgaatcatcgtagccagcgtagaattgttgatctaattaatacaatttgggaagcgaagctaaaaggacgaactcaacctgctaatggaataaggcagcattcaagaaccgagaaagctgacggttttgtgcgaatttacataggtgacacaaggctctctcccgaagataaagctctcagtgagctttggtgtgcagatcggatgtggagcgcaagtggtgttgaggcttggtcaaaaagagactttcagctgctcgctcttgagcataagcttgttgctacacgtggagcttttcttgatgtgtttagtgctatggttttacttgacccaaatgcagccgcacccagtggcagtggcgagaataaaggtccggctgttgtgcaaactttattgaatgaacttaccgatttagagggatgtataaattccgatgggacaattgatgagtttaaagttactgaggtttttaggcgctatgactgtcttgaaaggatacctgaagatacagccgcacgagcaatgcgtgtcgaagaaatacttgccgcaattgaaactttcgccatagcttgtgcaaatccccttgcgaccgtgggagatgtgctcgaaccaatcttaagtgccaaattgtttaattttgataatcgcttagcggcagagtatgtggacaaatcacctccaccttctgcgccagctagaggtgaagaggagtccatacaagataggttgcgtcgcggattgtgtgcactattttcagccccttggaatcaattaaaaaaataccgcagctatttatctggcaattcaattttagctactcaccaagttgttaaaggttcagaatttccacatgtgatggtggttatggatgataaattggctggaggtacccttttttgttacgacaaggttttcggtggcgttgaactaagcaaaaaagataatgaaaacagagaaaaaggcaaagaaacaaccattgatcgaacactacgtttactttacgtaacgtgcagtagagctgaagactctcttgctctagtgctttggtcatcaaatccaacagcagccctagaacgagtaaagaatagtggttggtttttgggcaaagaagttgaggtgataccacctccttag

SEQ ID NO: 75518 - DNA, 1584 bp, Listeria monocytogenes; identical to SEQ ID NO: 73566

SEQ ID NO: 75519 - DNA, 2142 bp, Listeria monocytogenes; identical to SEQ ID NO: 74665

SEQ ID NO: 75520 - DNA, 1824 bp, Martelella endophytica
atgtatctgtcgcgaatcaggattgagaatttccgcaacttccgcgaccttgatgtcgcgcttggcggtaacattgtcattgtcggcgaaaaccgcgtcggaaagagcaatttgctctttggcctgcgccttgtcttcgacccctcactgcccgatagcggccgacagctcggcctcgcggacttctgggacgggttggaggagattaccgctgatacgaccataaccatttcggtagagatcaaggattttgaggacgacctcgacgtcttggcggtgctgaccgactatcgactcaatagcgatccgaacaccgtctgccttacttatcaattgcgtgctcagcctggccttggtcatgcccccgctagtgacgatgatttctcatttgtctgcttcggtggcgaggatgaagctaagcgcttcggtcatgatcttcggcgccgcatcacgatggacttactgcaggcccttcgggatgcggagggcgatcttgctgcttggcgccgatccccccttcgtcctctcgtcgaagatgcattcatcggaatcgacaaggatgctctcaaagaaattggagagaagattgcaggggccagtgccgcggcgatcgatttcgatgaggtgaagacgctcgaagtcaacatctcagagctatttttggcaatggccggctcgaagcaggatgtgcatccatcacttggcttcagctcgaccgacgccacgcgcatcaaccggcagattcggctgctgatagatgaagggcgacgtggcatcgccgacgccagtctcggctcggcaaacctcatctttctcacgctcaaactgcttgatctgcagcgcttgatcactgccaacaagcgcgatcactcgttgctcgcgatcgaggagccggaggcgcacctgcatccgcatcttcaacgcctagtttacaagcatctctttgagactatcgtcgatggcggagacggcgttgatgctgacaacgacgaagatgccgctggtccgctttcggttattctgaccacccactcgccgcatattgcaagtgttgccccgttggaatcgctcctactcttgcgagcttccttaaacgagggaacggtgggatattcgaccgctgcagcggacttcaccaaagccgaaaccgaagatctccagcgatatctggatgtcactcgtgcagagatggtcttcgcgcgcggtgtcatcctcgtcgaaggcgaagcagagcggtttctgatcccagcatttgccgagggtatgggcatctcgctcgatgagcatggggtgtcggtgtgctctgtcgccgggacgaactttcagccgtatgtcaagctgctctgcgctttgggcatcccattctccgtgatcaccgattatgacgaagtggacgagatgccacgcgccaacaatcgggcgctcaagctcattcggatcatcgacgaagccgctgaggagggtgacactgacgcagtaatcaaagccatcgaggacaagggaacatggaaggagacatttgcggaaatcgagaagttcggcatcttcgtgaacgggagtacgcttgagaccgagctgttcgagggggactatgctcaggagatgatcgacaccctccgtgagcagaaattcggcgccggacgcaaggcattccttgatgcatgggaagcgcagccagaggatttcgacgctgatgaactgctgaagatgatcgagcaaatgggcaaggggcggttcgcgcaaagactagcgacgcgttcggccggcaagcccgtgcccgactatattaaagatgcgattaatcatgtcatccgtctcgtctaa

SEQ ID NO: 75521 - DNA, 1797 bp, Martelella endophytica
atgtcatccgtctcgtctaacagggcactttttcttaaggcggcagaggatctgcgttctaatgacaagcagtggcaggcctatgaagctgcggggcattgcgtgttgctggctgggccaggcagcggcaaaaccaagacgctgacggtcaaacttgccagaatgcttagcgaagatgtggacgagccacgcggtattgcctgtatcacctacaataacgaatgtgcacgggagcttgaaagccgcttggaaacgctaggcatcgcacccggcggacgcgtttttatcggaaccgttcactcattctcactcacacaaattctgctaccctacgctaaagtggccggactgggcctacccgatgaattcaaagtggcgactcggcaggaggctcgagccgcattggcggccgctcatgcgcaggtaataggtggaccggagaacccgcagaactgggacatgcggctcggccgtcatcgtcgccgcttcctcaatcgcgagctgccggagtggagaacgctcgatcccgagcttaccgaactggtcgaggcgtacgaagccgaacttcgcgcacgccgactgatagattttgacgacatgccgctcctcgcagtgcgtgcgcttgccgccaatgagtggcttagaacggcgatggtggcgaaatatccgatcctagctgtagacgagtatcaagacttgggccgtgcgttgcacggtatggtcatgggcctctgcttcagcgcgggcatgcggttgttcgcggtcggcgatatcgaccagtccatctatggctttaccggcgcaacgccagagttgctgcgacgactgtccgagcgcgatgacgtcgaaacggtgcgactaggtctcaactatcgctgcggctcgcggattgtcagcgcgtccgaatacgcgctcggagagaaccgaggctataaggcgcccgacggtgcccatgagggaacgatatatttccatccctgcacaggcggccatgccgggcacgcacgatatctcgtcgaggaactgatctctgagatccgcgagcgtcgacccggcaccaatcttggcgagatcgccgtactgtatcctgcggcattcctcggtgacgaagtcgccaacgcggctgcaaagcatggctattccgtaatccgaaccgatggcaacgcgctttatccgcgcggcagcaggttgatgcgatggctggagcaatgcgcaatgtggtgctgcggggggtggcgatctgggaggccccggctgtctcgtgtagtaagcgaaggagccaggctattccacgaaactataatcgatgaggatgagcggctcacctttcaacgtgacgtcaccgctgcgttatgggatcggcgggacgaaacgctcagcctctccgattggctggcagctctgcgtgatgaaatcattcgtccccgggtcgatctcgcccgatcactcgctgatgaacttggcatcctaaacgacttcctcaatcgtatcggtccagacggcgatgtcgatgattttccgctgggtgagtttgcgggaattgggagcggccttgatcgtctcaatctttcgacactgcacagtgccaaggggcgcgaattcgatgtggtaattctgttcggcgtggatgaaggccgattgccgcgcaacaatgctacggagaacgacgtccgtgaggctcgacgcctcttctatgtcggcttcacgcgtgcgcggcatgagattcatcttgtgtatgcccagcacaacccgtcgcgcttcgtgacagaagtccaggagcgcctcgaaggtgaatga

SEQ ID NO: 75522 - DNA, 2115 bp, Paenibacillus beijingensis
atgtatatttcgagtcttaaattaaggaacttccgaaattttcaaaaagctaattttaaatttaatgaaggtgttaacacaataattggtgctaatggtacaggaaaaacaaacgcattgtacgccattcgtttattgatagatgaaaacctcccaagatcatccgtaaacttaagtgagacagattttaaccgtggacttactagatggcaggggcattggattattatcagtctacatttcggtggcttatcagacgatgattcttctcaagcactaatataccagggaactcattctgattcagaaaaaggctccttaacattgttctttagacccaagtatgaggtgcgaaaaagattatttgaactaagtgatccgagtaatccacagcgaatgcaagcaatacaaactttcctggaaaccataaagatcaacctatacgaggctgttctatatggtcgtggtaatgggaatatttgtgacgattttatttatacgagtattgtaggggattttgtaggtgggatgttcccggatcctgatcttgacgacagcagtgttctaggcactttggcaaatcagtatgtattcaagaatgattttgcatgcacctacgctaaggcactgcgtgacgttataggtgatttgaagaatacgcggaaatcgcctttactaagattactacaaaatcttaatattaatgagtcgacttctgaaacagtaagtaatacaattaaagacctcaattctcatataaccaatctacaagaaataagagagttagcaacaggcgtaactcaatcgttacacaagaccgtcgggcacacatatgctccacgtatcgagatcaattccaatttatcagacgattttaatcaaacattgcgagctttaaccattcgtgccagcgaggtatcaggtgaagcatacttgggagatctgtatgaattaagtttagggggtgcaaacttactttatctagctttaaagcttgaagaatataataggcttgatcatgctagaaataaggcagcacatttcctattgattgaggaaccggaagcacatctacataatcatattcaaaaaacattgtttcaaaaatatcacaaccacgaaaatacacaaattattttgaccactcattcaagccatatttcgtcttcatgtgcgcttaatgcagttaacatcttatacattgacaatatcagcagtgaagtagcccagccgagtactggtatgtcacctggagagataacaaaaattgagcgttatttagacgcaacgagatctacacttttgtttgcacgttcagtcatcttagttgaaggtgatgctgaaatgattataatccctgaattggtgaagaaggtcttggggatcacgttagatgagataggagttagtctcattaatgttggcagcacacaattcacaaatatcgcaaatcttttttcaactgatagaattaagagaagatgtgcaataataactgataatgatctatctattgtacctgtagaaacaggtgcttacgacgatgtggaataccaaaagaaatgtatagactcacaaacatctggtgaggcacgaaaagtaaaactcgattcttattgcaacgataacgagttcgttacagcattttatgcagaaaacacatttgaggttgaatttattaaacacggtaacaaatcatatgtaatagacgtaatctgcaacgaaatttatagcagaaagcatgatcaaatcagttctatcgaaaagatcaatagtttagaacttagcgtatttgggaaagagattttacggttggctgaaaaagaaggaaagggatggttggcattagcaatatcatctagactcgataaacatgccttcataccggactatatccttgatgctctgtgttttgtatcaggactccgtagtaatcacctaatatcaatgatcaaacacaatttagaaagtgaatatgagaactttatccatactgtaaatcatgcgttcaatggagatccaacagataatgatattattgaatctttttgttccttacacccagaaacggtaataacaacactaataaaaaagcgaggtgagaattctgattga

SEQ ID NO: 75523 - DNA, 1758 bp, Paenibacillus beijingensis
attctgattgaatttttaaatagtgagcagagagaaattgttgaatatgaaaataattctcttgttatagcttgtcctggtagtggcaaaacacgaaccctggtagcaaagttaatttatgagggtgcaaagttaaagaaaaatgaaaagattgcagctattacctataccaatctggccgcggacgaaataggactacgtgtaaatgaaaactgttttgatgatagtttttattggggaggtacaatccattctctttgtacaaattggatactaaaacctttctctttatttattgatgagttacgatttggatacaaattgattgatgaagatgatgcaatggaaatattagacgagataaagcagaagcataactttcgagaaaatgtgaacactcgtcgtggggcagacggaaacttcgtggaaattactacagggtctgaaggagtgttaaaggagtatgacaatagactaaaggaagctaaactaattgattttgatttggtattattttattcattcaaaattctattagagagaaagtctgtagcgagaaacttatctcaaatatttaaatggatactagtcgacgaataccaagatacgcaggagttacaatacctcataattggtgaaattataaaggcaagaaataatcataccaaaattttatttgtcggggatccgaaccaaggtatttataatacgttaggtggggtcgcaaaaacaaagcatgaactcgaaagttctataggtggttataacattgaagaaaaaagtcttaatggaaattataggaccacacaagaaataatagataagtatagagattttcaattattcggggagaatattattgccagaggtagtaataaaaacaatccctctgaaatatcatttagatcggatatatcggtcgagtctttaccagaacacattctgaaagtcataatggagattcataacaagagagtgccttacagtgaaatagcagtaattgcaccaagatggtttgatttaattaatgttgctagacggataaagcaaatagaaccagatgttcccttaaatgcaatggggctttcacctttgtgtagagacgataataacattttttttcacctatcacgtttattattatcatcgccatctcctgatcaaatattagtacggttgaaatgggcccaaatcctttttgatttacttgttgaacgattaccaaatagttttgagagtagcttcaataataaaagcatattgaaggttattaacagctttaaatcgaacaatcaagttgggatagaattcttgaaagaaggatttaacttcttcggaagtaagattggcgttgactttagtacttctctagtatttaaggatagtcttgaggaatttgagagaaaatgtttgaagaaacaagcgcgaaatggtactggtgattccatttcagtttacaaaagcggctttgcgaaagctggtggtgtttcgttcataagtacttacaaatgcaaaggactagaatatcattcagttatcgcatttgggatgttgtggggttatcttcctcattggaatgaaatatttagttccaatattgatgaaaatgaagtctcaaaaaagctgctctatgtcatttcatcaagagccaaaaataatctttatatgattgcagaaagcgggaggaggactacaagaggcactcctctttttcctaatcgacacttggtagaggttttttcagagcgcagtgtttga

SEQ ID NO: 75524 - DNA, 1563 bp, Xanthomonas citri subsp. citri; identical to SEQ ID NO: 75216

SEQ ID NO: 75525 - DNA, 1797 bp, Xanthomonas citri subsp. citri; identical to SEQ ID NO: 75217

SEQ ID NO: 75526 - DNA, 1563 bp, Xanthomonas citri subsp. citri; identical to SEQ ID NO: 75216

SEQ ID NO: 75527 - DNA, 1797 bp, Xanthomonas citri subsp. citri; identical to SEQ ID NO: 75217

SEQ ID NO: 75528 - DNA, 1563 bp, Xanthomonas citri subsp. citri; identical to SEQ ID NO: 75216

SEQ ID NO: 75529 - DNA, 1797 bp, Xanthomonas citri subsp. citri; identical to SEQ ID NO: 75217

SEQ ID NO: 75530 - DNA, 1563 bp, Xanthomonas citri subsp. citri; identical to SEQ ID NO: 75216

SEQ ID NO: 75531 - DNA, 1797 bp, Xanthomonas citri subsp. citri; identical to SEQ ID NO: 75217

SEQ ID NO: 75532 - DNA, 1563 bp, Xanthomonas citri subsp. citri; identical to SEQ ID NO: 75216

SEQ ID NO: 75533 - DNA, 1797 bp, Xanthomonas citri subsp. citri; identical to SEQ ID NO: 75217

SEQ ID NO: 75534 - DNA, 2046 bp, Paraburkholderia fungorum
atgaaaatcgtttcgcttgaaatcgaaaatttccggggcattcggtcggccaaaattctgctcgacggccacaccctgttgatcggcgcaaacaacgtcggcaaaagcacgatttgcgaggcgttggatctcgtgcttggggccgatcgactaaatcgtcagtcgccaattgatgaattcgacttctacaacgccaaatatatggagcgacaagcggctgacgagccgccaaagctaatcgaaattcgcattgaggcaacgcttgttgagttcggggatgagatcggggatcgatgcggcggacacaccgaattctggcacgtgaaggaaagacgtttgctgggcgctggcgagatcgacctggcaaactctccggaggcggtcaggtgcctaagggtcgtgaccatcgggcgatatgatcccgaagaagatgaatttcgcgccgacacctatttcagccacagcccggagagagcggaaggcgaactcacatccctgccccgacccattaagcgaacttttggttttctctatttgcgaacgctgcggaccggcgcgcgcgccctaagccttgaacgcggctcgctgctggacatcattttgcgcaccaagggggaaggagcgcgggcccaactgtgggaggagacgatcgaacagttgcgcaagctcgatgtcgaatcgagcgcagcggaaattgccccgattctgcgcaaggtggaaaagcgtctcgggcgctacgttgcccttgaaagccctggaagcgcgaccaagcttcacgtctcggacctcacgcgagagcatctgcggaagacgttgtcgttcttcttggctctctcatcggatcagagccacgttccgtttccgcatgctgggacaggaacgatcagcacgctgatcctcgccatgctatccctgattgccgatcttaaaccgtcgacagttatattcgcgatggaggagcctgagattgccgttcctccgcacacgcaacgacgcatcgcgagctacctgatgacgaaaagcacgcaggctttcgtgacatcgcactccccgtttgtgatcgagcaattcgatccatcccaaacgattcttctgtcacgcgacaatgggatcgtgtccggcaaaagagtctccgaagcgacggggctgaaggaaaacgaattcaagcgtttcgcccgctgggggctctcagagtgcatgctcggcaagatcgccatcgtagtggaaggcatcaccgaattccatgcgctacccgtcgtagcgcgccgcatggaggagcatgacgccaaccttcagcctctcgacattgccggagcagccttcttcaatgcggacggcgatggcaacggcccgaaattcggccagttctttaagacactcggccttcgctcagtggcgtttcacgacaccaacccaaagcactctgacgccaaggtcgcggaatacgctcaggcgttcgacattgactataagcacaaggagaaaggttttgagcagttgatggtcaacgaagtcccagccgatcgactctgggattttttgcaggagataaaaggcagcggcgaaagcggcaacgtcggcattccggccgataagcccgacgagaaaaccatccgggacacggccctgaaggcgttcagaagcggcaaaggcgccgggtgggcggcccgccttttcgagatgtgcgcatttgaagaactccctccgactgcgatcgacttcttgaatcaagtctacgatctaagccccacgcgtgaagcgctcgatgctgacgatgaggcggacgccggattcgccggcgcgcaatcgccggagtcgcaagctgtgccgaatccggctcctcctggcgctgagaactcagcgagccaagccaagccctcttgggctgagattctctcgctcgtaaaacctctatctcccgcggaggttgaagagaattccggcgcgcaatcgtctcagccccctcaagcttcccctgcgcaaaaggccgtgcctcctcaaactcccccgccttgggagagcggtttcgacggcgacaaggaatga

SEQ ID NO: 75535 - DNA, 1767 bp, Paraburkholderia fungorum
atgaatcagcctgatctgcggcaggtcgttcttgactgcgagagtcatgcgctcgtgctaggtggccccgggagcggcaaaacgacgatcgcgctgaggaagtcaatcaaacggatcaaggaagggttgcgaccagggcagcgggtgctgtttctcagtttctcgcgcgctgccgttgccagaatcaccggcgccgcgacagtcgaggcaaacgaagaggagcgctcaaagcttctcatccagaccttccactcatttttctgggaagtgctgcgggcaaacgcctatctgctcggcgcgcccaagaagctcaaaatcctgctgccacaagatgaaaaagcgatgtccggggggctcgacaaggacgacgaaggctgggcagagtgggacgccgaacgccaacggctttttcacagcgaggggctgatggcgtttgatctgtttgcccctgcggccgccgatctgatcaggcgcagcgccctgcttcgcgaatccatcgcgagccgctatccactgttcatagttgacgaggcgcaggacaccggattgcatgcatgggaatgcgtgaaactgcttgcgccgctcacgcagattatttgcctcgccgatctcgaccagcaactttttgattatctccctggcgtaggtcccgagaggatcgccgaaatccgcgtcgccttgcagccgcaagagattgatttcggatcggagaaccatcgaagcccaagcacgcagattctcgagtttggcaatgacatcatgttcagtcgcctgcgacccgaacaatatacaggcgtctcttgcatcggatataaccccaccaccgcgaactggaatcaccttctgcgtcgcgccttggcggccatatacaaagcggtcaaagatcacactggcgagcgcgccgaaaccatcgccattcttgtttccaacaaccggacagcgcttcgcctatccaacgcgcttaacgcgctcggaacattcgcggagaaaggcaaagccgtctcgcatcgcctgatgttcgacgaggccgaagcattgctgtgtgcgcgactcgccgcgtttcttctgcaacccaaagtcccagcgcaaatggatagcgacatcgccacagcgatcgaaatgctcgcgagggcaaaatcggctacaggaaaaagccagcaaatcgttatgaagttgcgggagcaggccgtgaagatacgccagggaaagagcctgtccattaacatcgccaaagcgtttcgcgctgtgcttgaagcgctgcgcgcgacaccattttccggcgacccggcgaaagactggacgcgtgtaaaaaaggctttgcgagacagccagcaggaggaattgactcgcgcagcgtcgcaactcgactacatcgtggcgctgcgccgcggacacaggatttcaaccgctcttgcagacgaatggcttagggatggcgcatacactcacgccatagacgccctcgacgcggcgttcgcgcaagagcaactgctcgacggcgttgacgccccaactggcatccaaatcatgaacgtgcacaaggcaaagggaaagcagttcgatggcgtaattgtcgttcgcgaaggccgccgcgaccaaaatggcttctcgtcatcgtttgtttggcgaaacgactcgcctccatattcaaaaagccgtcgcattgttcgtgttgcgatcactagggcgcagactcacgcgctaattctcgatcccatgtggccgcgttgcccgatcatcggcaatcaccgcttggcaagagtctga

SEQ ID NO: 75536 - DNA, 2334 bp, Desulfatitalea sp. BRH_c12
atgagaatagattttgtggagattcaaaattttcgaaggttggctaagatccggattgatttttcagataagactaccctttttgtaggcgcaaataatagcgggaagacatctgctatcatcgggcttagttattttttgacacgtcagaaagatttttccacctacgagatcccccttgccctatggtcctgcatcgaggagctggggcgtgcatttgaaaacgaccaggataaagagttgccttatagctggcatgaactcctgccttcactcgatgtctggctcaacgtttcgggtgacgagatacatcatgtcgcacatttgatcccgaccctagattggagtcctgatcagggggtaggtgtccggctgcaattagagccaaaaaatcccgacgaactccttcaatcatatcaaatatcgaaaaccgcagcctgtgataccctgaaagccagaccagacaactcggatgtgaaattgctcgacaaaactgaggcgaaagagccaacaacaggtgatggaacctgtaagggattctcgctctggccagaaaatctgatggattatctgaagaaagacatgtcaagcttactcacagtaaatgcatacctgcttgatccggcgaaaaaaaccgcgccgataagtgggattgcacaaccgcaattattgccagaaggtgctgtgcctcttgaagaggatccatttaagggtctgatcaagattgatgaagtcccagctcatcggggactgagcgattattcaggtggcccagaggaggaatggcatgaacaaggggaaagaggaggaaagcatctgttaaccagccagttgagtgcatactataccaaacaccttgaccctttgaaggctcctgaaccctccgatatacaggcacttgaggcgatttacgaagcccagacagttttcgataaacgattgaaagtttgcttcaaaaaccccctttgcgagttggagggacttggatatccgggagtggccaatccacgtttgacgatctcaactatcattagcccagttgaaggactcaagcacaagtccgctgtacaatatgatctcacaccagcccaggacacatccaggtaccgccttcctgagcaatataacggattaggatatcagaatctcatctcaatggtctttaagctgatcagctgtcgcgatgattggatgaaggtcggaaaggctgcccggccagaaaaagccggcacccagaaaacttctccaccccccttgcatcttgttcttatcgaagagcctgaagcccatctgcatgtgcaggttcagcaggtatttatacgaaaggcctacgaagtattgtgcaatcatccggcattgcaaggcaaaagttccctctcaacccagctggttgtcagcacacattccagtcacatcgcccacgaggttgatttcgcgcatatgcgatatttcaggaggcatccggcatgtaagcccggagaaacaccgttctcaagcatcgtcaacctttcagaggtcttcgggaagccggatgaaacggccagatttgtttcccgctatttgcaggcaacccacgcggacctttttttcgccgatggagcaataattgtcgagggggctgctgaacggatgctcattcctcatttcatccggaacaattatccgactttgcacagttgttacgtaaccctgcttgaagtgggtgggagtcatgcccatcgtcttgcgcccttgatagagcacctggggcttaataccctcataataactgacattgatgcggttgataagaaaacacgttcgaaagtcacaccgaaaataggcggcgatttgatctcttccaacaacgttctcaaaagctggcatcccaaaaaagaagggtttgatgacctggtggatctttctgaggatgaaaaagagctttcctatgatggcttcttttctatacgggtcgcctaccagacatcactgaaggttgaaatgaagggcaaaccatttgatgcctatccatctacttttgaggatgcattggtattcgagaacattgaccatttcagaagcgctaacgggggcgggctcataaagcaattcaggcaagctatagaggacaatgatgacatctataaattgcaggcgagcatgatgaatgctctcaagaccggtacaaaggctgaattcgccctggacatgctattttcacaagatccagcctcggttaaggtgccgacatatatacataacgggctgaagtggttagaggatcaattattgcaacgacaacaggaagtcgcattgccgcaaagagaaccggtaagtgaggcagtagaggcatga

SEQ ID NO: 75537 - DNA, 1872 bp, Desulfatitalea sp. BRH_c12
atgtcgcatccagatgatttattcgataagcaggccgatgaactgatcgctaagtgcgtcaccgatgtcccgccgacaagtttcttcctgttcgctggtgcaggatcaggaaagacaaggtctcttgtggaatgtctggaagtgatcaaagaaaaatcaggtcctcagttctggcttgatggtcggagagtcggcgttatcacatatacgaataaagcatgcaatgagatcaggagccgactgaaatatgatgagctcttcacggtctcgacgatccacagttttgcatggtcgctgatcaaaaatcttaaccatgatataagggactggttgcaaataaatctgcaagaagagatctccgaattggaggagaaggaacggaaaggccgtgccggtacaaaagcctcgatcgacagaatcaatgcgatcaaatcaaagaaggaacgcttggccggtctcagccagataaaaagattcatatacaatcctgatggtgataacccagaacgcaacgccctgaaccattccgaagtcatctatatcacggcggactttctcacagggaaaccgatgatgcagaacctgctcgtcaaccaattcccgattctgctcatcgatgagagccaggatacgattaaggagctcattgaagcatttttattcgtccaatcaaagctcaaagaccggttcgctctgggtgtcatcggagacttgatgcaaaggatatatttggctggaaagattgatcttgaccaaaacctcccggcggattgggccacgcctgctaagagaatgaaccatagatcatgccataggataatcaagctcatcaaccgcataagggagccagtcgatacgcaggaacagagacctcgttctgacaaaggtgtgggttgtgtccaatttttcatattgccggctgatgctgaggacaaactggcggcagagcaggcatgctgtaggcgtatggcccagatcacaaatgatgatggatggctcgaacccgatatcaacgtcaagacacttatccttgaacaccgtatggccgcaagacggctcggcttcctggatatgtgggatgcgctaagggatgtgaaacgtcttcagacagggctgagggacggaagcctgcccgctctgaggttcttctccaatctcattctaccattgatcatagctagtgaaaaaaaggacagttttgccgtcgcctcaattgtccgtatgcattcgccgttgcttgaaagaaacacactgatatcgtgttcgtcgggtcaaaaatgtcaggtagaaagcgcgaaggccgcatttgattccctggtcgctctttggggacacgggaaatctcccacctttatgcaggtcctgaactcagtacacgagactaaattattcaggattcctgaaatactccttccatttgcgcaatctgctgaagggattacagaggagccacgggaggaggataagtacgatgagcttgtagcgtggagaaaatttcttgagactcagttcagccagattgaaatgtatagccgatatatccaaggggaggcacaatacgatacccatcaaggaataaaggggctggaattccctcgtgtgtgtgtcctgatggatgatttagaggccggcgggtttctgttttcatatgagaagctatttggtgcaaagcaggatacaaagagcaaaaacccagaccaggaaacatcaatcgacaggacaaggcgcctgttctatgtcacatgtagccgtgctgaaaacagtcttgctcttgttgcatataccacagcgcctgaagcggtgcgaaggcatgtgatcgatgaagggtggttcaaagaggacgaggtcgtgatggtctcacccgaatcatga

SEQ ID NO: 75538 - DNA, 2028 bp, Desulfatitalea sp. BRH_c12
atgtacgtagcaaagatcttaattaccaatctccgctgtttccgccaaacgacggtcaaattcaaaccggggattaatgtgatcttgggggagaacaacgcgggcaagacagcccttctatgcgctctacggctcgtgttcgaccgctccggacgcctgcgtcccgatctccccgatttctaccagggcatcgtcgacttcacgaaagccccaacgatatccgtcaccgcgaccatgcgatcgtcaatggccgataccatcgacgacaaggccctcgttgcaacttggctcaccaagttggacgccccttgggaagcgcaggttagctatgaattcttccttcccgacggagaggttccagcgttcaccgcggcacttggtgtggcacccgaccgcaaccaattcttccgcgtcctagagcagttcatccccaagtacgttgcccgcatcttcggcgggcttccggagaatcggctggttgccgagcccgacacgctggcgaaattcgactgccacaccgtcgatgcgatccgtgacgttgagtccgaactgttcgcaggcacgaatcccctgcttcgcacgatgctgcgacaggtgctcgatcatgatgccgacgaggctgagaccttaaatcgccgtcgccattttcgcaccctgacgcaggatgccctttccaacctcacgggccgcatgaatctggacgcattattccaactcgctaaagacacgggagcggctgatggcgggtcgcctatcttgcgcgacgccatcgacgaagacgacttcattgccgctcttcgtctctatatcgatcgcgcgcccttcacgatccccgcaacccacaacggcctcgggtacaacaacttattatacatctctctgctattagccagtttgcagttcaaagcatcggtgccccgacgggggcagaatgcagtgctcttccccatgctcctcatcgaggagccggaagctcacctccacccgtcgctccagtacaagctgcttaagttcatccagaagcggctctcccctgaaaagaccagtcggcaggtattcctcacgacgcattcgactcatatctcggccgccgcgggacttgaacccatcatctgcctcagcctctccgaagccgatggcggcgtgcacgttgcctatcccgcccgcgtcttcggcgagagtccgggaggcaaagcgtcccgcaactacgtcgagcgttacctggatgccacaaaatccaacatgctgttcgctaagggcgtcatcttcgtggaagggattgcggaacaactgcttgttccatgtctttcccaatgcattggccgtccaatcgaaacgcaccacgtcgcggtcattgccgttggaggactgaccttcaagcacttcctgccgctctttggcgcaggggaagacgaacttctccgccgctatgcactgcgtcgccccgtcgcgtgtatggtggatgccgatccggctcgcaagtctaagatcaagggcgcgcggcgtcagaaatgctggccgtacgtcctgaaccgcgactgcgcgacatacgactacttccccgtgtccggcgtcgtcacaaatttgcagaccatgcgaggtcgatcgcctgggaatatcaagatctgcgtttgcagcaagaccctggagtacgacctggccctcgcgaacgcaaaacttcccctcctcgtcacgccgtcttgcgagcatgaggcggatctttgcgccctggctgagaccccagctaagttgccggtgcccctccaatccctgctcgccggcgatgaatccgataccctcgatgcgctgacggctcatccagacgaagcgacgcaccggttcgccacctgctacctgctctgcgctgaggatgccaagggggagcatgcccttgtgctggaacggcagctccgcgagaacctctcgaagccggaggcagaccgcaagacgttcgtgtgtccggattacatcaaagacgccatccactggacctgcgtgttcgatacgccggagcctccccatgcctga

SEQ ID NO: 75539 - DNA, 1791 bp, Desulfatitalea sp. BRH_c12
atgcctgagaaactggatattgattccggcacgctcctctccgatatcgaacgccatttccgcgtcgtggctgggccgggggccggcaagacacactggctcgtgaaccacatcaagcatgtcgtttccaggtccaagcggctctctcctgcatcgcgagttgcgtgcatctcgtacactaacgtcgctgtgaatgagattgtcactcgactcggttcgtccgccactcaggtggatgcctcgacaatccacagcttcctctaccgcaacgtcgtccggccgtacctccacctactgcgagagggtgacggcaagccccttgtcgcgttcgcatccgtcgacggccacgatgaacatcacccgtcctataccattatcgacgaatggctgagaagcattgggcaagccaagattctacagcgggccttcaaggagcagcgggatattctcaaggacaagctgtgtcagttagtgtggcagcgttcaggtggcggtgtctggacgcttgagccgcgaaagcgcgatcgcatggggaagatgctcaacaccatctgcacgagcgcgaaccttatcgactacaaacgccgatactggagcctgggcatcgtcgatcacgaggacatcctctacttcgcgcaccgtatcctcgaaggacacccactcgtctgccagtgcctgagtgcccgctatcggtacctgttcatcgacgaattccaggatactctgcccatccagaccaatgtcgtacagtggctcgccgacgcagggacggtggtcggcgtcatcggtgatgctgaacaatccatcttcggtttcctcgacgcccacccgcagcatttcctgtcgttctcgctgcccgattacctcgacatgaccatgcatcacaatcgccgcagcacgcgccgcatcatttcgattcttgaccgcatgcggtctgacggcctacggcaacattgcttccgcgaactcgacgggcagcccgtgacggtgtacataggcgacgtcgaccgtagtctcgcggccattcgtaccgacctgccgccggatgccgtcctccacgtgctgacgcggaagaacagagatgcccatcgcgtgcgatcggccatcgcgcccggaacagtggagccgtgggagtccttctacggtgccgatgccgaacgtgcccgtttcatggagcacgtcattgctgggacggtactcgccaaacggggtcagatctcgctcgcacaccgagaagcggctcggattatcggacggaaagggcgggtgagaaagcccctcaagtgtgacacggtcctgagtgacgtccactggaagggaattgccgttaccgtgctgcaggagttcttgaccaaccacgctgccgttttcgccggtacgttgcttgaggcctatgtccgctgcggaacctgcgtcacggccgcatatccggcagtgaccctgaccgctgtaaaggccggtaagttcaaggctttcgcagaagccacgccgtattcccaccttgcagaatcggttcgtttgcgggaagaggtgcgccatgtgcggaccattcaccaggcgaaaggtagcgagggggacaacatcgctgtgtacttcgaggatgccgaccgcgtccggcatattacacattcctcgactgctccggcagatgaggagaaacgcctcacctacgttgccttaagccgcgcacgcaatcgtctcttcctctgcattccaatggatgttgttatcaacgcagacgaacttaacgcgctcaatcttcgcgtcatcgacctgcgggagacccaatga

SEQ ID NO: 75540 - DNA, 2058 bp, Desulfobulbaceae bacterium BRH_c16a
atgaaaattgattccatcataattcgtggcttccgatgttttgatgaccaggggcagaccataaaactcgacgatttgtcatgtttcgtagggccgaatgcttcaggaaaaacagctgccatgattgctttgacgaggctctttggtgaaactaacgcacagagacaagttatatcaaatgactttcacctttcttcaggagaggaattgaaatcgcagtctcagcgtattttgctaattgagtgccgattggtcttttcggaacttgatgaacctggcgcagcgctcaactctataccagaaatatttaaccaaatgattgtagatgagcctggtggttcaccttactgtcgcatacgtcttgaggctatttggcgtaatgacggcactctggagggagatgtcactcaaacaatctcttggattctaacaagctctgatgatgaagccattatccaggatggaaatcgtaagcgggtgcaaccaggagatcgtgggaagataagagtgatatatgttcccgctactcgtgacccaaaacagcagattaaagccactaccgcgactagttttggccggttacttgacgctttggagtggggtggagtagaagaaaacattaaaacaaagctggcagagttacaggctgaacttactggattgactggaataaaaaccatgaacaggagggtccagagaagttggcaaaaattatacgatgggccagttgcacgtacagtttcatttcaagccttggaaaatgaggcaactgccttagtcaagcttcttgtgccaactttcaatcctggtgagaacgggcgtacaatgtcggttgaggatttgagcgatggaatgcggtcgcttttttccttatctttgtccttaggattattccgagtcgaagagctgctgaggaatagggctaatacttccggattcaaggctgaggttcgagaagaactgcctcttctaaccgtttttacagtcgaagaacctgaaaaccacttatcgcctcattatttggggcgaattgttgcagaactggacgcaatctcaaaggatagtcgggctcaagttatcatatcgagtcactctgcatccattcttggaagggttgttcctgataatgtacgctatttctttggacatgagcattcttctgctacaagtgttaaacccattcctctaccatctaatgagactaatgagtctttcaaatatgtccgtgaagctgttcgcagttatcccgaattatatttttcaaggctagtaatccttggagaaggagcctctgaagagattgttctccgacggttaatggaagcaagtggaaggcctgttgacacccactttatttcagttgtcccgctgggagggcgtcacgtcaatcatttttggcgtcttttgcatgaccttgggattccctttattactcttcttgatcttgatagggagaaggaaggtgccggttgggggagagtacaatatgttcgtaatcagcttattaaattatacggtgctggtcatcaaaagcttaatttcacaagtgatacggggaatacagttaacctcgctgatagtcagtttgataccttaaaggatggatcagacctcaatgttgcacaaatggacaattggatttcatattttagaacgtattttgcagtatacttttcttccccactggatcttgatctagctatgttggaagctttcccaatcgtatacaaaggactcgcgcctgcaggaggcggtccgcgtttgcctgcacccggatctccgacatatcgaggcgtgataagacaacgaatgagacaagtactggcctctgatgcaactacagcaccagcaacacttggagatagttatacgcaggaacaggtggaaagtttcgcctggtataaatatctttttgttgacggctcaaaaccagttatgcatatgcgtgctttgttagcaattaataatgaaacacttgtcacagaggctccagttgtattgaaacagctcatcgagggagccaaagcattgctcgcccagcaagaaagtgtcgagtga

SEQ ID NO: 75541 - DNA, 1884 bp, Desulfobulbaceae bacterium BRH_c16a
atgttgtacatcgctcctgatcaatggctgcccgtaggtgtcgcttctttagagtttacagctaaccacgtcgtacggtccaatcagaacacactcgttgtcgctgggcctggtgcgggaaagacagagttgctggcgcagcgggctagctaccttcttgataccggaacttgtcccacacctcatcgtattttagctatttcattcaaacgcgacgccgcaaaaaatcttggcgaacgtgtcaaagaacgctgtggtgatggagcacaacgatttgattcctatactcttgatgcttttgctaaaagtttggttgatcgttttttaccagccttggttgaagagtggagaccgccgattgggtatgaagtgttaaccggaggcttacatgtgaacgcaaaacagctatggcttgatagcgctggagttccgcaaggacagcaaccgatcacatttatggctctgcagcctaatcaaattaaccgtatttttgacaaaatggctcatggttgtgaactgccctactcttcatcagaaattgatgaccgaattcgatattgggggcaccgttggtggagagagcagctaaatcggcctgcgggatcgcagagcctttcatttccaatgttaaatcgtttagctgcatatcttctcaggtctaatccaaagattactatggctctacaggaaacatatcaatatgtttttcttgatgagtttcaagatacaacggctgcccaatacgatcttataagatcagcattttttgaatcagatacgattatgactgctgtgggagacaacaagcagcgcataatggtgtgggcaggagcaatgcctaaagtttttgagacttatcaaaatgactttggagcagaaagaaaagatttggtgagcaattataggtccgcaccggaattggtagcaatgcagcaaattattgctcagacgcttgagactgggacaccaattgttaacgctgtgaatattgacacctctggtagttgcgtcattttggaatttagtaaccccgaggacgaggctttacatcttgcccagttaatagagcggcgaattcgtgaggatagtttgaagccaagggatttttgtattcttgttcgccagcgagctggagatatgattttacaactaaaagaggcactcgcattatacggcatcccccttcgagatgagacattacttcaagatcttctgaccgaacctgcagttcgattcatgttggtgatacttaggcttgcaacacgacagcgcgatgctgaggcctggaatattctagtgaatgaggtcattattctcttgggtttagatgaacatgacgatgctattaaagttgaacaagaatgtgtacgacttttaaaacatgctcgtgctgcgttacaggcagggaatgcaatcgcaacattgcctgcagagcttatcggaatgataggtgaaggcacttttaaatcggtttacagacagtaccggagtggtacatacctggctgatgttatcaacaactttactaatgcattacaaaactctgcagaagactactctaatccatgtgatgcagtgaacgattttatgggcactgatgtcatccctgcgatgactatccataaaagtaagggattggagttccactctgttatctttcttggtttagaagattctcagtggtgggcattttcaaatcagtcagatgaagagaaaagagggttttttgttgcatttagtcgtgccaaagcccatgtgtactttaccttttcagacgtacgagatgagcgctgggggcggagaggacaacagaggtcacaaataggtgacttatacaccactttgcagcaagcagctgttccagttgaaaatcacaggatgtaa

SEQ ID NO: 75542 - DNA, 2076 bp, Desulfobulbaceae bacterium BRH_c16a
ttgaaaattaagcacgtgaaagtcgagaatttccggctgttgcgcgatgtcgagcttggtctcgaagatcgaacgacgttgattgtcggccgcaacaatagcgggaaaacctctattgccgagatttttcgcaggctgctctcagacaaggccctgaatttcagactcgaggatttttcgctcggttgtcatgagaaattctggacagcctttgaggctgtccatgctggcatctcagcgccggatgtcctagggcttctgccgtacatccgcatcacactcgatattgcctacgatgttgacgctcccgacctcggccctttgagcgactgcattattgacctaaacccggactgctcctttgcgcgcgtggttctgaattatgggccacgctctactgctgccgacgtgttgtttgccgatcttcctgcaccggaagcggacattgccgctgttcgagcagcacttttccgggttttgggcaaccgtatccccgccgcgtactgttccagccttgaagctgtagatcccaatgacgggacgaacaggaaggcgatggagttgaaaatccttacagccctcgtacagggcggctttattaatgcacagcgtgggttggacgatgacacgaagcgggaacgcgatgtcctcggcaaggtcgtcgaagtcctattccagtcagcgctgaacgatccggtcgatcatgaaaagcgcactatcgccgagcaacttaaggtggcagttgaagacatccagagtgacctgcatgccgatttcaacacaaagctcacatcgcttctgcccaccttcgatctgtttggctatcccggtctgccagaccccggactcattaccgaaaccagctttgacgttgagaagctgctgagcgatcacaccaaagtgcgatacgctgggaaaaacggcgttacgctccctgagacctataatgggcttggtgtccgcaacctcgtctatatgctctttcaattgctgcgcttcttccgtgagtatcaggcaacgccgacagccgccggtgtacatctgatctttattgaagagccggaggcgcatctgcatcctcagatgcaggaagtcttcatcagacagcttgatcagatcaccaatgtattcgctgcacagctcaatgagaaccgtccgtggccggttcagttcgtcgttacgacgcactcaccccacatggcgaacgaagcccgctttgagactctgcgttatttcctatcggttgcggacggggatggtctgcgacgttctgagatcaaggatttgaggaagggcatgggtgacgctcccgtgcctgatcgggattttttgcatcagtatctgacgctcacgcggtgtgacctattcttcgcggacaaagctgttcttatcgagggaacatcggagaggctcctgctcccggccatgatccgcgagacggatacggcggccgttggagagccgaagctcggtagtcagtatctgacggttatggaagttggcggcgcctatgcgcaccgcttctttgacctactgactttcctcgaactgcgtacgctgattatcaccgacatagatgcggtgcgaccgaacgacaagaaaaagcgggtagcggtcccagtcgcagacggccagttcacaagcaacggctgcctcaaggcgtggtttggtgaagatgtttcacctgctgatctgctgataaagacgccagatgataagatcgcaaatggccgccgcctcgcctaccagattcccgaggtggatggtggcgcctgcgggcgcagcttcgaggacgcattcatacttgccaaccccgcgctgttcgagcttggtgagggtgatcaggccgcacttgcatatgatctagccgccggtcagaagaagtcaacgttcgctcttgagcttgcaatcgagaagaccgtatggaatgtgccccgatacatagatgagggattgcgctggctggcgcacgacaatccagcccctgccgcccaaccagagaccattgcggtggagatcgtagcggaagctgtggacgtggacattgatgttgacgaggtactcgatcatgcctga

SEQ ID NO: 75543 - DNA, 1776 bp, Desulfobulbaceae bacterium BRH_c16a
atgcctgatagagaagaaagccccgctgacgccgcagggcgcgtcgcgctagagcgcatgtttgcctgcctggatgaagggcggtgctttcgccttgaagcgggagcgggagcaggaaagacctattcgctcgagaaagcgttgcgccggttgatcgaccgccgcgggcgtgaacttttgcgacaacgccagcaggttggctgcatcacgtataccaatgtggcaaaggacgagatcatttctcgaatccatgctcatccagctgtgcggccagaaaccgtgcatggattttgctggtccatcctgcaggatttccagacgacgttacgtgaactcgttccgagccttccgagctgggcagagcgtctggaagaggccggcggtattggaaaccgccgggttcactatgaactgggatatcccggcgtaactgacgagcaggtcacgcttcggcacgaagacgtgctgacgctcatgattcaggcgctggcattgccgaagttccgcagagtgctgaccgcgcgctatccagttctgttgatcgatgaatatcaggacacggatgctgcctttgtcggtgcgttgaagacgtgtttccttgatcatggagaaggcccattgatcgggctatttggggatcactggcagaagatttatggcgagggatgcgggctggttgagcacgcgactctagaggtcatcgacaaaaacgcaaacttccgctccgttgatgcaatcgttcatgtactgaaccgaatgcgtccagcgctaccccaaatggtcagcacccccgatgctcccggtgaggcgcgcgtctttcataccaacaactggccgggtgtacggcgcacagggcaaggtggaggtcactggacgggtgatacaagtccggaagctgcacgtgcatatttccagcatgtgaagtcgcggttgaccagtgaaggatgggattttgcggttgagaagaccaagattctcatgctcagccacagcgtccttgcacgagagcaaggctatgccagcatcccgccgatctatgggcaatacaacgatccgtggctgaagaaagacgacccccacatcaagtttctgtccgatcatctcgaaccggcttgcgctgcttttgaagcccagcgctatggcgagatgttcgaatgctttggcgcaagcatgccgcgcattcgtcggcaccaggataaagtagcttggtcggacacgatgaatgagcttatcgctttgcgtcagacggggtcgatcggcaatgtgaccgacttcatcgcagcccagcaacacatgcgccttccggctgccttggtggagcgcgagcaaaagcttgcagaagttggcgctgagccggttgagggcgaatctcgtcgcgttacgcaactgcgtaagctgcgagctgtgccgtataccgaacttatatctctggataagttcatcgacgggcatacgccatttgccaccaaacatggcgtcaaaggcgcggagtttgagaatgtcctcgtgattgttggacgtgggtggaacaaatataatttcgcgcagacccttgagtggatggattctggtccgcctgccaacaagcaggagttcttcgagaacaaccgcaacctattctacgttgcatgttcgcgccccaaggttcgtcttgcgctgctgttcacccaagtcctgagcacgaacgctatggaaaagatcacgcaatggttcggtgcggacaatatcgtcgctctacctgcagatcccttgcaggcatctgctatttgcgagtga

SEQ ID NO: 75544 - DNA, 2295 bp, Pseudomonas sp. BRH_c35
atgcgcatccagcacgtagagatatctaacttccgaaagctgctttctgtgcgaattgacttcgctaatgagaccacgctgcttgtaggtgcaaacaacagcggaaaatcctccgccatgctggcactccggagatttttggtttcgaagggttctgcttttcggctccaggatctgactctttgtcatttcgccaagcttgacgagattggtaaggagtgggagaacccaccagcaaactttgaaattcctacagccaaggactgggccgactggctccctagtctggatatctgggtgtcggcagatcaaggagagttccacttcatccgcgatctcattcccagctttgcgtggcgcggggggcttgtgggaatgcgcttcctgcttgaaccagatgatatgaatatgctgtacacggactatcgcaaggagcgggcgagggttgcagagcttgaggatgctttagggaaggaggacccgcctggtagcccgctgacgctatggccacagagccttcatgattacttgaaccgtcggctgggagataaattcaaggttcgttggtatcgcctagatccgcaacaacttaagaagcctgacaagtcgactcgaatggctcaaatgcagcaattgagccctacttccctgcctctggaaagcaatcccctcaatggattaattcgagtacatgagatcaatgcacagcggggattcggcgactattcggacgacaatcaaggcgataacactaaacccagcggtgcccgaaaactctcggaacaactcagatcctattactcccgacacctagatccaggtgacagcccagatatatcagatctcgaagcgttgcgggcgatagaagcagcccagtcggcattcgataccaggctatgtagcagcttcgaatctgctattagagaggtcgagggattgggctaccctggccgcaatgacccacgcatcaaagtcgcaagtcgcctggcagcaactgacggcatgaaccatgaagcggccgtcctttttgagttggattcaattcagggcgccccaggagcccctcctcttcatttgccagagaccgctaacgggttgggatatcaaaacctgatatctatgattttccggctgatggcttttagggatgagtggctaagaaaaaccagggccgccagcgcggaggtaatagaccgcgtcgagcccatccacctcgtgttcattgaagagcctgaagcccaccttcatgttcaagtgcagcaagtgttcgtgcggcacgcctaccaagttctatgccgagacgctttgcttgaacgctacccaaatctgaagactcagcttttggtgagcacgcactccagccatgtaactcatgaagtggagtaccagaaccttaggtatttcaggcgactcccagctggaatgtatggcatcggtgtaccggtgtcgacggtctctaacctctctaacgtattcggcgatggaacaaagacgaaggagttcgtaaccaggtatctgcgggcacagcacgcagacatattcttcgccgacgccgtcatcttggtagagggctcagcagagcgaatgatgctgccgcattttttgcggaataagtttccattccttgaccgctgctacatcacaaccctcgatatcggtggtagtcacgcacaccgactaaggcctttaattgatgcgcttggcatcctcactctggttattacagacctcgatgcagggtttaataaagcggcaaaaccggtgcaaagaaacgcagatcagattacgaacaatccgacattgcggagctggatgaaactgatgcatctgggcaacacagtggatgagctgctcgagctgccagcgaatcaaaaagagcaccagatcgacgacctgtactcagtacgcatcgcctatcaaacgcctatttccacccacctgcccgctactggtgaagcaatacaagctctaccaaatacctttgaagacagctttgtgcttagcaacgctggtcactttgcggataaaacaaacggcactggtctgatgaaggccttcgtaaaagttttgaatgaagcgcaaacatcggaagccgtcggagaaggttttttcaacgaattacgcgaaggaaagaaagcagagtttgtgttgctcgttttgggcgacaaaaacttccccaaccttgaaatccctgaatacatcagtgaaggcctcaactggcttgagtccaaattgcgaagcaagcaaaaagagctactggtaattccgcccgagggcgcggaggtgacgccatga

SEQ ID NO: 75545 - DNA, 1848 bp, Pseudomonas sp. BRH_c35
atgagcgaggcagctgtcgcagatgccgacgcccttatgcaggcttgcctgaatctggccgacccgaagagtttttttctttacgcaggtgctggctcaggaaaaacccactcactcgtcgaggctatccgcgaactcaaaagtcgcgagcgagaacgcctgacgttcgagggccggcgcattgcggtgatcacctatacaaacgcagcctgcgatgaagttcttcggaggctagagtttgatccactcgtggaagtctcgaccattcacgcgttcgcctggcgcctaattcaaggattcgacaacgagatcagagagtggctaagggtcaaacttgcccaggacattgagaagatcgagggcgagctagcacgctcgagaggcgacaataaaacatctcgagcaaaccgacggaagctacaaagcaaaatacgcagacttgagactctggacgagattactaagttcatctacagccccacaggtgacaacagagagcggcaagctctcaatcacgatgaggtcatcaagttaactgcagcattcgctcctgaacgccctttgttggatgttctagtagaccgctacccagttgtattgatcgacgaaagccaggacacccacgctccagtaatggaggcttttctgaaagtccagcaattggcgcaggcacgcttctgcctgggactactgggcgacaccatgcaacagatttacggccatggagtaacgcgccttgataaagcgataccggatgactggctgaaacctgaaaagatcgttaatcgccgctgtcctcgtagggtagtagatcttatcaacgtgattcgaagcgctgcagacacccatcagcagaccccgaagcccgatgccattgaaggtgtagtgcgcatgtactgcattagtcaaagccaagaacaggcaccaattcttgaggaaggtatcgctcagtcgatggctgcaatcaccgacgacggcgaatgggctaccggtcctgaaggccgaaaaaccttgatcctcgaacataagatggctggacggcggatggggttcgaaaagctgttcacgcccttatacgcgattgagcaccttcaaacaggcttgctggatggaaccttgcccgcacttcgcgttttcagcgaaggcgttcttcccattcttaccgcaaaggatgatcacttccttctgcttgaagccgtacgctctcgctctcccttgctcagaaaggatgcaatacaatcaacagaggatcaatcgacccacatgcagcgtgtagaggacgcgacgcatgccctgctctctcttttcgaaaaaaacgatccaacactgagcgaggtcgcaacgcttttgttgcaaacccaattgcttgatgttcctgacaatctggttggggcaatggtgttgggagcccctagtgaggctccagatcctgaagatacgaacgcgatgaccaactacgcctaccagctattccttgagcgtccattttcggagctggcagcctttgcgagttatgcggatggcctttcaccctacggtacacatcaaggggtaaaggggctggagtttccacgagtcatggtcgtcatcaacgatgaggaggcaggcggcttcttattcagctacgacaaattgctgggtgtaaaagaaccaacaaagactgaccgggacaacgagcgtgacggcaaggacaacgcactagcacgtactcgtaggctgctttacgtgacatgtagtcgggctgaaaagagcctggcgattgtcgtatacacaccccagcctacactcgccaagcgaaacgttgttgctgctggctggcttcaggagagcgaggtcgaaatcctgtga

SEQ ID NO: 75546 - DNA, 1698 bp, Vibrio cholerae; identical to SEQ ID NO: 71760

SEQ ID NO: 75547 - DNA, 1377 bp, Vibrio cholerae; identical to SEQ ID NO: 71761

SEQ ID NO: 75548 - DNA, 2112 bp, Klebsiella michiganensis
atgtatatcaataaattagctattagaaactataaaaactttcgaagctcaaatttctactttgttaaaggctcagtgaatacaattatcggtgaaaatgcttcgggaaaaacaaatttatttaatgcgatgagattaattctagatgattctctcccaatgaattctaggattctatctaatgaggacttctaccgtggattatccgaaccctttggtcattggatcataattacgctatattttgatgatttaagtgagtcggaggaagaacaggtccttgccaactatacagtaaatgatggtaatgataagtctataaaggaaggtaattatacttttatatatcgacctaaatttcatattcgacaaaagctgtatgagttaacattagaagatgacaatgtggaagcaagatccgcttcttttactgaatttgtatctaaccatattatttctaaagaaacatatgaagcagtagcttttgttagaacaaaggttgatttgaataatgacgaaatttataaacaagtagttggggattttgatagttactccttttcaaaccctaatgatgatgatgctactgtattaggtgtgaagaagccaccttactttgccttaggcagcgaagtcgcttgcacttatgtcaaagcactcaggaatgtagttgcagatcttaaatattataaaacgaatccattgtataaattacttactttaaaaagtaaacaaattgatgatagaaaagatattgtagaagatgttaaagagatcaatggtaaaatctctgccatacctgaaattgagcgattgagtaataagatatctgcttcattacttaatacagtaggttcgacttattctcctaaaatattagtatcctcacagcttccagaggatttcacagaattaattcaatcacttggtttagtggttgaagattctctggattataatggctcaggaaagattgatgatctgagtcttggtggagcaaacttaatctatcttgctttaaagttatatgaatacgaagaaataagggatagtgaagagcatattactcacttcttgttaattgaagagcccgaagcacatattcataatcatatccaaaaaacccttttcgataacttcaattttaaaaatacgcaagtgtttgtttctacacattcaacacaaattagctctgtatcaaaaatatcatcaatgaatatattatcacgccaaaatggattcactgatgtatatcatccatcgtttggtttgacgccgaaagaaatttcttccgtagagcgatatcttgatgcaattcgtagtgaccttttgtttgctaaaagtgtcattttggtagaaggcgatgcagaacttattttaataccagcaatggtaaaagaaactttaggaattagtttagatgagttgggcataagtcttataaaagtagatggcactgtttttaaacatatttctaaccttttccatgaaaaacggctgaaaagaaaatgtgcaattctcacggatcttgattcggcctatgtaaaagtagctgatgatatttttaatgcggattttgtcgaatctctggtagatgccgaagatgatgggttacgaagaaaagaagagttagataaatatattgaaggtaatgagtttattacggtttattacgcagaaaatactttcgaaactgagcttgttcgctacgatgaaaacaataacttgtttttagaggttatgaaaacagagtataaaaaagaagcgtattttaaaaaggctgaatcagatgtaaaatcatctgatctcagagttcgatataaaagagtattaaagtttgcaaagaaaatagggaagggatggttggctactgaaatggtagaacatcttagtgttaataatcgtgttcctgattatattttacaggccattcaatttgttcttcgggatagaaatgtcgagcatatatatcaaaaaatgcttgactacaatatgtctttaatgggggttaaagcatttgactgtataaatgccgaaaaagatttttctagtaaaatgatagaatataagaaacacatcaatgacagttttgtaagattgttggagttatag

SEQ ID NO: 75549 - DNA, 1752 bp, Klebsiella michiganensis
atgccatatagaaatttaacttctgagcaaatggatgccgttaaattcaacgggaatttattattaacggcatgtccagggtcgggtaaaacaaaaacattggtttctaaactttgtttcattttagaaaataaagaactattttgtataggtaaaaagaagataattgctcttacatatacaaatatagcagccgatacgattcttgaacggattatgtcattcggcataagtagtgaatcgttatggattggaacaatacacagtttttgtttgaattggattataaaacctaatttagataagataccaagactttgccgaggatttagtgtaattgatgaacatgaaaaggaatttctcataaatgaattaaaagaaaaacatggcctatctgcaaatgataaagtttttactaatttagattttaaccttggtcagttttattcccgtgggaccaaagaacatttgattgtaaaagaatatcataatcatttgtatgagaaaaaattaatcgattttgatttgatattaaatctgacttgtcgagtgttgacaaaatacaatgcactttgtgaaagattgtctttacttttaaggtgtattttagtcgatgagtatcaagatacatctcttatacaatatgagatactcagacaaattgtattaaagaaaaatacaatgattacttttattggggataaagagcaagctatatatactggtttgggggctgtcgtaaagaatagagatgaattaattgattgtttccaacttgataatctaaccgagatgaaattaacggggtgtttccgtagtagccaatctattgttgatttttatagtaaatacaaagacgaagattatgagattaattcactttcagataataaggatttcaactcagtaatttttaaagaaagcgaggtggatgtttctcaactgccgatttatgtatcaggtattattagaactcatttggctcagggagtacttccaaatgaaattgctattctgtgtcctggttggtttgatgtgataaaactttcaaatgatattgttactcttaatccggatatagaaattgatggagtcatgatctctcctatacctaaaaacaatgagaatatttggcttgctttagttaaactatttttaattaggagagttccctctaattttaatactagacagaagctattgcgggatttccttcaagaattaaatgttgctgcaccctatactgaatcgttgtctcctaaaaaaatattgaagattattaataaaatatcattatctgtggattataattgtgaaattgatgtttggttgagagaggttataacgagattttgccattctattaatttgagcataagtaatgatagctactattatcaagaaatggaacttttgattaatgccacattgaaaagaatgttaaagtataatatggcttataaagcaaatgaattacatttgtttttcaattttagaagcggtgttaaaatcacaacttgtcattcgacaaaaggtgatgagtatgaagtggtcatttgcactggattactaaatgggaaaatacctaattggaatgatattataaattgtagctcagagcatcaaaattatgttgcccgtagacttttatatgttgtttcttcgcgtgcaaagaaacatttatatatgatatcagagagaggttacaagacaaaaaggggatatccatatcagacaactccacagctttga

SEQ ID NO: 75550 - DNA, 1794 bp, Acinetobacter baumannii; identical to SEQ ID NO: 71916

SEQ ID NO: 75551 - DNA, 1782 bp, Acinetobacter baumannii; identical to SEQ ID NO: 71827

SEQ ID NO: 75552 - DNA, 2139 bp, Acetobacter aceti NBRC 14818
atgaagcttcagaaggtcacgatcagcaattttcggcgccttgagaaggtgacgattgatatagaggaaaaggagaccttgttcgtcggtccaaacaacagcggaaagacttcggctactgccattttccgcgcgtttcttggcggacgtgagttcaagatccacgacttctcggtctcatgccttaccgatttcgaacagttttccaaaactggcaactctgccgacctcccggagatcggtctcgacctctggttcgagattgatcccaacaccattgccttcggtcgagtctttacccttcttcccaaattgtcagatttcacacaggtcggttttcgcttacggtttggcatcgacgatgccaagaaattgcgcgaagaatatttcgcggcctatcccgcaggcgaggacggtcgacacgctcgcagcttatctcagtatctcgccaccgatacaaacctcaaccgtcacgccgctacgcgctatgcttcgcttgaggaagtagcagcggatgacggcgaaaccactatcgtcgccaccccgttggagccggatgagggtaaacggctcgtacgccaattggtccgtgccgaatttgtcgatgcccagcgcaacatcaacgatgatgataatagtcgcagcaaccgcctttctgcagcttttgcttctttctatcgtaaaaatctcgatcaagccgcatatgcggtcgaagcgcaccaagtgattgatgagaataatgccgctttaacccggcattatgagaagcaattcgcaccgctcatcgatcttatcaaggggctgggcgtgccgtcggtcaatgaccgtgaactgaaaattatatcctcgctcagtccggaaagcgcactgcgaggaaacaccgaactcctctatgtcgatcctcatcgacaacacgagctacccgagctttataacgggctcggcttcaagaaccttatctatatggcgattcaggcacgtcacttccatacacagtggcttgccacgccggagaaccgaccgctttgtctgctaatttttatcgaggagcctgaagtccatcttcatgctcaggttcaacaaagcttcatcgccaatatatggagtgtgattgaggactccgccaaagcagctggtcagtcggctttgatgccacaaatcattatcactacccattcctcgcatatcctcgacgccatcaattttgagaaagttcgctatttccagcgctgccatcttactggcgaagctgcgaaggatggcatacgcaacgcatctgacgttcgcagcctacgtacattccaaccggaggccgatgttatagaaggcgtggcaatttcacccgaggatactctgacgttcctaaaacgctatctccggctcacgcactgcgacttgttcttcgccgacgccgtaattctcgtagaaggcgccgccgaaaagcttttactgccgtcgatgattgagacctcagcagctcgattgcgtgcgtgctatcttaccatccttgaggtagggggggcctatgcccaccgtttcgaagggctgctcgactttttacgcattccatatctcgtcgtgaccgacctcgattctgtcgaaccaaccggctatccgagtacttgtcgcgccgatgttgcgaacgcacggacctccaatgcttcactcaagaaactttgcggtaagggcacagtcgccgagttggttgctatgtcgcactctgacaagatatcggcctccaaggaccgttgtattgccttcgaatatggtgtgctggtcagcgaaggtggggcgcaattcgagatgatccctcgcacgcttgaagaagcaattgcttatgagaattttgccctgcttcgcactggaacactttcgatcggcaaggtaattcccgctccccttcccgacgcctatacagtgatctacgagcgcatcggttcgaaggatttcaagaagactgactttgcgatggatcttctcgcggctaagtcgagttggacggtgcctacctacattgctgaaggcctacgctggctcgagctaagactgtgcggcgagccagcaccacaaccttcccaagacggtaaggccggtacggcaaacacaggcgggaatacggacgcaggtactacggcatga

SEQ ID NO: 75553 - DNA, 1842 bp, Acetobacter aceti NBRC 14818
atgagcggcaaggttgagacccaggcagatgctgatgtgcgtgcctgtattgacggacatcgcagctttgcgctcgttgccggcgctggttcgggcaagaccacgtcgctcatcgaagcactgactcgcgtgcgcacgcgagaaggccaacaattgcgacaaaatggacaacgtatcgcctgcatcactttcaccaaacgcgcggtagaagtgatcaaagcgcgactgggattcgacgagctctatctggtatctacgcttcacagcttcctatggaatcagatgagtcgcttccacgacgatattcgagaggcactacgcgaggcacggcttccggcgctcattcgaaaagagcgcgacaaggataacggcgggaatagccgtaccgcgaaagatgcccgcgccaaagccttacgctacgagcagaatctagtcgatctcaatacggtcccagtcttcagctatgccgatgctaaatggggtgactatctggcgggccggctcggtcatgacgacattatcgaaatcgctgcctatctgtttgcacacaacacgacgtttcgacggatcaccggactccggttcccctatatctttgttgatgaggcacaagatacctttcccggcatcatcgccggcctcaacctgatcggcagaagcgaagggctgccaatcgtcgggtatttcggcgatccctggcagcaaatctatgatggcagcgccggagacttcgcgccacctgtgggaggcatgcccattaccaagactgagaacttccgctgctctaaaagtgtcatacgcctgctcaatgccttccgaacggatgtcaagcaatacgctgcgggtgagaatgcgaaccgcgaaggcagtgtcttgtttcgactggtccaggccgagaagcctgaactaccccgcaaccgctattccgaagcccagattacccgtgcgctggcccggatggacactgcgatggcagaatggggatgggccgaacgtgatgatgtgatcaagctgttcctagccaaccagatgattgcacgccggctaggcttcgccgaactgaatcgccttttcaacggtccttatgcttcgactcgtgcagaagaggcgttcgaagcgggcgagtatttcttgctaaagccgtttactgacatcatctacccactcatcgctgcccataccgctgatgatagccgcgccattatcgacattttgcgccgcaatagccctgcgttcgctgtcaacgggatcaacgccgaggctacgctcaaagcgatggtcgagacatccgtgagtctggtcgagcaacttaatgtactttgggcatcgggctcagtcggcgagcttttacggttctgcgtcgccaaggaaatcatcccaacttcggacaagttaaatgagcagcttaatcgcgcgccacgcgatgaggattacgttgaggaattgcacggcctcgataagggtgactggctcgctgacgcactgttcgcgatgaaacccatggaaattgtcccttacgcctccttcattgccgagaacacagcctacagcacccagcatggcgttaaaggtgaagaatacgctaaggtgctgatcgtatatgacgatgtcgaagctgcttggaacatctacaatttcagcaagacgctaacacctgcaaccgcaggtcaacccacggacggtcagcgaggtagagggcagcggcttgcctacgtgtccttctcgcgagcgctcgaggatttgcgagtattgtttttcaccactgaccccgacggtgcctgccaagaactaatcgagcgtaagctggtggctgccgagcagatcgagatcgtacgggcctag

SEQ ID NO: 75554 - DNA, 2151 bp, Acetobacter orleanensis JCM 7639
atgtccgggggatgcatgcacatttcgaaactgcagctggtcaattaccgaaacttcgcccgcgccacggtgaagttcgaaaagggcgtgaatacgatcatcggcgagaacggatcgggcaagacaaacctgttccgcgcgatccgcctgctgctcgacgacaatttgctgcgcatggcgcaccgtctcgatgatcgggacttccatcgcggcctcggtgaatggcgcggtcactggatcatcatcagtctcgaattcaccgatgtctcgcaggacgagacgatccaatcgctgttccttcatggtgtcggcaccatcacaggtgcaacgatcgacaaagcgacctataatctgatctttcgcccaaaggctgcgatccggcagagactgtcgcagctggcggccggggacgaaacggccctttccgagcttcgcagggagatcagccttgccgattacgagaccgtcttcaccggcaagagcagcgccgattttaccgacccggcggtttatcaggcgctcgtcggggacttcgatgccgtgaccttcccggatgaactcaccccggccgagatcggcaacatcgtccccggcatgttttcgatcgctcgcgagatcgggttcacctttattcaggcgcttcgcgacgtcgtcgccgaattccagaacaatcgcactaatccgctgctgaccttgctcaagggcaagagcggcgagatcgaccccgcgaagtttgctcccatcagcggactggtgacagacctgaataccgcgatcgaaggcctcgacgatgtccgcgcgatccggaccgacatccgcgacacgatcaccgacgccgccggcgaaacctattcgcccaaatcgctctcgataaaatctgacctgtccgacgaagccgaccggctgttccagtccctaaagctgttcgtcggggaagccgaggcaggctatgagggcggcatccacgaactcagcctcggcggcgcgaacctcatctacctcacgcttaagctgctcgaattcaaatatcagaaggtcaagcagacattcgccaatttcctcgtcgtcgaggaacccgaggcgcacatccacacgcatatccagaagactctcttcgaccgtctgaactacgacgatacccagatcatctactcgacgcactcgacctatatttctgaagtcagtaatgtcgagaacatcaacattctcgggcgtgatggcggggtctgcgaggtctaccagcctgccgccggcctcgaccccaagcagatcggcaatatccagcgctatctcgacgccgtgcgcagcaacctgctgtttgccaagagtgtgttgctggtcgagggagatgccgaggaaatcctcatccccatcctcatcaaacaagtattcggcctcagtctcgacgagctcgggatcagcctgatcaatatccgcagcaccggcttcgagaatgtcgcgatcctgttccatgaccagcgcatccgcaagaattgcgcgatcatcaccgacctcgatcaggcctttatcgatctcacgacgaatccggctgacacccctgcgcagaagaaggcgaaggacaaggccactggatcgcagacgtcaggcgccgcccgagccgggcgattgaacactttatgcaccgggaacagctggctgagcacgcatctcgcgcactatacgtttgaagtcgattttattcgtgccggtaatgctgccgccgtggtctcgatcctgggcgaagtttatagcgatggcgcgacgatcgcgctggccaagaccgagctggaatccggcgatatcgtgcaatatggcacgcgcgtcctgaccatggcgaaacatgtcgggaagggctggttcgcgatcattctcggcaaggcgatcacacctgatgtccacatcccggactatattctcgacgccttgttcatggtgcatcggccggtctccgacgagatcctcgccagcatcatcgaccatcgcctcaaggttcagttgaagaccgtcggcgttcttcctgcacaggtagcggcgatgcgcgtctatctcgatctgttccggtcaggcgacatcgattttccgttcgtgcgaaccgagatgctcacggcctttccgggggatcgcatcaacactattctcgcgaggctctga

SEQ ID NO: 75555 - DNA, 1752 bp, Acetobacter orleanensis JCM 7639
gtgaaggcgatcgagcagccgggcagcgtcttcctcacggcgtgtccaggcagcgggaagacgcgcacgctgacctacaagatcgcgcgtgaactgtctttgctgacctccgacaaggagcgcatcgtcgcgatcacgtacacccaccgcgccgcggacgagatccaggagcgaattgagcagctcggggtcgataccagtcagctgtggatcggaacgatccatagcttctgcctcgaatggatcctccggccctatgccatctatcatcctgagctgaaaaacggcttccgggtgatcaatgcccatgacaccgagcgcgcgcatgaggctttgtgccgcacgcatgggagcaagctcagcgtcttcgactgcggccattatttcacgccgagcggctatgtcatcaattgtgatgactggaagctggggaaggtggatgcattgctccagcaatattggcaggatctgcgcacgagccggcaggtcgatttcgagctgatcctggtctatgcctaccagctgatccgagacgtcccctcgatcagcatcctgctcggttcgatcttcgcgaccatactcgtcgacgaatatcaggacaccaaggagatccagtacgccatactcggggcaatcctgaaggcgtcgaacgggaaggcgaaggcgttcatcgttggcgacccgaaccaggcgatctacggctcgcttggcggctacgcgatcacacctgccgaattttccaaactcagcggggtgacattcaaggaactcgatctgtcgaaaaactaccggtcgtccggccggatcgtcggctatttcgagaatttcaaccagctcacctcgaagatcaccgccgatggcgaattcaaggattttgccagcctcatctcgttcgattcctcgaccgatcgtaacgcgctcgaagctgagatcgtccgactcatccgctacaatatcgagacgatgggcatttccccgagcgaagtctgtatcgtcggtccgcaatggccgccgcttgcgagcatgacacgccagcttgtcgcggcactgcccgactacagcttctcggggccgggcatggtaccgttcgcccgcgacatcgataatttttggtacaagctttcgcgcatcatcctgacggaagcctcgccccagctctacgtccggcgcagtcgttgggcaggggaggtgatcgccgggctagatctggccggggtcaacaccagcgcgatcacgcgcaagtccctgctgcgcgcatcgaacggtatcacttccacaaagactgacggccttgaatatttgtgtgaatgcttcgatgcgctgttcgcggcgctcggcatcgaccgtgcgacctcgccgatgctcgtcgagcactacgacgcattcgtggaagggtcgcagctccggatcgacaagctgaccgcaaccggcggcaccgcgatcgccgagatcgcgatgttccgtaaggtcttcgccgagaagaccggcatcactgtgtcgaccatccacggcgtcaagggtgcggaatatgaagcggtcatcgcgttcggcttgctcgaaggcatggtcccgcacttcaaggaggccgataagattgcggccgcaaacaagcttctctacgtgatttgttcccgagcaaaaaagaatctgcaccttatctcggaagtgggccggcggcgggggcagaacaacgtatatcagcctaccgatatcctgcttgcttgcagttttggctatgaccagattccctga

SEQ ID NO: 75556 - DNA, 1929 bp, Komagataeibacter intermedius TF2
gtgagtctacaagagcaggtgactgctttcgttgggggaaacggtgcaggcaagacaacgctttttcaagcgctttcccgtctatttggtgtaatgaggacggataggactgttacaaaaaaagacttccatatcgctcagaacgaggaggaactgcctgacggacggtgtcttgaaatcgagtgcatgctcggtttccctgagttggatgatgaagaggacgaagacgccagctctgttcccgattttttcaaccaaatggctgcatcggagcctgatggaccgctaaaggtgcgtatccggcttgtcgccagatggatggaagacggtacgttggacggcacggtagaagaagatatcagatggatcacgacactcgacgacgaatttgactgggacgcttgtccaaaggtctccgccgttgatcgcgcgagtatccaggtcatctacgttcctgccctgcgcaacgccaccgaccgtgtaaccgagcttctaaaaggtcgcctctggagagcggcgctctggtctactgaccttggcgctcgcgcgacggaaggcgccgagcttatccaaaaacagtttgagcaagaggcgccagcagacttcatcattaagcgcctgacgcacaggtggcagcaggtttacgagggcgacacggatacgacccctaatcttcggctgatcgaaagcagaatcgaagaactggtgcggcgcgcggaatttgttttccatcctgacgaagctggtcgaaatcgggtccttgccgatctcagtgacggtcagcgttcgcttttccacattgctctgacggctgcgacgctagaaactgaacaggcagcgcttacactcgctgcaacggaaagcccgtttgatcgggaaaagctccgccgcacccacctgactctccttgcgattgaggagcctgaaaacagtctttccccgttttttctgtctcggatcatgacgcaggcacgggaaatcggagaaatggacacggctcaggcgctcatctcaagccatagtgcgagtatcctctcacgtattgaggcggacgaggtccgctattttcggcttgaccgacagacgcggtgcgcctccgtgaagcagctaactctgcctgaaggcgatacggaagcaagcacctatgtgcgcctcgcagttcgctcttaccctgaactctactttgcacggttcgtgattctggctgaaggggattcggagcagattgttctccctaggcttgctgaagtcagaggcgtgcagcttgacccttcttttgtgccgatcgtccccttaggcggccgctatgtctcacacttctggagactgttcaccgatcttggcattccctacgcaacattgttggattttgaccttggtcgagcccatggcggcgccaacatgatccgaagcgccttcgctgctctcaaacagataggccgcgatttcaccgcaaatcccctcatcgttgatggcacgatcgatctcgatgatctcgacgatctggttgatgaagatgttctggacgtctgggaagataataactggcttcaagccctcaggcatgaagccgttttcttttccgatcccatcgacctagattttgcaatgctggaggcgtttccggctgcttaccaacatcccaatccgggcggccgaggtcccaggacaacggaggaggcgattgccgagaaaaagacggtcgtcctcaaaaccaacgggaagccgggtatctacaaaggcgaccagtgggacgatagtttcgcttggtatccgtatcttttccttagtcgaagtaagccggaaacgcaccttgccgcgttgagcaggatcacacgtcaagacctcgcccgcggcgcaccaccggaattgcgcgcccttatcgatcatgtacgagacgttttgtttcccaagccggatgaagtgtga

SEQ ID NO: 75557 - DNA, 1863 bp, Komagataeibacter intermedius TF2
atgccagtcgcaccggaggattggcgaccgcaaggtgtcgatgaccttgaaccaggagcttgggatgctctgcgagaagctacacatagcgtgtgcgttaccgctggcgctggcgctggcaagaccgaatttctcgcccagaaggccgcctaccttctccagaccggcctttgtcccgagccaaaacgcatccttgcgattagctttaaacgcgatgccgcacaaaatcttgctgcgcgggttcgccagcgctgccctgcgaatcaggcccgcaggtttcactcaatgactttcgatgcattcacgaagcatatgctggatcatttccgtcttgcgatccccaacgcttatcgtccgccaatcgactacagcattgcctttcccacacgacgagacttcgacttattcctaaaaaggcacggtcgtccggatgtcagttctgatcggtttgaacaagcgatcgcccgcaccccactgccgtttgaaaaaactgttgaaaagctgtgcacaagagagttgcttcgagcttactgggatgaccagtacgccatgccggacggagcactggtttctttcgcaatgatcaaccgcctcgttgattacatgctgcgttcgaactcaaggatcaagcgcgctctgcgcctgacctatccctttgtttttctggatgaattccaggacacgacctatgcccagtatagtctcgtaaatactgcattcagaggaagccgttctatcttcactgctgtcggagacgataagcagagaattatgggttgggcgggagctatgaataatgcgttcgatgagtttgttgacggctttaatgctgttcgccatgcccttctcaggaactggagatcacacgaggcgcttgtcggcattcaacaggtcatcgcacgacagattgatcccgacgttgaagaggtcgaggcccgaggacagttggaggtcgacggcgcaacggcagcgatttggcgttttgacaaccgtgagcaggaaacgcagatgatagcgcgatggatcagaagagaagtcgacgaaggccgcgttgcaccgcacaatgttgccatccttgtgcgtatgcgcgctaatagtgttgaggacgagcttgcacccgttctgcgtgatcacggcctgacattacggaatcttgccaggaacgtcggtgaaattgccatccaggatttgttagtcgagcctcttacggaagtaattcttccacttctaaggcttggggcaagtgcccgtgcaccagaagcctggagcgcggcgcaagatcgcctgcaagcattggcaaacgttagctcggacgacgaaaccgtgcaggagcgattacagcgcgagattggagagttctctaggaaccttcgacagataatgcgtgacgagccgcttgatacggcagtggctaaccggctgttcgcgcagaccttggacttcgtcggggtggagcgtctgcggcaagcttatcccgaatatcggcgcgatgctgattttcagcgcgtgcacaacggctttcggatccttttgcgagactgcgtcgagaacgctgtgaattggaatgatgttcttgatcgcttcgaaggtaaaaatcagatcccgctcatgacaattcacaagagtaaaggtcttgaattccacactgtgatctttttcgggcttgatgcccaaacatggtggagcctttcaccggagcgtaatgaggaactcaattcatttttcgtcgcttttacccgcgccatgcaacgagcgttttttgcgtgctgctccgagcgagggaagccgattggctggttagaaaagcttcttttaccagctggtgtaaagcaggtcgatggagttgatatcatcactccgtaa

SEQ ID NO: 75558 - DNA, 2121 bp, Enterobacter cloacae
atgtatatcaataaattagctattagaaattataaaaactttcgaagctcaaatttctgctttgttaaaaactcagtgaatacaattatcggtgagaatgcttcaggtaaaacaaatttgtttaatgctatgcgattgattcttgatgactcacttccaatgaattcaagagttctatcaggtgaagatttttatcgtggcttaaatgaccccttcgggcactggattattatcacaatgtattttgatgatttaagtgaatctgaagaagaacaggttattgcgaactatacaataaataatggtaacgaagaggcattaaaagaaggaaattatacatttatatatcgcccaagatttcatattaggcaaaagctatacgagttaactgtagataataaagatttagaatcaagattagaggcttttacagagttgaaatcaacttgtataatatccaaagagacttacgaggctgtcgcttttgttagaacaaaagttgattttaataatgacgaagtttataagcaagtagttggggattttgaaaattacattttttcaaatcccaatgaagatgatgctacagtcattggtgtaaaaaaaccgccatacttcgccttaggtagtgaagttgcttgtacttatgtcaaggctcttcgcaacgtggtagctgatttaaagtattataaaactaatccactgtataaattgctcactttaaaaagcaaacaaattgatgatagaaaagatatttctgagaatgttaagaacattaatgaacaaatttcagcaattcctgaaattgctcgactaagtaataaaatatcaacatctttacttaatacggttggctcaacatattcgccaaaaatattggtttcatcacaactacccgaagattttactgaattaatccaatcacttggattagtagtcgaggattctttagattatgacggttcaggaagaattgatgatttaagtcttgggggggcaaatttaatatatttggctttaaaattatatgagtatgaagaaattagagatgctgaagagcatataactcatttcctattgattgaagaaccagaggctcatatacataatcatatccagaaaactttatttgacaattttaattttcaaaatactcaagtcttcgtttcgactcattcaacccaaataagctctgtttctaaaatctcgtcgatgaatattttggctcggcaacgaggatatacagatatctatcagccttccaacggactacagccaaaagaaatttcgtcaattgaaagatatcttgatgcaatccgtagtgatgtgttgtttgctaaaagtgtaattctcgtagagggtgatgctgaattaataataatcccagaacttataaaggtcactttaggtattagcttggatgaattaggtattagcttaataaaattggatgggactgtatttaagcatatttcaaatctttttcatagtaatagattaaaacgctattgcgcaattttaactgataaagatttggcatatgtgcaagaaccggatgaactatttgatgctgatttcgttgaatctttgaaaaacgctgagactgacggtttacgcagagaacgagagttggcagagtatgtagaaggcaatcaatttgtctccgttttttatgcagagaatacgtttgaaacagagcttgttcggtatgatgaaaattccgatcttttcaacagtgtcattaggacaacatataaaagatcaggtgatattgagcgagttgttgcaggtattaattccgatgatttacgggtaagatttagaactgctctttttttcgccaataaaataggtaaagggtggttagctactgaaatggtagagtatctccataatgagaatcgtgttcctgactatatattaaaagcgattcattttgcacttaaagatagagaactgaatgctgtgcttactaaaatgcttgcctataatatgtctttaatgggaactcactgggatgatgtatgcaacaagattaattctgaacctgattttgataaaaagatgcaagagtataggaaacatttcaatgatagcttttctagattttgggagttgtaa

SEQ ID NO: 75559 - DNA, 1752 bp, Enterobacter cloacae
atgccatatagaaatttgacatctgaacaactagatgctgtaaaatttgatggcaatctattacttacagcttgtccaggttcaggaaaaacaaaaacattggtttccaaactttgttttatccttgaaaataaggagttgtttgatataggtaagaaaaaaattgtggcattgacatacactaatgttgcagcagatactattctcgaaagaattatttcatatggtataaatagcgattcattgtggattggaacaatacatagtttttgtttaaattggattataaagcctaacattgatagaattccaaggctcagcaaaggttttaatgtaattgatgagtatgaaaaagaatttatattaaatgatctgagagaacgttataacttatctccttacgataaaatagatacgcttttagacttaagttttactccggtatattctcgaaatactgctgaatattcagtggtaaaagcctatcactcctatttgtatgagaatcgattaatcgattttgatttgattttgaatttaacgtgcaatttattattgaagaatgatgtgctatgtgaaagactatctttaattatgcgatatattttagtcgatgaatatcaagatacctctcatattcaatatgaaatactaaggctgatagtaagtaaaagaaattccttggttacttttattggtgataaagaacaagcaatatatactggattgggagcggttgttaaaaatagagaagagttgttcgattacttcaaccttgaagaattagaagaaatgaggttaaccggttgtttccgtagtagtcaatcgatcatagatttttatagcaaatataaagatgatgcctattatattaattcattgtcagaactgaagacatttccttctgtgatactcaaggaaaatagtgttgatatcacccagttgtctgtttatgtttcaggaataataagaactcacttagaacaaggtatttctcctggtgaaattgctgttctatgcccaagttggtttgatgtaataaaattatccaatgaaattatatcactaaattctgatctggatatcgatggtatcatggtttctcccatacctaaaaataatgaaaacttgtggctcaatcttgtaaagcttgctttaattgaaaagaatccatctaattatcttgttaggaaaaaacttttgcgagatttactcaaagaattaaatgatttagagtcatatacaaaattcttatctccaaagcaaatcataaaagaaataaataaaatagaatttgcattggattataattgtgaaatagatatttggataaaaaatcttataactaacttctgtagttcattaggattggatgttaataatcaaagctatgcttataaagaaatgatctgcttgatagatgctactaaaaaacgaatggctaaatatagtatgaactatagggcaaatgatcttcattctttttttaattttaaaagcggagttaaaattacgacttgtcattcgacaaaaggagatgagtacgatgtcattatttgcaccgggctattaaatggaaaaataccaaattggaatgacattatagattgtagccctgcacatcaaaattatgtggctcgcaggctcttatatgtcatagggtctcgtgcaaaaaaacatttatatttgatatctgaaagcggtcataagacacaaaaaggttatccatatcaggtcactccacagctttaa

SEQ ID NO: 75560 - DNA, 2139 bp, Enterobacter cloacae; identical to SEQ ID NO: 74086

SEQ ID NO: 75561 - DNA, 1785 bp, Enterobacter cloacae; identical to SEQ ID NO: 74087

SEQ ID NO: 75562 - DNA, 1701 bp, Enterobacter cloacae; identical to SEQ ID NO: 75204

SEQ ID NO: 75563 - DNA, 1626 bp, Enterobacter cloacae; identical to SEQ ID NO: 75205

SEQ ID NO: 75564 - DNA, 2121 bp, Enterobacter cloacae; identical to SEQ ID NO: 75558

SEQ ID NO: 75565 - DNA, 1752 bp, Enterobacter cloacae; identical to SEQ ID NO: 75559

SEQ ID NO: 75566 - DNA, 2139 bp, Enterobacter cloacae; identical to SEQ ID NO: 74086

SEQ ID NO: 75567 - DNA, 1785 bp, Enterobacter cloacae; identical to SEQ ID NO: 74087

SEQ ID NO: 75568 - DNA, 1734 bp, Agrobacterium tumefaciens; identical to SEQ ID NO: 71924

SEQ ID NO: 75569 - DNA, 1743 bp, Agrobacterium tumefaciens; identical to SEQ ID NO: 74819

SEQ ID NO: 75570 - DNA, 1785 bp, Achromobacter xylosoxidans NH44784-1996; identical to SEQ ID NO: 71894

SEQ ID NO: 75571 - DNA, 1815 bp, Achromobacter xylosoxidans NH44784-1996; identical to SEQ ID NO: 73827

SEQ ID NO: 75572 - DNA, 2037 bp, Achromobacter xylosoxidans NH44784-1996
gtgaagctgtccgaaattgccatcacaaacttccggctgctgcaggacgcgcggatgcggctggacacggcggacatcaccacgatcctcgtcggccctaacaatagtggaaaaacctcagcgattgaggtaatgctgacctttctgcaaaggccgatcaaacatctgtcaattaacgacttttctttgggttgccgccacgccttcaagagctttgaacagcatgttctgacgtcccccgcggctccggccggtggagaggctaccgcagatccggcgccagtggctcctcccctcccagccttgcctgccatgtcgttgcggctgaagttcgattacgacgacacgggcccagatttggccatagcgggcgaactcctgatggatctcgacgacacgtccaactcggtagtgctcgaaatccggttcgccgccgttgatcctgagctgctggcgcaggcatacctcaaagaccgggaccacgatcagtcgcttgtcgactatctcgcgttcacactgcatgatcactacaagatggaccagttcaagctgagtcccgacggtagccaggcggagcgcttgccggaccgcggcatcttgcagcggctgatccgtatcgacgtcgtcagcgcacagcgtcatatcgacgatcgcgaagaaggcagcaaggccacccgcctgtcgacgctgctacacgcccactacgagcgccgctacaaggtcgactcgcccaacgatttcaaggcgctcgagaagacgctgcgagaccaatccacggccctcggcccccagtacgtaaaggcgttcgacggcctcatgaaggggttggccaagtttggccaccctgagtctcctaagctgacggtccgcgccgaactcagcgccgatggcctgttcaaggacaccacgcgcgtctactacgccgccgtgagcgcaacctcgacaccgggcgagggggccgtggcggcgattgaccaggcgttcgagcttccagagcgctataacggcctcgggttcaagaatctgatctacatcgtcctgtgcctgaagtccttccgtgaggacgtggagtccgatcccgagcaccgtccacgcgtccatctagtggtcgtcgaggagccagaggtgcacatgcaccctcagatgcaggcggtattcgttcaaaaagttagcgagttcctcaaaccctccgcaggcgaaactgcggtgcagctgcttctgacgacacattcatcgcacatggcggccaactgcggtttcgcgccgatccgctatttccggcgaaacaagggatcggtcgagatcaaggacctgttgtcctttgagtcttccgcgacgaccgcccccgaaaaggccgcaatggagttcctgcggaagtatctgacgacgacgcgatgcgacatgttcttcgcagacaagctcgtatttatcgaagggcaggtcgaacgcatgctactgccgcgattgatcacggccctggatgtcgagctgcgcgacaaactcacctcgacctacgtctgcacggtagaggtaggcggtgcgtatgcacacctcttccgaagattgatcgaatttctgcaattgccggcgctcatcatcacggacctggactcgatcgatggcacatccaagaagaaggcgtcggtcgccaatgggcacgcaagcagcaatgcaactctgtctcagtggctgccaggaagttctgatttaccaacgctgatggctgcgggcgaggcgcagaagacatcaggccgggtccgggttgcatatcaggttcccgaagcagcgggccagccgtgcgcccgcagcttcgaggaggcattcgtgtacgcgaacgcggcctggctcatcacgaacaagggcaagcttttaggcaccgggggaatgtttactcatgcagatgcagcggcgctggtcgccgacgcatacaacgtcagcctgcccaaggtcgacttcgcgcttgacttgctggccaacgaaggctgggtaacgcccatgtacatccgcgaggggctcgaatggttggcgaaacaatag

SEQ ID NO: 75573 - DNA, 1758 bp, Achromobacter xylosoxidans NH44784-1996
atggttggcgaaacaatagccgcaggcgtggccgataagacggccgacgagcgcatagccgagtgtcttgtcgaaggccggagtttcgttctcgacgccggcgccggtgccggcaagacctactccctcgtcgaaggcctcaaaaagctttgtgcgccgccgatcgccgatcggctaaggcgcgatggacagcagatcgcctgcatcacctataccaacgtggccaaggaccaagtcatcgagcgtatccagggtaaccctctggttcgtgtgtcgactatccacgactttttgtggagcacgctgcagccccatcagcaagcccttcgacaggctctactcgaactgaacgcggccctccccgccgggagcacccgccgcgttaatccagccgaactggaagcaagggtcgcggcacggttcgaggtgaagtattcggatcggggatccaagttcctcgaaggacggatccaccacgacgacctgctgtcgatcgcgcgcatcgcctacacccgttacgacaagctgtcgcgcatcgtggcgagccgctatccgttcattttcattgacgaatatcaggacaccagcgaagccgtggtcgacgtcctgctacgtcggatgttgccgctggtcggtgactcgctcgtgctcgggttcttcggcgacaagatgcagaatatctatcaccaaggtgagcacaagggaattggcgagctgcctgctaagttggcagctccgctggaggtcatcgtcaaacgcgagaaccgtcgctgctctctgcgcgtcatggatgtcttgaataagatccggaccgacattacgcagattcccggaaacaacaacccagaaggcgatgttgcatacattcgcgttgcgactggcgccgatgaagccggtttccagcgcgctcgggatttgctcgcgaacacgctgaactgggacttgacgggcccggaaacgcgggagctgtacctgacccatcgcttgatcgcccgcaaagccggttttgccgacctgcttcaagccttcactgataggggggcttttgctaaggacgccctcaccgatggctccgaccggcggatctcgtttttcctggacaaggttgaaccgctggccctcgcctgggagaaggggcagattggcgagacgctgggcaggctccacagtgcagggcaccgactcgccagtcgcgcagccaagtcaggtgtacgcgaggcgctcagaaccctaatggcaaagcgcgctgctgggacggtccgtgaagtgctggagacgattctagatcggcagctcttcccgctgactgatgacctggcccttaggcttgcgaacacgcaacccatcctcaccgcggacatggacgacgctgcgaaagagcgcgagcaactggacgcgactctgtatgcagcctttttcgaactgccgtatcagcaggtcgctgcgttcgcccggttttacatgaccagcactccattctctaccaaacatggagtcaagggtgacgagttcgataccgtgcttgtcgtgctggacgacgccggcgccgcctggaacttctactctttcgacaagtacctatccggtgtggatgagacggcgaatccggggcgtgcgaagcgctctcgcaacgtcttctacgtttgctgctccagggcccggaagcggctcgcggtaatcgatcttgcgggcgcatccgcagcgaaagcggagcggatgcgtgcactattcggtgccgatcgatgccatgaggtttag

SEQ ID NO: 75574 - DNA, 2235 bp, Vibrio neptunius
atgaagattaattttgtacaaatccaaaactttcgaaaactaaagaactgtagggttaaactgtcaggcaatgaaactttgctagtcggtgcaaataatagcggtaaaacctcggctacggatgcccttatatgctttctcgacaagtcgcggaagattacagttactgactttaccttaagtaactggtcggttttaaatcaatacgcagaatcttggcttagtaccgacccaaaagagttaaaaggaaaagatataagcgattggattccgtactgcccttcacttgacgtttggcttgatgctggagttgaagatgttcacagagtggcacatttaattccaacgcttaaatggagaggcgagcctctgggtatcaggctaacatatgaacccaaagatatcgaaaagcttagagagaactttttacaagatttcgaagctatagatgacttacgaaccgacgagacaaagctatcgttttggcctagggatttaaaagattacctcaatagaaagttgtctgattcctttgttatcagagcttatatcttagaccctaagaaaatttctaatactcaagatttgccaaaggacgccactccattagagaaagatccttttaaaggcttgtttaaagttgacactatagaagcacagcgcgggttcacagatcctaatagtgagcaagtgaatgcagggagcactctatctagtcaattgcacgaatactatattcgtcatctaaaccctacagatttacctgatgaggaggatcttcctgcattgaaagcaattgaggaggctcagacggagtttgataaaaaattggacaagtcgttcaagggagcattgggggagatacaagcgcttggatatccgggattcagtgatcctgaaattaaactatcgagtcgcgttaatccgattgacgggctggaacatgatgctgctgtgatatttgatattcaaaagcaaggttttgataaccacacgtactccctaccagagaaatataatgggctgggatacaagaaccttatccatattgtattcaagttgattacgttcagagatcggtggcaaaggatcggtaaagctcaaaaaagaagaacagaagatgatgttgcaatagaaccaatccatttggtattggttgaagaacctgaagctcatctacacgctcaggttcagcaggtatttatacgcaaagcctatgaagtccttagaaagggtatcagcaaacaatttactacgcagatggttcttagtacccattcaagctacatagctcatgaagctggctttgagaaattgcgctatttcaaacgcaaagccgcagttagtatctctgatgtgccagaggccgaggttgttgacttatcttcagtttttggaagtggtaagaaaaaggctaatgaggacgaacaggttcttaacactcagaagtttgtttcgcgttacctcaagactacccactgcgattttttctttgcaaatggcatcattcttgttgaaggtacagcagagcggatgctactaccccattttattaattacaattatccagagctacgaagtagctatttgtcaatactagaggttggtggtgcgcacgctcaacgtttgaaaccactaatcgatactctggccttacctactttggtgattaccgatacagatgcgaagggcttggatggcaagaaggttcagcctgaaagaaataacgattataagtatggcagtgatacgcttagggagtggtttgaactgaaagacctaagtctggatgacgtactggatctttcaaatgataagaaagttaaaggtaatgtcagagctgcataccaatatggtttcaaggtcaaatatcacacagatgccgaagaagaggaagcgattccatacacatttgaggatgcaatagcgctcagtaatattcaactatttcgagacttgactagctcaactgggatggtcaaaaagatgcacgaagcgacgatgaaggattctttggaagaatgtgccgccactctatacagagccttagatagtaaaaaggcgaagatggcattggatcttttgtatgatgttgatcctaagaagctaaaagttccaacctatattgatgaagggcttcagtggttagaaaacgagctgagcaatacttaccaagaatttgtttttgcagaacccgaagaggttgaagaacccgtacctttggaggatctctaa

SEQ ID NO: 75575 - DNA, 1851 bp, Vibrio neptunius
atggtagatactcatagtcttaaagaggttgataaagagatttatcaatatctaaacattgacgatcctacgagttttttattattcgcgggagctggatcgggtaaaacgcgaactcttgtaaatgttcttcaggcggtacgtgacaatggccttcataggtttataaaagcaggacagcgtattgccgttatcacctacactaatgctgcttgtgaagagattaagcatcgccttcaatacgatccaatatttgctgtctctaccatacacagctttgtttgggagttaattaagccatttacgagcgatataaagacatggttggacgccgatctaaaagcaagtatttttgaattacaagaaaaaattgataaagcaagagacaaatcagctaagacggcagtaaaaaacgctcgaagtagagattcaaaactaaaacggttagaaaaactcgatatagtacagaattttacatacagcccaactagcacacggttgacaacaggggctttgacacatgcagaggtaatcaaaattgccactgaatttttaactgaacagccattgttccaaaaagtgttagttaacaagttccctatattactgattgacgagagtcaggatacaaataaagggctgatggacgcatttatacagacccagcaaaatcattcgggctgcttttctttaggtctttttggtgaccttatgcagagaatttatagcggaggtaaagaagacttagcgacaagtctaccagagaactggaaaactcctgaaaagaaaaccaactttcggagtccaaaaagggttatcaggctaattaacaaaattagacatgaggatgatggcaaacaacaaactgaaaagccagatgcagaagaaggtattgttcgcttatttattgcccagacacccaacgaaaataaatcagaggttgaagcgcatataagagagcagatgcgagctataactgatgatgagaattggaaagatgccagtcaggtaaaaacgttaacgcttgaacatgctatggcggctcgtagaggaaagtttgacgaatttttcactccattgtcagcggaggatagcctcagagattccttactaaatggaacgagttcgacatttaaattttgtactcatcaggttttacctttagctcatgcgattcgtaaacaaaatgactttgaggttatgagaattattaagaaatattctcatttgatcggaggagagaataaagagttccttgcagatccgatagctctattagcttctgtggaggatgcagttagtaaggttagaactttgctggagaatgatattagcctcagagaattattgttattaatagaaaagcatcaactgttagaaatccccgatatcttgaacgaccttttagtggaaggtatcgcagatcttgcagaggacgttgagtcaccttccaaccaaaaagcttgggatacagcacttgatgcaagactgagccacgttgaaaactatgctaaatatgtcgcaggcgagttaggtttcaccactcatcagggagttaaaggattggaatttgatcgcgttttggcagtaatagatgacaaagactcaaagggctttcttttcaagtatgagaagttctttggtgctgagaatctgtcggctacagataagaaaaatgaggaaaatggtatagactcagtcctatccagaaccagaaggctgttctatgtaatatgcagtagagcagagaagagtcttgctgttgttgcttactcacaagatcctttagcagtcaagaatcgtgcgattgatgctgaatggtttgataaagatgaaattatactgatttag

SEQ ID NO: 75576 - DNA, 1755 bp, Marinomonas sp. S3726
atacatatatcaagagtcaaaatagagaacttcagaaattttcaaaattttgaaattattactaataggaatatggttgttgttggggaaaataaagttggtaaaagtaattttctttttgcccttagactgatacttgatccttctttgtcagaattagaacgatttctcaatgttgatgacttttgggatggcttaggagtgaataaaattgggaacacaattaaagtatctatagatattgataatattaatagctctgaaacgatgttgtcggtgttagccgatgggctagttaatgttgcaacgcacactgcaagaattacatatgagtttaagcctcgtggtggagtcgaaaatcttactattaatgactacgaatacattacttatcttggaaataataccgaaaaccttattcctcgtacctttcgacgatgtttacaaatggagctttttcatgctttgagagattgtgaaagagagctcaaaaatagtaatcgctcaccaataagagcttttttagatgatgtcagtaagaacttaactgaacaacaaaaggtttctatagccgcaggatttgaacaaacacaaggagcacttgatggcgttcctagtatcgataatatagctgttaacataaacaatatgcttgaaactattgttggtactaatcatgttacacaggttagtttgaagttagcaccacaggacataaataaactcgttagatcattgcaattattgatagatgcaggacttaggacagtaagtcaagctagtactgggagctcaaatatactatttttgactttaaagttacttaagttgcagcattcgattcaacaaggtgaacaagagtttacttttttagcaattgaagaacctgaagcgcacttacatcctcatatccaaaggctattgtttgactatttttataattcagaagcaaatctaaatactatattaacaacacactccccacatatagctagttccgcaccattacaatcattaattgtgtttaaagaacacacgactggtgctcaacgctcaactgcgggctattctttagcaaactcaactttaagtccaaatgatattgaagatatgagcagatatttgactgtaacaaaaggagagatgcttttcgctcgaggagttattttagtcgaaggagatgctgaggagtttttaataccagagttagcaaataagctaggttatgaactagataaaaagggcatttcaatatgttcagttgcaggtacaaactttgcaccgtatgtaaagtttttaaatagcattggaacaccatttacgattattacagatcgagaccctttaaacctacctgttcctttgggaataacaagaattgataagctattagaattgattcttcctacttatcgagaaggcgtaaaccctgaagctacgatcatctcaataggtcaggctcaaggtattttcacgaacattcagactcttgaaactgaattaatcagctcgccagtcttaaaaactatcatatgcgatattttgttagaagagcatggggagaggcaacgtgttggaccaattattgaaagttggaaaaataatcaaacgactgtagatatgccagcattactaaggtacatacaagaaattggtaaaggtcgctttgctaagaggctgagtcacagactacctgatgggcagtgtcctcaatatattatttcgtcttttgagtatattactaatgcaacgtaa

SEQ ID NO: 75577 - DNA, 1830 bp, Marinomonas sp. S3726
atgcaacgtaatgtagctagtttatataaaaccgaagctcttcaattaaatgagttgggtcaaaaggctgcctatgactctaatactaattgtgctgttattgctggaccaggaagtggtaaaacaaaaactttagtattaaaggtcgcgaaaattcttgatgaagaaatcaatgactatcagaaggttgcatgtataacatatagtcgtcaatgttgtagggaattacaacagaggtttaaaaaaattggtatatcttcaaatgaaaatttatatgtcgggacggtacacagcttttgtttaagtcaaatagtgtccccattagcacacctgattgagtcggaattacccgtttcatattcaattgccaatgaaaaacaacgaaacgatagttttgaatctgctaaagcttatataggtgatgcagcaaaatattgcagcttcgcaactatgacaaactatagaatgtcctatcttgaacgtgacgaatcttttgatagtaatgatattctgtatgctaatttagtcacaaactatgagcagtttttacgaagtgctggcttagtagactttgatgatctaattttaatctctcgaaagatgataaaagattatgcgtggataagggatattctgaaagcaaagtttccaattattgtcatagacgagtatcaggatttaggaaaaccattacatgaaatagtattattactagttgatcatggcgtaaaagtaatagctgtaggcgatgttgatcaatctatttatggatttacaggggcccatccagaattacttttaagcctaagtgaacgtagtgattttgataaagtagaaatgaaacttaactatcgttcagctcaaaatatagttaatctttcggatggtttcgtgggtactaataaaggagttgttgcacataaccagaatagagttgcaactattgattaccatttatgccctaatgggctagaagagcaagttgagcaggcactagaaaaggcactagattgcgtagatgtgttggaggagagaacacttagtgacgtcgcaatattatacccagacgcaaaaataggcgatatagttgcacaaaaagcatcagaaaaaggtttgttttacaaccgagtagataataacgctccatacagaaaaaatccaatgacaaatttcattgaagactgcgcgtcttggattacatttgactggaaggaacaaggtaagagtatttgtttaaatgatctaataaagtcctatactttgcttactcgtaactttattgatgatatagattcagctacccttaatttcgtcaagtttttatggagttccaaaaacatatctcatttgattaccccaggcgcttttgtgtgcaagatgattagtgatcacttttcagtatttattggtgagcctagaacaaaggatgatttcaatgaagttttgaaaatgcaaagttcattgaaagacaatggagctcttcacaacataaacctacagatgcttggagataataggaatcaatcagacaagctcaaccttataacatatcactctagcaaaggttgtgaatatgacgttgttatcgctataggattagataatggagtttttccaaggttggtttataaccctagagaaaaagcttggtactatcctgaagataaagaacttcaagagaagagacggcttttctttgtagctctaacaagagctaaatatgatgttcactttttcaagtcggaacatttttataccagaagtaggtataaaatgaattacgggcaaagtatttttttagatgaattagataaaaaactaaactcttaa

SEQ ID NO: 75578 - DNA, 1989 bp, Pseudoalteromonas sp. S2292; identical to SEQ ID NO: 74524

SEQ ID NO: 75579 - DNA, 2028 bp, Pseudoalteromonas sp. S2292; identical to SEQ ID NO: 74525

SEQ ID NO: 75580 - DNA, 1830 bp, Flavobacterium sp. 316
atgtatttacaaaatataaaactttggaattttagaaagtttggttctgatggagaatttaatattgaaaaaccaaatttaaatttaaacttctctaaaggtttaaatgttattattggtgaaaatgattcgggaaaaacagcaataatagacgctataaaacttgctctaaaaacacatagttacgattacattagagttgaggataaagacttttttagcaattcaaatcgttttagaattgaattgatttttagtggattaattccagatgaagcaaaaaattttactgaatggcttggatggaatggctcaggagatgatacagagccatatttaaaactaaattatgatgtaaaaagacaagaaaaaaaaattttaccaagtgatttaaaagctggtgcagatgaagatggttaccaactaactgctgaagcaagagagtatcttaaagctacatatttgaaaccgctaagagatgcagaaaacgaattaattgcgaaacgtaattcaagattatctcaaattctattgggagattctgcatttaaaggaaaagaaactgaccatgaacttgtaattatatttgaaaatttaagtagagaaattgataaatattttaaaggtcaatttgaaatttcaacagcgaatgatgaaggtgaagaagtaactatttcaccacaagaaggaaaggtcattaaagacaaaattgatggatatattaaagggttttatagcaatgaatatgaagctgaatttaaagcttcatcaaatgatataaaaagtattcttgaaaaactaaccttattcttaaaagatgaattaaatcctggactgggaacacttaacaggttatttatggctgctgaattacttcacttgaacaaatcaaattggagtggtttaagattaggtttggtagaagaattggaagcgcatcttcacccgcaagcccaaatgcaagttatagaatctcttcaaaagcagaatgcaatacagttaattctaaccacacatagtcctaatctagcatctaaattaaaactcgaaaacttaattatttgtaataatggtaatgcttttccaatggggtctgactatacaaaactagaccccgatgattataagtttttagaaaagtttcttgatacaacaaaggctaatttattttttgcaaaaggaatcattttagttgaaggatgggcagaagaaatactaattcctagtatttcaaaaaatataggtattaatttaactgagaaaggaatttcaattgttaatgttggtagtcttgcatataatagatatgcaaatattttccttagaaaagaagacccattaatggacataccaatagctattcttacagattccgatattagggaatatgaaaaggtacaaactggaggtgaatcggtatatcaaaaaagagatttagcaacaataaaaacagaaacagaccaaaaaattgctgatttagaagccaaatcagaaaataatgtacaatatttcatcgctccaaattggactttagaatattcattgtttaaatcaaatagtttaacaaatacatttaaaatcaatgctaaatctattcatactggaacagattgggacacagattttgaaaaatcgttagctgaaaaattgattaataaagggctaaaaaaaacagagattgcttacaaaattgcaaatgctattgatgaggacttaaaaaattatgaagagaaaaaaatagatgtaaaaacaataaatattgtgactgatgatggagcagacagtattaattatctagtaaaagctataaactatgttacaggaaattaa

SEQ ID NO: 75581 - DNA, 1980 bp, Flavobacterium sp. 316
atgttacaggaaattaatataactgatgaagacatactttattctgaaaagattcttttacctgaaggtaaaacctttgatgatgaaagaaaagagtttattcgtaattttaatacattagatttacaagctgttccgggaagtggaaaaactaccacactattagcaaagcttttaatactagagaataaattaccattttctgatggggctggagtccttgtgctatctcatacaaatgccgcaattgatgaaataaaacataagatacaaaagcattgtccaaaattattttcttacccaaattttattggtacaattcaaagttttgtagatgaatttttagcaattcctttctactcttctaaatttaagaaaaagcctattagaatagatagtgagatttttgatgaaatagcaagcagttattttcataatttaccaaattcaggtgccagaaactggctatatcagcaacacgaccctgaaaacttctttaaaaatttaagatttgatgtaaacttaaatttattaaaaggaatgaacggagaagtttgtttaaggcgtcagaacgattccccaacatataaaacattcacaactattaagaccaacatattaaaatctggatttctaaattatgatgatgcatattttttagctgaacgttacttaatacagttccctgaaataaagaatattttgcaaaagcgtttttcctatgtctttgtggatgaaatgcaggacatggatactcatcaatatgatttattggaaaaactattttttgacgagggaaatagtatttcaaattttcaacgaataggcgataaaaatcaagcaatttacaactccgttaaagtaaatgaaatttggaatgatagacaagaaattttaagattaagtggaagtcaaagactaagtaaggtaatagcagatatagtttgtggttttgctttacatactgatgttgattttgaaattgtcggattaaatgaatgtgggataaaacctcatattttagtttttgaaaattcatcaattaaagacattattccacattttactcaactcgtgaaaaactttaaagaagatggtagtttaattgattttgataaatatcccactaaggtagtggcttggaatactgaatggaaaacgcaaacagaaaaagataatattgctaaactaagacttgtagattattataatacctttaaaaagaataaacaaaaacctaaacaagactataattgcttaaaaagctatcttttattttatgataaaaacaaattgacactagaaccaattcgaaaaaatatattgaatgcttttttaaagatattgcgccttgaaaatataaataatgaagacggtagaacctttacaaagaagaaattaatagattttataaaacaaaaagattttgcttttcacgaacaatttagtctaaacatctataattggtcaattgttataattaaagggaaaataaatgagatttgggatgaaataaaaggatatatcccagtttttttaagtgtttttccagatgctcaaatttcatctagctcaaatttcatatcaacagatgttgaagatattttaattgaaaatattgaagaaccagaaactacaaacatttataaagaaggcgaattagagatagaagtgactagtgttcacgctgtaaaaggacaaacacactgcgctacattatacttagaatctttttttgatagaggttatggaaattacgaatcagaaaggctacggaaccagtttttaggaacacagacaatatctcaaactcttgcttttgttccaaacagccatgataaaataatacaatcagcaaaaatggcatatgttgggttttcaagacctactaattttctttgtgtagcagtccataaagataggtttaattctcgtttatctgatatagatagaaataaatgggaagttattgaaatataa

SEQ ID NO: 75582 - DNA, 1848 bp, Flavobacterium sp. 316
atgtatatatctgaattaaaactttggaattttagaaaatatggtaatgcgtctaatgatttagacttagaagccccaagtttaactgtgccttttgaaaaaggaatgaatattttaattggtgaaaatgactcaggaaaaaccgcaattattgatgcaattaaattagttctaaaaacgcacgcttatgagtggataaaaattgaaaaatctgattttaattcaattactgaaaaattaagaattgaaattcattttaaaggaataactgatgatgaagctaaacattttatagaatggttaggttgggatgatgaaaaaaaaccaaaactgattttaatttatcaagcagaatacagagataaccgaattattccatctgatgttaaagcaggtatggatggaacaggattccttttaaatgctgaggctagagaatatttaaaatgtacttatttaaaagctttacgtgatgcagatagtgaattaatggctaaaaagaattctcgactttctcaaattttacaagaacataaattatttaaaaaaagaaagggagataatagtaaacatgaattagaacatatttttgaagatgcaaatggtttaattaaaaactattttaataatgataaagaaaaggatgatggtcaaaaaagtaataaaaaacaaattgccgaacctattaatacatttttaaaagattttatagatgataactatatttcaaaatttgatataactgaagcagaaattaaaagtatcctagaaaagatttctttagggattgacggtaaagataatttaggattagggacgatgaaccgattgtttatggcggcagaattattgcatttgaaaaaagataactatgatggcctaaagttatgtatgattgaagaactggaagctcatttacatcctcaagctcaaatgaagattattgaaaccttggatagagagtcaaaaaatggtatccaatttatacttacaactcatagtcctaatatcgcatcaaaagtagatttaaagtctttgataatttgtaaaaacaataatgtttttccattgggggaagattatacttatttgggtgaaaaaacgaaggaaagtaaatatgaaaatagttataaataccttaaacgatttttagatgttaccaaatcaaatctattttttgcaaaaggtgtgattttagtggaaggttggtcagaggaattattaataccagaaattgcaaaaaaattagattgtgatttaacaaagaaagaaatttctattgtaaacgtaggttctacagcatatcttgattttgcaaaggtctttttgagaaaagatggcaacaatgagttaaatattccagtttcaataataactgatttagatgagcgagaatatgaaagggaagctattactgaagtaggaaaacaaaaaaagatttccggcaaaaaacaatacacgtttataaagcaaaatataagtaaccacgataaattagtaaaagataaagaaaatcagattttagataagaaaagtgactatgtcaaaccatttgtctctaaaaagtggacttttgaatggtgtttattaaaatcatatattttgggagattcattcaaagaggttttaaaaacagtacattctgatacatttaataacatagattcagaggatggatacgaaaaaggtttagcaaaattacttttaagtaaaagtcttaacaagacagaacttgcttaccaactaagtgaaaaaattaaagaattcaattcattcgatttcaatggagatgataccttttactatgtagttgatgctataaaacacgcttgtaaagatggaaattga

SEQ ID NO: 75583 - DNA, 2052 bp, Flavobacterium sp. 316
atggaaattgaaaaatatatacctcaagctgaaaaaatctttttaggagaaggtacttttaaagatgacagaaatgagcgaatagattttattaaaaatctcaaaacttgtgatttattagcagttcctggaagtggaaaaactactgctttgatagccaaattatattgtatcgctcaaaatatgccttttgaagatggttctggtattttggtattagctcatactaataatgctgttgacgaaatagaaaagaaactaaaaagacattgtcctcaactttttgaatatccaaactttgtgggtactattcagagttttgtaaataaatttttagctattcctaactatatatcacattttaaacaaagacccataacttttgatgttaaaagatatgaacatcaaataaataaattttaccttaatattaaaaatcaaaatttgaagaattggttggataaaaagcagaatccaataaagtttttattcaatttaagatttgacaatgattataaccttattaatgggttaaattctaataaagaagattttgaattgaaagaccaatcaaaaccaacatataaaggtttaaaatcatttaaagaaaatttaattaaaaatggttacttgcattttgatgatggctattttcttgcgaataagtatttattaaaatttgaaacaataaaattgattcttcaaaagcgctttaaatatgtttttattgacgaaatgcaagatttggaagagtatcaaattaatataattgatgatatatttttttcaaaagattctaaaactgtaatccaaagaattggtgataaaaaccagtcaatttacaatatagtaaaagaaaattgtgattggaaaactcgtcaagaatacgattcaaaatatacagatttgagttttcaaaactccttacgtttgaattctaatgttgcaaatctagtagataaattagtcttggaaagacctaaaaattataaagttgttggagcttttaacggctcagaattaaaccctcatttaatcgttattaataataagactacaggaattcaaatacaaaatcgattcattgaattaattaaaaagtataatctacatcattgtgataaaaatgtaaaaaacggctttaaaattataagttggaatacggtttggaataatgacgaagaaaatattgataaaaaaacaaatcttaaaaaattgcgcttaattgatttttatgagaattatgaaaaagaaagcatcaataggaaagacgatcatagtaacttaaaggattatttatatcactatgataaagaaaagaaaacgttagaagctattagaaaatcaattctaaatagttttacaagaattttagatttagaagaaataaaagacgaaaatggaagaagatatcgtaaatctactttaatgcaatttattaaaaatcaaagtgaagaatattacaatgattttaaagctaaattgtattcgtggtgttttagaattgtggtacatcaacaaaatgaaaaagtttataaagaaattgtatcgttcgtaaaaagtaatgactttataggtttaaattggcacaatatagaaaactaccaaccgaagaatatttcaaaatcaaaccagtttataatttctagtgattttcaattaaaaaaagaaccgaaagaaggtttaaagaaaaaagaagaaatacaaattgatttagcatcggttcatgcagttaaaggacaaactcattgtgccactatgtatattgaaactgcatataggttaccaatttatgaaactcaaaaaattataatatcaaaaggaaaggataaatctaatcctttattacttgaagatcataaatgtagcggtacgaatggtaaacaagcacttaaaatgatgtatgttggtttttcaagacctacgcatttattgtgttttgtggttttagaagaaaatgttaaagactatttggatagtttgtgtcataccaaaggtggttcatgggaaattgataaaaagttaattcaagtcaaagctttaaatctatga

SEQ ID NO: 75584 - DNA, 1929 bp, Oleispira antarctica RB-8
atgtacttaagtaatttgaaagtaactggttttcgctgttttgacgaagcattcgatatttcttttggtgatggacttaatgtcattgtcggtgaaaatggtgcaggaaaaactgcaatcattagtgcgatcagacagctatttcaagactcggagtctggtagatacagtataagtagtgatgatttcttttgtgcatttcaatcaggggctgtagctgctactgattttgtaattaaggctgattttgaaggtcttaagcttaaagagaaagttgcacttttaccttggactggaggcacagatagagcaaccttaaatttacaagccgaaaataaagagaaaagaggacgttataaaaaaactatgtggggtggtactgcaaaaggttctcaatttgatccagagttggttgaattaatccaatgtatttatctacctcccttgcgcgatgctgaatcaaaactaactaatggtaggcaatctagactttctaaattactcaaagctattaatcgcaatgaattaaaagaatgtcgtaaaaatgaagaggctcatccgttagaagaaaaattcaaaagctttaatgaaactttagctaccgatgagcagctaagtattaaaaaggcaaatgcattaatttcagaacatctaggtaaggcaataggtcatcactttgggcaaagtacacggattcagtttgctgaaagtgattttacaaagatagtagaaagcctaactttgttgttttttcctgatatgtcagagcaagatcaagggttatttagaagtctaagccaaaatagtcttgggtataataatttattgtatatagcttcaattttagcagagttaacattagatgatattgacgaagaagaaggccttctattcaaattgttgctaatagaggaacctgaggctcatttacaccctcaattacagattagattactagaccatttaaaatcagtagctaatgatgataataatgttcaggtcgtagtgacaagccattcaacggttttagcctcttcagtagatattgattctattattcatttgtctagatcgacacctcctatagcgacacctctgcgtttatgcgatgttttagatacaagtaagcagtttattaatcgttggctggacgttacgaaatcaaatctactctttgctagtggtgtaatactcgttgaaggtattgctgagcaaatgttaatacctgtgttagcgaaagaaattcttaagaatcaagttataggtaaaagaagccttgaggatcaaggtatatcgaccataaacttaaatggaatatattttaaacatttcatgaggttctactgcaacctaacaggtcttgaggatgaagatgatcaagatggtattaatattcctatccgttgttcaggtataactgacctagatccgcctaaaaaagtgagtgtaacggatggagaggggaatgaagttttaacacctctaaagccttttgatggcaatattcctgatggagaaaatcatgcacttcgattggtcgaaaccatctcagcatctaataatactcggttatttgttagtaaatataaaacacttgaatatgacttggcaatggaagggaataatgcagctgtaatggctgaaattcttgcttcactttggccaaagccaaaaacagggtccagtctagtatttgacgaacttacgcgaatagcaagtattgactggcttgagaaaagttctgaagaaaaatcgcatgcagcttatgaaattcttaagcgagttgatgatgctaacgttgggaaaggtgtttttgcacaagttctaaccgacaagatagctaatggcgattgcttaataaagattccagaatatatacagaaagctattttttgggcatcttcaattgaatgtgaggcagttgagtaa

SEQ ID NO: 75585 - DNA, 1761 bp, Oleispira antarctica RB-8
atgactgtgttcactgatgagcagcaaacttatatccaatcaagtattaatgaacatgtttacttagaagcatgtccaggaagtggtaaaacagaagtcgtcgcggcaaaagtagcaagagaagctgatggctgggataagtatccaggaggaatggctattctttcttttgccaatagctctactgaagaattgaagaggcgaatatttaagtatttacccagttctagtagtttgtttcctcactttttaggaacaatcgacagttttatatataagaatatcgtaaatcctttagctagtcagtttactgactatagagatgctgatggagattgctcgattcgaatagtcgaagcttcttcaattatcggttttagaacgacgtggggaattgctggtagaggtaatgtttacgcgcaccattattccattgatattggaaatgggggtgttgtttttaatactggtgataatattactgatcgagcattgaatgcagttgaacttgaagactggcagcagaaagatttaattgatacaaaagaacgaatgcttaaaggtgggtatgcaacttataaggatgttgagtctttggcacttaaagcactttgtcaaaaagattttgagcattacttgaaattattagctctaaaatatccattaattatcatcgatgagtgtcaggatttatctgctgagcagttaatgattttaaaacaactttcaggggggggagtgaggttacattttataggagatcttcatcaatctatatatggatttagagatgttgatcctaatgctgtaaagcagtttactttagaaaactcttttacgaatgttgaactcacaagaaattttcgtagctgccaaaagatcataaacctatgtggaaccttaatagggcggcataatatagttggtcaattgacgcgactagagccatcatgctatttagctcagtatgaaacctcacctacggaattagtgagtatttttgaagaattaagtgctgattataataatgctgtaatagtagcgcgggggcattcagtcctacaaaaatttcgaacttctgccactaatctaaaacctatccataaattagctttagccattaagttatttaattatgatgatatggaggcaatagatgaatctataacgttatattctgagtttattaggtattatattagtgaaagtgttaagccaaatagttttaactgtccacaaattatagaatcgaatctaacttggagaagatttctttttttgtcgctagaatatattagtgatgaaacattgagagatatggacgtcaattggtcaagttggactaaaaaagctaaagaaaatatacgttccttacctgaagaaagctttgtatttgatgaggttaaagctgtaattaaagtgatggaaacaataaatttacgcgcgccttctggtgaggctagtgatcttgtatgtgattcattaggtcaggtaatgagtgtgaaagtgggtcggcgaaaaacaaccattcatggtgctaaaggcgaaacccatgacgtaactatgttagtctcggcagcaagtgctagtgggcagccaggttcgcactggaagagctggttgaaagatgaaaatagtgaagctgcaagatttgcgtatgtagcttcatcgcggccgaagcaccgtttaatctggggtgttaagaaacttaagctagtagagcggaaaaaattcgaagagctagggtttcatattatttaa

SEQ ID NO: 75586 - DNA, 1905 bp, Pseudomonas fluorescens
atgtatctgcgtgcattggacatcaatggtttcaagtgttttggcgaactgttcaccatagagtttcacgacggcctaaatgtcttggtgggcgaaaacggggccggcaaaacagggatagtcagcgcgatacgtcagctcttcaacgactcggagtccggtaagcggatcatcagtgagcgtgatttctacagggggtttgaggctggtgctgttgcatccgagcaaatccggattcaggctacgttctcaggcctggacgaaaaagatgtcattgcctttgacgattggtgcggaaatcacgatgaagcgaaactgaccttcacggcgctcaaccaggagtcgcgtggccggtttaagcaccacacgtacggtggccacgagtacaccaaggcatttgaaaccgagacgctcgactacattcattgcgtttatctaccaccgctacgtgacgccgaaacgaagctgcgggaaggacgccagtctcgacttgcacgattgttgaaagctttgtgccgcaaggatctcgaaaccgctagaaaagcaggtaagccgcacccgctggagcaacacgtgggtgacttcaaccgcgagctttccgaaagcgatgagtttgccatcaaactggccaaccaacggattggcgacaacctgaaagcagcactgggcctaaatctgtctcagggcaccatgatccagttttccgaggtcagtttctcgcgcattgtagagggactacggcttctgtattttcccgatctcacaaaagccgacgctacccaatttcggtcgctggaggaaaatagcctcgggtacaacaacctcctgtacatcgcttcaatcctggcagagctcattcttgaagctgatgaggatcgaggcgaggagacttatctacgcttgttgctgatcgaggagccggaggcacaccttcacccacagcttcagctacgcctgctgcggcatttgaaaacggtcgctgaggagcggggtatacaggtaatcatcacgactcactctacggtgatctccgctgcagtgtccatagatcacatcattcacctttccaatgagggtaagccaacagcagtgccgctcaggaacgcagggcttcccgagcaaagtcggcgctttgtggatcgttggctggatgtcaccaagtcaaatctgttgttttccaaaggagcaatcctggtcgaaggcatcgctgaagcgatcgttgtgccggagcttgctcggattgtcctgcgtccgtatggcaagggaaaggactgcctggacgattacggcgtatcggtcatcaacctgggcggaatctacttcaaacacttcatgcagttgttctgtgatgtgaatggcgagcagcctggcgaaaatgtgcctgtaaggtgcgcgggcctgaccgacaatgacccaccaaaatccatcgagacaattgtggatgcagagggcaaggtggttgccgtaccgttccgcccccacgccgatgaccaccgtgccggcaacaacccggcattggcactgatggacaccatcaaccaatcgcaatttgctcgtctgttcgctggcacttataaaacattcgagtacgacatcgcattggagggcgaaaacctgaaaccaatgctgaccgttgcggccaggctctggccagtgcccgacggcctggtggtcagggggcttgagaaaaacgcaaagttggattttaaagccatgagctctgccgataaggcagtgcttgccggcgccttgttagatcgtctcgactccgatgagatcggcaaagggatgtacgcgcaaggtttcgcggatgcgctggagaagcttgaaggcgatttcgtggtgccggagtacattcacctggccatcctctgggcctgcggcctggaacaaagggtaccgtaa

SEQ ID NO: 75587 - DNA, 1797 bp, Pseudomonas fluorescens
atggcagcgatcgccgaaggacaggaaccggtgattgccggtaacaagagattcacgcgagagcagcaggattacatcgcagcaccgctagaccgacatgtttaccttaaggcctgcccgggtagcggtaagaccgaggtggttgccgccatggtgtctaaaaccgtccgggaatggtctcgcgtcccttcgggtatcgcggtattaacgttttccaacagtgcgacggaagagctcaggggtagggtgcacaaatacctgggtgagcccatcggcctaccgcattgcatttccaccttcgacagcttcgtgctcacacggttggtagcgaacatagccagtgaacttaccggctatccaggcaaggatggtgacttccgtatccgaatcctggaaaagaccgccgacatatatcgcacccgaaacagcatttgcgaccgttggatatccgcctgcaaatacaactatgacgtggaaacggctaggtttgtattttcaacaggagagcgcggtctcgacaaccagttgaacgccgcagcaatcaataaagatacccttgaagaccttgttggcaccaaaagaagactctggcgaggaggctttggcaccttcggtgacatcgacatgcttgcgttgatggcgctcagggagaagaaatttaaggcttacttttcacgcgttgcgcgcagattccctttagtcattgtggacgaatgccaggatctctccgctgagcagctgcggatcgtggaaaagctcagcgaatttggagtgacgttccactttgtaggcgatctgaaccagtcgatttatggttttcgcaagtcaaacccggctaacgtcaacgtgctgatggagaagcttaaagtccagccatacgaactgagcgcgaactggcgaagcgggcaggccatcgttgacctctgtagcaatatcctcggagccgggcgggtcacgggcaatccagaaattgcttccgtgcaaccgaagatcctcgaatatgagcattgtccctctgaactgctacccgcgattcgagcgattacccaggggtacacaaaggtagtgctggttgcgcgaggccatacaactcttcaacgtttacgcaacggagcaaccttcgaaggcgttgagctgctggcggtcgcatgcatcggcgctggctcaggtaacttgaaggacatcaaagaacgtcttaggacatttgccaaatggctggcagggaaactggagcttcaagtcaccaaggcagggccctattgccccgttgcgatggagtcaaaattggcgtggcgcaagttcatccatgagagtctcaaattcatggtctccaatggcgcgggcaacccggatcagagctggtcggcctgggtacgggccgcgaagctcgcactccgtcagctcccagatcaggcattcattcccgctgagatacgagaagacctggagggtcttagaggtctgaacctcgtggcccgaaaagggcagggcaacaagccagtgtcagtgcggcttgtgagtcaggagattcaggacggccagtcagatacattacgctatgagactattcaccaagtaaagggcgaaactcacgatgtgacggtcgtcgtttcctccctgaaatccggaaaataccactcacattggcaagactggctgcgcgatcgtgaatcggaggcgacgcggtttgcctacgttgcgagttcaaggccgcagcatatgttgatctgggcggtcaaaaagttaaaagctgaagaccgaccagtgctggcccagctgggcttcgagctgccgtga

SEQ ID NO: 75588 - DNA, 2295 bp, Pseudomonas fluorescens
atgcgcatccagcacgtagagatatctaacttccgaaaactgctttctgtgcgaattgacttcgctaatgagaccacgctgcttgtaggtgcaaataacagcggaaaatcctccgccatgctggcactccggagatttttggtttcgaaagcttctgcttttcggctccaggatctgactctttgtcatctcgccaagctggacgagattggtaaggagtgggagaacccaccagcaaactttgaaattcctacagccaaagactgggccgactggctccctagtctggatatctgggtgtcagcagatcaaggagaattccacttcatccgcgatctcatacccagctttgcgtggcgcggggggcttgtgggaatgcgcttcctgcttgaaccagatgatatgaatacgctgtacacggactatcgcaaggagcgcgcgagggttgcagagcttgaggatgctttagggagggaagacccgcctggtagcccgctgactctatggccgcagagccttcatgattacttgaaccgtcggctgggagataaattcaaggttcgttggtaccgcctagatccacaacaacttaggaagcctgacaagtcgactcgaatggcgcaaaggcagcaattgagccttactgccctgcccttggaaagcaatcccctcagcggattaattcgagtacatgaaatcaatgcgcagcggggattcggcgaccattcggacgacaatcaaggcgataacactagacctagcggcgctagaaaactctcggaacaactcagatcctattactcccgacaccttgatccaggtgacagcccagatatctcagatctcgaagcgttgcgggcgatagaagcagctcagtcggcattcgatacgaagctaggtagcagcttcgaacctgctattagagaggtcgagggattgggctaccccggccgcaatgacccacgtatcaaagtcgcaagtcgcctggcaacaactgacggcatgaaccatgaagcggctgtcctttttgaattggactcaatccaaggcgccccaggagcccctcctcttcatttaccagagaccgctaacgggttgggatatcaaaacctgatatctatgattttccggctgatgggtttcagggacgagtggctgagaaaaaccagggccgccaacacggaagtaatagaccgcgtcgagcccatccacctcgtgctcattgaggagcctgaagcccaccttcatgttcaagtgcaacaagttttcgtacggcacgcctaccaagttctatgccgggatgctttgcttgaacgctacccaaatctgaagactcagcttctggtgagcacacactccagtcatgtaactcatgaagtggagtaccagaaccttaggtatttcagacgactcccagctgggatgtatggcattggtgtaccggtgtcgacggtctctaacctctctaacgtgttcggcgagggaaccaagacgaaggagttcgttaccaggtatctgcgggcacagcacgcagacatattcttcgccgacgccgtcatcttggtagagggctcagcagagcgaatgatgctgccgcactttttgcggaataaatttccattccttgaccgctgctacatcacaaccctcgatatcggtggcagtcacgcacaccgactaaggcctttaattgacgcccttggcatcctcaccctggttattacagatctcgatgcagggcttaataaagccgcaaaacccgtgcaaagaaacgcagatcagattacgaacaatccgacattgcggagctggatgaaactgatgcagctgggcagcacagtggatgagctgcttgagctgccagcggatcaaaaagagcaccagatcgacgacctgtactcggtacgcatcgcctatcaaactcctatttccacccacctacccgctactggtgaagcaatacaagctcttccaaatacctttgaagacagctttgtgcttagcaacgctggtcactttgcggaaaaggcagggagcactggtctgatgaaggctttcgtcaaagttttaaatgaatcgcaatcatctgaagccgtcggggaaggttttttcaacgaattacgcgaaggaaagaaagcagaatttgtgctgcttgttttgggggataaaaacttttccaacctcgaaatccctgtatacatcagtgaaggcctcaactggcttgagtccaaattgcgaagcaaacaaaaagagctgctggtaattccgcccgagggcgcggaggtgacgccatga

SEQ ID NO: 75589 - DNA, 1848 bp, Pseudomonas fluorescens
atgagcgaagcagctgtcgcagatgccgacaccattatgcaggcctgcctgaatctggcagacccaaagagtttttttctttacgcaggtgctggctcaggaaaaacccactcactcgtcgaggctatccgcgaactcaaaagtcgcgagcgagaacgcctgacgttcgagggccggcgcattgcggtgatcacctatacaaacgcagcctgcgacgagattcttcggaggctagagtttgatccactcgtggaggtctcgaccattcacgcgtttgcctggcgcctaatccaaggattcgacaacgagatcagagagtggctaaggatcaaacttgcccaggacattgagaagatcgagggcgagctcgcacgctcgaaaggcgacaataaaacctctcgagcaaacagacggaagctacaaagcaaaacacgcagacttgacactctcgacgagattacgaagttcatctacagccccacaggtgacaaccgagagcggcaagcactcaatcacgatgaggtcatcaagttaactgcagcgttcgctcctgaacgccctttgctggatgttttagtagaccgttacccagttgtattgatcgatgaaagccaggacacccacgctccagtaatggaggcttttctgaaagtccagcaatcggcgcagacacgtttctgcctgggactactgggtgacaccatgcaacagatttacggccatggagttacgcgccttgataaagcgataccgggtgactggcagaaacctgaaaaggtcgttaatcgccgctgccctcgtagggtggtagatcttatcaatgtgattcgaagtactgcagacactcatcagcagacccctaagcctgatgccattgaaggtgtagtgcgcatgtactgcattagtcaaagccaagaacaggcaccaaatcttgaggaacgcatcgctcattcgatggctgcaatcaccgacgacggcgaatgggctatcggccctgaaggcagaaagactttgatccttgaacataagatggctggacggcggatggggtttgagaagctgttcacgcccctatatgcggttgagcaccttcaaacaggcttgctggatgggaccctgcccgcacttcgcattttcagcgaaggcgttcttcccatccttaccgcaaagaacgatcacttcctgctgcttgaagccgtacgctctcgctctcccttgttcagcaaggacgttttgcaatcaacaggggaccaattggcccacatgcagcgtgtaaaggacgcgacgcatgccctgctctctcttttcgaaagaagcgatccaacactgtgtgaagtcgcaacgcttctgttgcaaacccaactgcttgacgttcctgacaatctgattggagcaatggtgttgggagctcctggtgaggccccagatcctgaagatacgaacgcgatgaccaactacgcctaccagctattccttgaacgtccattttcggagctggcagcctttgcgagttatgcggatggcctttcaccctacggcacacatcaaggcgtaaagggactggaatttccaagggtcatggttgtcatcaacgacgaggaggcaggcggtttcttattcagctacgacaaattgcttggtgtaaaagaaccaacaaaaacagaccgggacaacgagcgtgacggcaaggacaacgcactagcacgtactcgtagactgctttacgtgacgtgtagtcgggctgaaaagagcctagcgatagtcgtatacacaccccagccgacactggccaagcgaaacgttgttgctgctggctggcttcaggagagcgaggtcgaaatcctgtga

SEQ ID NO: 75590 - DNA, 2169 bp, Clostridium sp. IBUN62F
gtggtgtacttaaagtatctacaaatagttaattataaaaatcttagaaatactaaatttgaatttaatgaaggtgttaatgctattattggggaaaatgatagtggaaaatctaatgcaatgactgcattaagaatattgctagatgattcatattactataatacaaagagattgaaggaaagcgatttttctgaaagtttaggtgattggaagggacattggataatattatctgctatatttaataatattacagataaagataaatatgaggaagtgtgtaatgaattaattccagaagaggaaaatgcagattttttaaagtcatatataaagtgtagtgataaggatataggagtaataacattatatattagacctcagaaaagtattagaaaaaaattgagtgaagttacagatattgatgaatttaatactattagaaatgaaataaaaatatctgattatgaattctactatacatctcgtgcacaaacagattttatagattgtgaagtctataaaaatattgtgggagatattgaacatggaaaatatattgatctagataatgacgatgaatcaatattaggaaataaacttaatattacagatgtgcaggatcatatttcagtgatttttattgatgcattaagggatgtagtacatgaactaaataagccatctaatccaattaaaagaatattagaaactattgaatctaaaataacagaagaagaaagaaatgagattaaagacaaagttattgctttaaataaaagtatatcagatgttgaacaagttggagtaataggcgaaaaaattaatgataagttaattgacatgataggaatggtttattcaccagagatagaattacaatcagaaatgaagaatgatttgagtacgatagctaagtatttgtctatgaagcctgcaaatgaaaatgatatagaactattaggtttaggtcatttaaatatgatatatatggctttgaaaatagtagaatatgaagtaaataaaacacgagaattaataaatattatgattatagaagagcctgaggctcatattcatactcatattcaaagagcattattcgataaattgaatataactaaaaattatacccaaattcttatgacaacacattctacccatatatcagaagcatcaaagattaataatgtaaacataataaaatgtaacaaagatatatcagtagtaatgaatcctaatagtggattagataaatttggagaagaaaaattaaaattaaaaagtgtctctttatctaaatgtatagaaaggtatttagatgctaagagaagcacattactattttctaaaggtgtattattagttgagggggatggagaggaaattttaatccctaatatggttaagaaagcatttggaatatcacttgatgagctaggaattggattaatcaatgtaggaagtacagcatttgaatatatagcatctatatttagtgatgataggattaataggtattgttctattattactgatagagataaacaaatagtagataaagcaagtagccattatagtagttatgctcaaattcttggtgagagtagacatgaaaagttgacaaatttatttgatgataataaatgggtagagggattttatgctgaaagtacgttagaagtagaattcattaaattagacgataatattgattatgttaaaaatattatagagcaagtatatacttctcaagatactataagtaatcataaattagcattagataatgatgatattggtaaaaaagcagaaactattttaattcttgcaagtcatataggtaagggatggtatgcaacattattatcagagaaaatagataatttagttaacataccagaatatatattagacgcaatagcatttgcctcgcaagaagtaattgatattaatactataataaaaataattgattatacgttaagtttttatgatactgatgaagcaaaaaagattaaaaaaagtatagaggtagataaagatattactaaaagaatagatataataaagaaatttgaaattaactttaaagatgatatagtaaataagctattaattaaagtgaaacagtatgtaagttggtgtgataattgtgataagtaa

SEQ ID NO: 75591 - DNA, 1734 bp, Clostridium sp. IBUN62F
atgtttttaaataaacttaatgaaaagcaaagggatgtatgtttaagtgatgagaatattatactgactgcttgcccggggagtgggaaaacaagaacattaacttacagaatagcatacttatgtttaaagaatagaccatcaagaagattaaatatagcaataacatataccaatagagcagcagatgaaataaaaaaaagattgcaaaaagtagatgacagtattgaaaatgcttgggcaggtactatacatcaattctgtttggaatatataattaaaccttattccatgtattttagtagattaagccatgggtttcatattattgatgaatatgttcagagagaatatgaaaatgaaatagttgaagaattaggaattagaaatgaaatagggtttaatgatcctttaaattataaagaagtaaaagagaaatacataaaaaagctatatgataataaggaaattgattttaatgatattttagatatttcatatgaattgttaaacaaaaataaatttataagagaaaatatagctaatataataagaagcattcatgtagacgaatatcaagatacaaatgacttgcaatataaaattctaggggaaattgtacatgaaaataagtccattaatatcttatttgtgggagatttagatcaagctatttatagtggaataggaggtatagcaaaagataagatagagatagagaaagagtttgaagttaaatttattgaaaaaaagcttgatggatgttatagatcatcacaaagagtcatcaattattataaaaaatttcaacaaaatgagcaagaaattttttcttttgctgaaaataaggatacagatggaataatatatgttaataaaagtattcataaaagcgaattaattagtagaatagcatatatagtaaagaaacaacttaaagagggaactaaagaaaatgaaatttgcattattgcacctcaatggtatttattgtatccactaagtaaagaattaagaaagttattaccagatgtcaatttcgatgctcctgatattactccaattaaatatgatccgcttagtttgttttataatatatcagtattattttttactaaagcagggagagatgtttttattcgaaaaagatgcgcatcaactgtaatgaatatattaagtgatgaatataggatagatatatcaaggtatattgataatctgcttttgttaaaatatataaattcatttactagtaatagtagtaatggaatagagtatttaaaagaaggaatagagtacttattttttcacttacatatagatatcaataaagaacttgctttaaagaaatcttataatgatttttttgatagaatagataatagaatagaaagatataatttatcatgcaatattaaggatatagcaaaaagttttatggtaaaaaaaggggtagttattaatacatttcatggtgtaaaaggtgaggaatacaaaacagtgattgcctttggattattacatggatatataccacactggaatataatttttaatacttcaagagataattgtgaaaaagaaactaaaaagttgttatatgttatttgctcaagagcaaaagaaaatatatttctttttgctgaaaaaggaagaattactcaaagaggtatagaatatgagatgacacatgaattacaagaatataaatataattatgataaaatatattaa

SEQ ID NO: 75592 - DNA, 2169 bp, Clostridium sp. IBUN22A; identical to SEQ ID NO: 75590

SEQ ID NO: 75593 - DNA, 1734 bp, Clostridium sp. IBUN22A; identical to SEQ ID NO: 75591

SEQ ID NO: 75594 - DNA, 2169 bp, Clostridium sp. IBUN125C; identical to SEQ ID NO: 75590

SEQ ID NO: 75595 - DNA, 1734 bp, Clostridium sp. IBUN125C; identical to SEQ ID NO: 75591

SEQ ID NO: 75596 - DNA, 2169 bp, Clostridium sp. IBUN13A; identical to SEQ ID NO: 75590

SEQ ID NO: 75597 - DNA, 1734 bp, Clostridium sp. IBUN13A; identical to SEQ ID NO: 75591

SEQ ID NO: 75598 - DNA, 1887 bp, Pseudomonas fluorescens
atgtacctcgctgagctgacgattagaaacttccgaaagctgcgtgacaccaagctgaagtttcagcctgggctgaatgtgttggtcggtccaaataacgtagggaaaagcgcggtagtcgatgctttacgaacactactggcaggccatgacgaaccattcccccgccttgatatctctgatcgacataggccgcgcgaaggcgagccagcgggtgacattacctttcacttcgtcttcaagggacttagccacgaggacgaagcagatttcattgccgcgctcaaaccgtgcaaagacaaaaccatggaagctcatatccatgtccgatacaccgaggcggactctacggggcgcttcagagtaaaacggtggtgcggtgatcaccaagaggtggcgctcagctccgacatgatggaaaaccttcgcggtgtctatttgcagcctctgcgagacgcagcacaaggacttcgacctggccgcaacagtcaaatggcccgactgcttcatcttttgacggatgacgacgggcgcaaaaagatcaatgatgcgctgaaaacgctggacgatgagcttcaactgaatgagtcgataaaaagtactcacgctgcgatatctttacgtcacggcttgatgatgggggagcagttagcacaggccctcgctatagggctaaccgcaactgatttccagcgtctctctgcaagactttccattaccgctgaggcgttagagatcgagcaaaacgggctcggatttaacaacctgattttcatggcggtggtgctcagcgagctggccaagaaccctgacgcagcctatcgaagcttgattgttgaagagcctgaagcgcacctgcacccgcaactgcagcgagtcctacttcgctatctcgctggtgtaccaacaggtgagggtgaaaaatcagttcaactgttcgtcaccagccattccccgaatttcgcgagtaattcagagcttgagtcactggtctgcctggtcgaaaacgacgccggcgttgagacctttttcccccgtgacgtcaccttcaaaaaggggaagcgcgagaagctggaacgttatctggatgtcaccagagctgaactgtttttcgcacgccgagtgatcttcgtcgaaggtgcggccgaactcatgctgatcgacgctctcgcaagacttataaagctcgacctccgtgagtatggcgtcagcctcatcagtgtggagggactaaatttcgactccttcctgccgctgttcggcgaaacaggcctgcggatcccggtttcggtcatcaccgactccgatcccttcgaagaaattgagatcccaagcgacgtacagggtcagttaaacgaggaaacgatcgaagatcttctcagtgaggctagctacttggaggagacagacgcgcccgaggacgaaggcccagtcgaagtcgtagcagctaataaaaaggtcaaacgtaaggaagtatatccagcccttggggatgaggtcagaatctccagcaatactgccaagatgaaaggcatggaagatgcatttgtgaaagtcttctacggcttgaagaccttggaatatgacttggcactgcttgagcctaatcgcaaagtcatgttggcagctcttagcgacccccatccacaaatcgcaaaaacgctgggcaaaattgtcgatgttcagccagataatgctgcgaaggccaaggcacttttctgcggaatgttcgagcgtaaggaaagtagcagtaacgtgcaaaaaggccgatacgcccaagcgctcgcggagcgaattgcgaaggagccaggcttcatggttcccgaatatctgaagctagcgatacggcacgtctgtaagggagttgatgaagatgaggctgtctga

SEQ ID NO: 75599 - DNA, 966 bp, Pseudomonas fluorescens
atgaggctgtctgatgaacagaaaaatgtcatcggcgcggaactgggcccgatctccgtaacggcgtgcgccggaagcggaaagactgctactgcaatccgacgtctaatcgaaattcggcagaaaatgaagaagagtcgtggccgggtggtgctcttgtcattttccaatgtggccgtcaataccttcaataaaggatttcaaaagctcgcatcggtgctgccggatgatgccaaccgcaagctggtagaggtcgataccctggatggattttttactcagcacgtactccgacctcatgcttatcgaacgatggaagcgaccaaagcagcatatctcgtagcgggttctgagccattcttgagcaactatcattactggccaggaggcgatgctcgccccctgccgatcaaagacgtcaaagttggagtggagaacggaaatctatttttcttcgtcgatacccacacaggaccagcacggctgattacttggaaggcgctagattcggttgagcggcttggctgtataggtgcttacacccatgagcttggtcggtattgggtttatcgaaccttggtcgagcagccatctttgctccgagcgttgactgcccgttatccgcagatcctcgttgatgagtctcaagatctgggtacgttgcaccaggccatcctggaattactcatagatgcaggagtaaccgtttccctcatcggtgatgtaaaccaagggattttcgccttcgccggtgctgacggcatgtttttgaacacctatgagggccgacacggtgtcaagccattcaagctcactcgtaactatcgctcgctgccaccgattatcgacatcgcgaaccggctctgtggtcggaacgatgaagcagatcgcacccctgaacccggaggtgcatatttcgttgggtatggggattccatgaccatccggacactgattccacgctga

SEQ ID NO: 75600 - DNA, 1701 bp, Escherichia coli VR50
atgagaattgaaactgtttatattaaaggattcaggaattactgtgatgctgttattaattttaatgaaactaatttgattataggtgcaaatgatgttggaaagaccaacctattatatgccattcgattattacttgataaaagtttatctgaattagatctagaaccaaaaagcaatgactttcatgtaaattcggcaggtgaacaggttgaaaatatagaaatcactatcaagtttacagatgttagtgaagatgctgtaatatctaaattaggagggtatgttagcgatgaaggggaaacatacattaagtatcttgcttcatcattaactatggattacaagatattacttagtcatgaacataacaattttgatgaggttcctaatagattttacttaaagtgtttaagtctaaggtatataaattcgcaaagagatcttgaaaaatacattaaaattgaaaagaagcatcttttaagattggcgcaagaagttcgtagtgaaaaggatactgaaaatgatggggcggtttttactgaattaaataagctacttactgaagtaaatgaaaaagttaaaggaataagttatgttgcatcagcaacagaagagcttaacgaggaacttagaaagttatcctatactcatgatagattaactgttcaacttgatactggtgcaatagggattgaccagtttatagagaaattagaattaagtgcgaatacaaatgggaagaaactaatgcttggtggcgatgggtttaataaccaaatccttcttgcgttatggaaaacaaaaagtgttcgcgagcatgatgttgatagtgaagtagtgatctattgtatagaggaaccggaagcacatctatttcctcaccagcaaagaaaattggcggcctatttaatcgataaacttccaggccaagcaatcgttacaagccactcacctcaaattgcagtgaattttaaacctgattcaatcataaaactatactatgatgatggagagactctagccgcaagtaatggatgttctgattgtattagctctgcatgggatggaatgggctaccggatgagtattattcctgctgaggcattttttgctaacgtggtttttttggtcgagggaccatctgaggtgattttttacactgaattagcaaaagcattaagtattgatcttgattattataacatcagcattctttctgttgatggtatccaatttgaagtttatagaaaaatattaacagctctaaatattaattggatcgtaagaacagacaatgatgcttcaaaagtacctcataagaatgaatggcaatatgctggtgtaaatagggcgttagcactgtgtggagagaataaagaaccaaactcaagtattcctatagatagtaaagctttgcatgctaagtggggaaccatttcaccaataataaatcctaacggcgtttatatatctttttttgatcttgaaggagatcttgctaatgacttttcgaagcatgttcttgattatgcaagtaaggataatctagatgatgccgctgattatttgagaggaaaaaaagctatacgtatgcgtgagttaattaaagagaaaaaagcttttttaactgaactgaagagcaaagatatagccagacctctaatacatgcactgaaaattgctagaggtgaattatga

SEQ ID NO: 75601 - DNA, 1623 bp, Escherichia coli VR50
atgaagctaactaaggaacagttagatgcaattgattacgaaggtaatctggttataactgcatgcccaggaagtggtaaaacaacaatactcgtccataagattgctgcctgtttatcccattccaaggattatcagggagttgttgcgttatcatatacgaataaatccagcgaggagctaaaagccagatgtagaaaattgggagcagagttaaattctagcttctttggtactattgataagtttttcattaacgaaataatattaccttttgtaaggcaagtatggggcggaaacgaaagcgctctcgaagtagtaaagtatatagatctttctcaagaattaaaagataagacaaataagtactttgaccgagtggatttttattctaatacctcatttgagggcatgggttctctgagggatatttatttaaaggggatgttgattttagacttccttcctcacttggctttttatatagttagaacatcatattcttgtcagcggtatttaatggcaaagtatattggtttttttgtcgatgagtatcaggataccggttattttactcatcaggttttcaagttcataccaacgctagggatgcctcttattatcgttggtgatttggatcaatcaatttatttgtattctcaccgcagttcggattcactaaaagatttcatgaatgatagtggtttctgtcataaggaaattacagtaaatcacagatgtcacccatctatagtaaattacgccaatagaattaaagattttgaatgtcaactagctccgtgtgatgagatttttgtttatagaaaatgtgttgatggcaatcaaattgatatagctaaatggattggtgaagttcttgataatgtaaaaaataaattttcaatatctgataataaggagattgctatattggtaagaagcaatgcttgcgcggagctagtttctgataatttagttgtttctaatagggcttatttggataatgatttaacaaaggctggtggtaaggtttctggtcttgttaatgatttattatgttacaggtataacttaaataaaactgctcagtctattttggagggggttttgggaagcagtgtcaaaaggagcgaggctactcgtatccgtaaggctattaagcaggttagaagtgttacagatgcctttcttattgacgtaataaataaaattgtagtaactcttttagggactgaaatcgagcagcatcataagtccgctctttcagagatattagttactccgaggatgcaaaataattatttggatgttagaagtgatgaagtacaaataatgacgttacataagtctaaaggtcttgagtttgactttgtttttcatttggatctgtatgattggattttgcctaaaagagttttcatagaaggaagctatgatgttgtattcgaaaatgaacagcaatgcataaatcttcattacgtaggaattacacgagcaagaaaaggcattatgctaatgcattctacgaaacggtataatggttcaggtgatcttaagaacggggctccatctcaatttcttttgaaacctgggttagatggcctttataaaaaaataaattaa

SEQ ID NO: 75602 - DNA, 1905 bp, Pantoea anthophila
atgaagcttgaaacaatccggttatcaggttttcagtcttttgggcaggaaccaacagagctgagcttagaagatattacctatctaattggtcctaatggttcaggtaagaccgcggtacttcaggctttatgccggctctttgcattcgatccgtcattgcgacgtatccagcgttcagatttccatgtccattttgaagaggaggaggttcctcctgaacgtgagctgtggttagaagctgattttttatttcctgaacttgcaggggacgaagataacagtaccgtagcacctcattttggccatatgcgactagatgagccggaaggtatcccacgactgcgttttcgccttacagcaactatgggactggatggggatatcgaggaaaatttcgtatatgttttagatatcaatgcggatggctcacctcaaaataccgcacaggttccacgggcagagcgtaatcatatccaggtacactatctgcccgccagacgtgatccagcggaccatattgcctacggtgcaaacgccttactgggtcgtttgcttcgtgccgtacgttgggatgccgagcgcgatacgattaaggaattgaccgatcaaataagcgacagccttgcagcaaacccttcagtgaacgcatttagtgagagtttgaaaacaacctgggccactctacataaaggcaaatttttcgctgatccaaaaatcacatttgtggcttcagagattgaagcgctgttgagacatttgtcggtttcttttaccccagggcacgatggttcacttgtcgatttctcgcggttgagtgatggtcaaaagtcaatgctttacctttcccttgtattatcgtctcaagcgattggaagagctgtactcgccgaggaagatgtatcttttgatcccgataagttacgtccacctgtctttacattggttgccttggaggaaccagaaaatagtctttctccacattacttagggcgtatcgtcagtgctttgaataccatgacaaaaaatgtggatgcacaagctctcattgctacgcatgctcccaccatgttgcgtcgcgttgcccctgagttaatacgttatctacggttaactgaggctcgaaacacacgggtcacctgtattaaattacctgagaaatctgatgacgcgcacaaatttgttcgggaagcagtccaggcatttcctgagatctatttctcgcgtctggtcgtgcttggtgagggcgatagtgaagagattgtattgccacgtttgcttcaggccaaaggtgcccctgttgatgagtcagcagtcacgatagcacctctgggggggaggcatgtcaatcatttttggcgtttgctttcagcgttgcagattccatatttgacacttcttgatctcgatgtagctcgttatgcagcgggatggggccgaattaaatacgtcaatgatcaacttattgttcatgagccagaaaataaactacccgaagatcaaggtatccccatttggaatagtgatacctataaggttcgaaactaccctcactactttaatcttctcgaagaacgcggtgtcttcttttcgtacccaatggatttggatttcgccatgcttctttcataccccgaggcctataaagttgttgaggaagaacctgatacatctacgctcaaagcagtacttgggaaaagtcattacgattcatctcaatacagtgaaaatgagttgaagttgttcagtacttatcatcagcgtttcaaacttggcagtaaaccagcatcccatattgatgcgttggccaggctaagtgacgaggaattacttgttaaaatgccggaatcactgaataggttagctgatgccgttattactaagctaatggagttaccggaatga

SEQ ID NO: 75603 - DNA, 1671 bp, Pantoea anthophila
atgattgccgttgaagaatggcaacccgccgatgggctgacactggaaccaaatgcaaaacgagcagcaaaagcgcgtaagcgctgcttggcactcactgccggacctggtgcgggtaaaacggaaatgcttgcgcaacgagcagacttccttttgcgtacaggaacatgtcggtaccctaagcggatcttggcaatctccttcaaagttgatgccagccgaaatctaaaagaacgtgtcgaacggcgatgtggctccgatcttgcctcgcgttttgatagctataccttccatgcatttgctaagcgtatcatcgatcgtttcagacctgtgctcaccgggaaagatgccctggatgcgggttatacaattgttgataagaaaaatggcccctctcgaactcaaatagaattcggcgatctggttccgttggcaatccagatattgcaaagctcaaaaattgcccgcaatgcaattcggcaaacttatagcgatatttttttggatgagttccaggattgcacgaatttacaatatgacttagttaagcttgctttccaagggaccagtattcgcctcactgctgtaggtgatactaaacaaaaaattatggcttgggctggagcactggacggcatttttcaaacctttgccaatgactttaatgctgtatcacttaacatgtatcgcaatttccgttctaaaccacaattgctgcgggttcagaatgaaattattcgtacgcttgatcctgactctgtcatggcagatgaacaattggatggtgatgaaggtgaagtttatgcctggcgttttgaagacagctgtaaagaggccgtttatttggctgatctaatcaatggttggataaatacagaacaattaccacctgcagaaattgcagttttggtttctaaacaattggatctttatgttgatcacctcatgaccgagttggaagcacgcggtattccatatcgtaacgagcagcaattgcaggatatcactatagaacctgtagcacgtttgatcgtagattatttatcatgtctctacggcaagcgtgaacctaaggcttggattcgattgatgaatcagttgattccttttgccgatgaagaaatacagtcgagtgcgagaaaggatcttgatcaattaattaaaaaacaacgtaaaagagtatctgatgctaagcatacagattcgcctttttcggattgggcacaattggctatcgagtttctgaagtatattggctccaaaatgttggttgctttatcacctgactatgaaactcgtgagcgtttaaatgatgttatccgtgaaacttttgcacggattaaagaattgctgaagtcagaaccagatttgccaaaagcgttaggacgttttgcggatgatcaggctgtgcgcattttgaccattcataaaagtaaagggctggaattcgactctgtgattatcatggcggttgaaaacgaaattttctttggcaagcaggatgaaaaccgttgcgcgttttttgttggtgtttcacgagcgaaaagacgattgattcttacacatgccgatcagcgagaacgtcctgctagcgccaagcgttggaatgtcagtcgaacagctcaaactgagtatattagttatgttacgccgtttgtaaggcctcaataa

SEQ ID NO: 75604 - DNA, 2046 bp, Parabacteroides goldsteinii DSM 19448 = WAL 12034
atgtatattaaggagattaaaatttcaaactttcgtaattttagggatgcttcggttcccttccacgaaggagtgaatgtcataataggtcataataatacaggaaaaagtaacttgctccgtgcaataggtttagtgcttggctatagtgacggtcgtcggttgggtacatgtgacttattttatgagacagatgtggttacgcttcaacagcagtctccacggattaaaataactcttatatttcacaggagtcaaggagaagccttggattctgccgaaatggggctattctccggtatgatgacagatcctgcattgagcgaagaggcaaaattgagatacgagtttaaattggctgatgatcaagaggacaactataaggcagatgttgcaggtgtaacaactgccaaagaaatatggaaaataattgaccgcgactatatcagactatatagaagcagtcgctctggaggtaatcaggccgcaggtatcagtgttaatgatgctttgggacagatggacttccaattccttgacgctattcgggatgttagtcacgacctatacgccggttataatccactcctaagggatgtgttaaatttttttattgattattcagttaagaatgatgccacaaagaccgaggatgagattaaggaacagttgaaagccctaagaaatgattttgtccaacagtctagtccattgatgcagactttacaagatagattgcataatggcaaaaacgtatttctaaagtacgcactggatacaggagcaacattcaacggagccgtgccggactttgatggtgaagtgacggaaaatgagatgtttgcggtattgagaatgattatcaagtatactgttggtatcgaagtaccagcaacatataatgggttaggttataacaatctaatctatatgtcgcttttgcttgcaaagatgcaggcagacagtagcattacttacatgaagcgcaatgctaaggtaatctcatttcttgcagtagaggaatgtgaagcacatctgcatccagccatgcaatataagtttctacagtttttgcaggataacaaagcaaatggacatgtgcgtcagatattcatgacctcacattctacccagattgcctccgctgtaaaactggatgacttaatttgtctaacttcacccgtattagggcagatcaatgttggctatccacgtgtcatttataaagaagataatgatgatgatgtggtgtccaagcaatatgttcagagatttatagatgctactaaagcggatatgttctttgccaacaaattgatatttgtcgagggcgttgcagaagagttgttacttccagtctttgccagatatttgaataagaatcttacagatgagcatgtgttggtggtgaatatgggtggtcgctatttcaaccacttcctaaaattgtttgatacgaacaatccatacaccatcaacaagaaaattgtctgcttgactgacattgatccctgtaggaaaaagaatgaacctgacgaggattatgaagcctgctacccatacgaatacaatatagatacagctaactacaactataagcatcatgcagatactgaggtagctcaatatgcagcccatccaaatattcggttctataggcaagatgtaacatatgggaaaacgctggagtatgacataatgcgtgagaatcccgattgtgaactgttgctgactaactccgtttccaatttgaaggagataaaagctatgatggcagaacaggatatgaacaagatgatgagtaaaatgcgaaatagtgaagcaaatacacgtatcaagacatccataggtgcatcgaagtggacggatgaggagaaacgaaaagctttacttgcatcacgctatttgaactctgtttcaaaaggcagcaatgcgctggaactaaacgtggtacttatggctaatctagataaacctgtagcagatagaaaagagttccatgtaccccaatatattgttaacgcattaacatggctattatcataa

SEQ ID NO: 75605 - DNA, 1662 bp, Parabacteroides goldsteinii DSM 19448 = WAL 12034
atggctattatcataacatcagaacaaaccatacctatagacgaaccgtttaaggtttgtgctggtcccggtgcgggaaagacgcattggctgataaatcatatcaagaatgtggtgtcaaacagtcacaaacttgatattgttaaaaaagtagcttgtatcacctataccaatgtgggtactgatactatcacctcacgtttgaatattgggaatgacgtggttgaagtatgtaccatccacagtttcttgtatgccaatgtggtaaaaccctacgttcacttggtagctgaagatttcgaattgaagttagatgaacttgtagtgatagatgattctaattttaaatcagaaggaacagctaaaatcgtactaaaccgtattggtaggtcatggttagatgccaaaatctatttgaaaggattggagagtgcaaactggcgttatgaaaaccatgagtacaaacattacaaacccaattacccacaggtttattacactaagagtggcaagcggtatgtgggcaatgactggtatatggggttcaaaagatggctctggagtggaggttatatgtcttttgatgacattttgtatttctctcatattctgctttcaagatacccaaacatatataaattaataaaagctagatatccgtatatttttgtggacgaatttcaagatacaattccttttgtagttgatttcttgacactattaggcaatgatggggtaattattggtgttgttggcgacaaggctcaatccatatatgactttcttggtgctacagtgcagcaatttgacaattttgctttgccagagatgcaagagtttgagataagaggaaataggcgtagcacgaagcagattatagaattgttgaatattgtccgaactgatttttcacaagactggctgaatggagcagaaggaatggtgcctgaattacttgtgggcgatatgctaaattgttatcaacagagcatagaaaaaagtgggactgacgaaattcaatctcttgcctttcaaaacgtacttgctaattcgatgcgtaataagaatgggatgcgcaaggcagagaaaatattagagatggattttgacagcaatgtcgagcgtcagatggtgataaaggcgttgataaaagccgtggaatacacaagaatgaacgacttgcgaaatgcttggcatcagttagacattatagatcgcgaaaggtcactaactatcgtgcttctaagacacttgctgaatggctataaggattacaaagacggaagcatgatggatttctacaattttctagtgaatgatttacatgtcaagatgcctaagataaaaaagaagacaatcaaggatttctacatggaccatacatatgccgatgctgcccttggggtgaagtatggtgattcaaacgacaagcataagactatccataagtcaaaaggagaggagtatgataacgtgtttgtcgttctgaaagaagaagatgacatagagttcttgctgacaccagacctgaatggcaacaatgcgcatcgcgtatattatgtagcagccagtcgtgcgattaaacgattgtttatcaatgtacctactctaagtgcagaaaaccgaatcaagtttgaaggtaagcctattaatatttcataa

SEQ ID NO: 75606 - DNA, 1872 bp, Methanosarcina barkeri str. Wiesmoor
atgtatttgaagaaaatacatgttaaaaactttagatgtatcaatgatattaatttagaactaaactctggattaaatgtaattatcggtgcaaataattcgggaaaaacttctttactggattcattaagattggctttaagcattggtaattacagtagaagtatctatgtttcaagtgaagatttttttgtagatgaatttggaaagaaatcccaaactattgagatagaccttacattttctgaactgactccagaagacatgggagtcttcattgagatgttaaaagttaatgatgatggaaaccatgaattagagcttcatgtcaggtataaaagagagagaaaaaatggaatagaaaaaattagggttagatattggggaggagaaaaagaggcaaatactattccaatagaagttatggaactattttatattgtatacttagaagccttaagagattctgagaattatttaaagccgaatagaggaaataaattaggtcaactgtttctaaaattagttccagacgaaactgcacaagaaaaacatgctcagcaaatatacgaaagtattacttcaaacgaagattggaatgaactaataacggacgcaagaaaaaagattaatgaacacttagaaaatacgactcttgagcacgatacccttagaatagatattgattttgctccagtggattttacaaagattgcagaaagattgaaaatttatataccgatcttaaaaaagataaaaagagaattgatagaaaatatttttgaagaagaaggatgggaaaaatactttgaatacccacattcggataaactgattttaaagacagacataaaagaattattgaaaaatgaagtaaattctgaacttaaattcaaaatttcaaaattagaaaagttcattcagaaatttgagatatatcaaaacggattaggatataacaatttgatatacattgcgactataataggcgatttgatcgaaagagtaaatagaaaaagtgagaattatattgcacttttaatagaagaaccagaggcacacctccaccctcaactacaaaatatattgtttaattattttaagaatatagaatcaaaaaatattcaaatatttctcacttcacattcacctacaattacagctaaaactgacatagatacagttattttaatggagaatagttttaaagtagacattttgcctttaaaagatatcgaatttgaagatgagacagataaaaaatatttgcagcgatttcttgatgtcacaaaatcacagttattttttgcaaatggagtaatatttgtagaaggaatctcagaagctatgcttcttcatattttctcaaaaattttgggtatcgacttagagaaaaatggaattgaagtcgtaaacatcggtggagtagcctttaagccttttgcgaaattatttaattcagaacatatggataaaaaaataaaagtaagagctgctatactgtcagatgatgatgaatcagacggaaaaatatctcgcagagcaagtaatctgaataaacttaatagtgaaaatttgaaggtatttttaggtacaaaaacttttgagtatgaactatttctcttaaatggagaccttttaacaaatttatataagaagttacaccctaattttcctcagtctaatcctcaagaaaataccgaaaaaaatgcagattacctggtaaagaggttgaaatcaaataaagataagggtgaattttctcaacttttaatgatggaattaattgaaaatgaagatacaagaaataagtttaaagttccaaggtatatcgaaaaatgtgtgaagtgggtggttggggctgaggattga

SEQ ID NO: 75607 - DNA, 783 bp, Methanosarcina barkeri str. Wiesmoor; identical to SEQ ID NO: 72335

SEQ ID NO: 75608 - DNA, 1905 bp, Methanosarcina siciliae C2J
atggatgaaagtcctcacagaatacgattttttgaagatgatttttattttgataaatcttccaacaaaagaagcactgaaattgcaattgaattatcatttgatgaattagatgaaaatgataaaaccgcttttgtttggtctgggatagatatttcaaacaatcaacttagtgtacgccttgaggcaaagtgggaagaagaaaataatgatgccagtgtggaactcttttttgttagaaaagatgatcctgaaaatccgaagggagaaaatttcaaacttactcataaaagatacataccattctattacatcgatgcttatagagatatatggaaggaaacaaattcatcaaatggggatcttaagcaaattttcaaagaccataacaagcactatttaaaaccattaaatgcacaaattgcttcatgtataaaaaatatagaattatatttaaatgaatattgggaagatgaggattcttcgatttcagaaattttgtttgaaattgatggcaatttagaagattttgcttttgataactcgatgcccttggtggattgtttaacagagtttaatataaaattagctgattgcgatagacgtttagataaatgcatttctgaaacagaaccccaggacaaagagttgatcaaaaaaatacagcaaagtgtccagaatatatgccaaaaaacaagtatccaacagaccatagaggaattacaagcaaaaatgaatggactccatggaatccaagagattaaaagtatattaaatgaaaatttatctctattcgttccagaaagtcaaatcgaaatagatcttgcaaaaattgaagaatcaagtttacttgatgagaatcacgtatctttggaagatgtatctattttcaagcagggtagtggctttcaaggttcctttgtaatcgcgcttaagctcagtagattattcactcatatgaagttctcagatgatgaactcacgaaccttatagtttcgatcgaagaaccagaagcccatatgcatccacatttgcaacggagcttaatcaaaaaattaaaagctaaacaaaaagtctttgctgaaatgggctataacgttcagctaattattaccactcattctccatctatactgtcacaaatcgaaaagtcagacatctgtttattgagtaaaaaaaatgatgaatgcaagattgttaaactcgaccaagattttgaacatcaaatcattagcgaattaggtgccaaagaaaaactgaaacatttcgattttgtttttaggcaatatccagagatatttttgtcacgtggagtgataatagttgaaggacaaagcgaatttggcgcaataccggagtttgcaagaataatgaatgttgatttggataatttaggtatatctgtcattaattcaggtggtaaaggttcagcaaaaccaatgtaccttattataaaaaagtttactaactgtgtggcaataaaggataatgacaacgatttatcagaccctttaattgaggatcaaaatgaacctttttttacaacagactacatagactttgaagaagaaatcattacccatatagaagagttgaatttgattagaatttttttagatgtagactcgcaactttttggagactattatcttggtcaaataagaagatatatcgaagaaactcgaagaatggatgtttcggaactattatcaaaatgggaagaattggatttttctattttcttggaaaatacaaacagtgttcttgaaaatgaattaactgagactctgaaaaagcataaatcctcattattctcttcaatgatttgctctcacctttccgaaaacgaaattcctgaatgttacaaaaaaataattttgaaggcaaaagagatggtgatgtaa

SEQ ID NO: 75609 - DNA, 1776 bp, Methanosarcina siciliae C2J
ttgattgatgatccatctcaagatatagcaattaattatccagtcgaatcatctctttttgtgacagctcctcctggatatggaaagacctatgtgatgactaaaagagtagaatatttgatttcacgggaatgcataataccgccacaaaaattgcttgttcttacattttctaatgcagctgcagatgaaatgaaaaaacgtttagtaaaaaatatacctaatgttgaaagatatgttgatgtgatgaattttcacacatttgcgtacaagctcttgagatgttatggaaattatattggaataagcagatttttcaccattgttgatgaaagtaagaaaagagaatacaaaagtaattattatagaacttatatcgaaagttcatcatctaaatggggaagagaagctgattttgtatctgagtacaacacatggtataacaagaaatttttacaaggaacagattacatagatgtcgaaaacgaaatgacatttgaaaatttaagaagttcaatgaatgaagatttgatcaataaagaaaatttagattttgatcacttattatttaaggcaatagatctacttcaacaaaatggatatgtaaaaaatctatttttaaataagtatccaatattgcttgctgatgagtttcaggatacaaattacattcaatacaaactgtttaaggaaattggtattgattctaatgggactaaaaaagccgtttacgtaatgggggataaaaaacagacaataatgagatttcaaggagctaatccagataatattgcttttttaatacaagattttaactgtaatatgcatcaattaaacaaaaatcacagagcagattctgagcatatacttcatataacaaaaaaattaagggatccatcctttttcgtctcggaagcaaaacatgagatatatatacacaatacagttaaagaagaaataaaaaaaattatcgaagtaattatgaaattattgcaaaatggcgtaaatcttcataatatctgtatactatttccacaaaaaagaacctctaactgtatcaaaaaagtctttgaggagaattccatcgagtatgttgatataagtgacttcaaaatggactccatcaccgaagaatattcagcattaattgagggtataaggaaccaaattgaagaaaaatgtgcaaagaagtctgtacgaagaataattgatgagttgatcgatgaaaactactcaggtgaatccaaaaatactatactcttgacaaccattagaaagttctcttcttcttttgatagaggtcatttttcatcaatggaagtttggaaacgcttgcaagagttctataattgcatacaaatggaaattgactgggttcaacttgtaaaatcaaacgttagaaataaagtgtatttatcaactattcatggctcaaaaggacttgaatttgattacatttttatgatcggaatagtaaatttcaagatgcctcattctacattatgttttccgtgctctaatttcagaaatccccaacaagtagacatttcagagtcaaaagaccttttttacgtaggtgtcagtagagcaataaaagaaatcatctttttttacagcaagcaagatgagcaaaacttagccataagaagcagaaaaataagttgtgtttttaaagatatagctgaatgtttaaagtttattgatatcgaaaataacacttacgattttggaaatgaaagaataaatgaattattatgttttaataattgcagataa

SEQ ID NO: 75610 - DNA, 2076 bp, Methanosarcina mazei SarPi
atgataatcaaaaaattaaaaattaaaaattttagatgtttcggatcaaaagagacggtaattgaatttgaaaacttaacaactataattggtgctaatagtagtgggaagactgcaattcttgacgctttacttaaattatttggccgaaatggagaagaaagagatattaaaatctcagattttcatgttccaaaagataaaagacctgaggagattgttgaaaatgaattgtacatagaagctataattcacttcccagagttagttaacgataaagattgggcagaaaaaactattccagatttattcaataggatggtagttgataaagctagtggagatccctatgttagaattcgtttagaagctctctggaaaaagagtaatctacctgaaggagatattgagtgcgatctgttgtttataaccaattcagaagaagatgaaataaccgacgaaaaaaggtatcctgcaaaggtaagcgaaattagatcaaatattcaaatgatttatgtacctgctataagggaaccttcataccaactaagaaatgcttctggaaccatactgtggagaatgtttaatggaattaattggcctgaagacatcaacaagaagatatctgaaaaaacagagcctataaactctatttttgataatcaggcaggaattaaacaaatacaggaaattattggaactcaatggtcatcttttcatagagatcaaagatatacacaagccaaaataaaatttataagtaatgatttggatgacatattggatagagcaagtatcgagttttctccaacagaaattccaaaatcgtacagcatcaatactctaggtgagggtttaagatccttattttatttttcactagtaaattcattacttgaagtagaatacttatcccaaaaaggattgagaaaaaaagataacggagcagtagaagaagagaagatatttaatttgtcacctccagttttaacaattttggctgtagaagaaccagaaaaccatatcgctcctcaacttttaggtagagtaatcgacaatatagaccaaatagctagaaaaaacaatgcccaagtaattttgacgtcacattctccttcaatcgtaaaaagggttgagactgaatcaattcgttatgtgagattaaataaagaaaatttatgtacacatataagtaaaattcttctccctaaagaacaagatgaaatatataaatatattaaagaagcagttacttcatatccagaaatatactttgctcgactagtcgtcttgggggagggagactctgaagagattataattcctaaagctattggagtattggattcaaaatttgattcttgtggaattagcattgtacccttgggaggtaggtttgtaaaccatttttggaagttgttaactgatcttgatatacctttcataacgctgcttgatttagactccgagcgtgaaggaggaggatggggtagaataaaatatgtaatagaacaactcttagaaaatggttacaacttagaagagattttcaattttgaagaagcaaaacacctaaagagattgaatcttgagtctatgcacaagtggcctttggagacacttgaagatagagttaaattaatgaaatgggtagaatatctcgaagattatggagtcttcttttctgatcctttagatcttgatttctcgatgcttaaagcatttacgaataattatcaaaatactgctccaattaatggtggacctagaataccagacaaggtgaccgatccaacaaagtataagataaaaatggaaacatgtatccgttatacactcaaagaaagtggcggtgacggaaatacttttgataattcagaaaaagagttaatgttgtggtatccctatttatttcttgatcgtgggaagccaggaacccatattttagcaatgacagaattggacaatgaattatttaaaagtaatatgcctacttctctaattaaattggtccaagcaatcaataccaagctaaaagatgatcctttttcttcctcagatggactcaatatataa

SEQ ID NO: 75611 - DNA, 1905 bp, Methanosarcina mazei SarPi
atggactcaatatataaggtgatcaaactgagagtaactcctattgactggaaaccatcagatggtctaactttagaagacaaggctcttgaaactgtaaaatcatctactaatttttacgttatcgctggaccaggagcaggtaaaacagaactacttgcacaacgtgcttgttttttgctacaaactgatacttgtagagaacccagaaaaatacttgctattagtttcaaaaaagacgctgcgagaaatatagaagagagggtcaaaagaagatgcggcgatgagcttgcgagaaggtttatatccaaaacttatgattcctttgctaaaagcctacttgatcattttcgaaaagcacttccaaatgactataagttatctccaaattatgaaatcatttctgatgaaaaaattattgatagatattttgggttgattagatcacttgataatctgaatgtaagtagggagcaaatgaataatcttaaaaagtatttggcaattaataaattgcccttaaattcaggctcaagtggcgatataaatgagttaatatatgatatatggatgtacagtttgcaaggagaagataatcaatcagaaataacttttccaatggtttcaagactgagcgaatttttaataaggtcaaatccaaaaattcgtagctctattgttgctacttatagtcatattttcttagatgaatttcaagacactacaaataatcaatacgatttaattaagacttgcttctataatacggaaaacattttgacagcagtaggggataataagcaaaggattatgacttgggctggagcagatgtggaagtatttaataaatttaaaatagattttaaagcaaaaaaatgtgaacttttaatgaactatcgctctgcacctagattagttgaaattcagaaaatattaataaaaaaattaagtgataatgagggaaatgtatctacaaacgaaaaatggaataaaaacgacggaatttgtgaagtgtggaactttaacaaccatttagaagaggccaaaatacttgcttctgagattactcaattgataaatagtgaaaaactgaatccaaatgatatttgcataattgcaaaacagcagttggatcaatactgcacttgtgtaattgaagaattaaatgaacttggaattagagcaagaaatgagactatgttccaagatctaatctctgaagaatttgtacacttggtgctagacataataaagtgttctatatcagaaaaatcaagagacgaatgggcaaactcaagagagatgactagatatattcatggtatatcagtagaagacgacctaaattttacgaagttaagaatgttcgataagaattttaaattcgcattaaaagagattaagaagaaattttctggagtcaaaagcaaggaagaccttaaaactgctttggacgaagtaattaattatttgggtaaagagaaattaatagatttttttccccagtatagccagcataattactttgaacagatctataataaattgcatgaatatttatggaatgaatattcatcatgtggagactgggtttatgctatagagtctttaaaaggactacgctcaatccctattatgactattcataaaagcaagggtctggaatatgatactgtagttttcattggtttagaagatgatgcattttggacctttaagaagcaaacagaagaagatatgtgtgctttttttgttgcactttcaagagctaaaaagcgagttatttttacatttagcgaaactaggatcaataatggttgtacaagaaagcaaagaagaaaaaatataaactctctttaccaaatgttagagcaatcgggagtagttgatgtccgtaatttctga

SEQ ID NO: 75612 - DNA, 2013 bp, Methanosarcina lacustris Z-7289
atgtacctttctgagttaaaaatatcgaattttcgtaaatttggtgaaggggaaaataacagtccgggtttatatgtaaagtttaactctggattgaatttattagttggagaaaatgactccggaaaaactgccatcatagatgctataaaaatggttcttttcactcagagttacgaatattataaactggaagatgaagatttccacataccttacaatgcagatgagggagaaagagcaaaagaattaagaattgaatgtatattcagaggatttcaatcttcagaagctaaaaattttttagaatggattagtattgaaaaggattccgaaggcgaatcccattattatttaagagtatttctcataggtcgaagagagaacggaagggtgtatcgagatttaaaagcgggatctgacgaacaaggaacttctttagatgggaaagctcgtgacttattgcgaattgtttatttaaggccgttaagagatgctgagtttgagttaagtccgagaagaaactcaaggttatctcaaattctctattctcatagtgattttgctgacaaagaaaaacatccaataatagaagttgtaaaaaaggccaatggggaaattgagtctttttttgaagagaaaaaggacactgagtcagaagggagtgaggaaggaactgaacccgaaaaaggtgaggaaaccgaatctggacaaaagggcgaaacggaatccaaagaaaatgggacaaaaatagtcactcacataaatgactatttaagaaacttttcaagtgaaaataatcaacttaaatccagcatttcaattgcagatatgaacttaaaatcaatattagaacagttgagcttgaatttatccatcaataaagctggattaggttctgataatcttttatttattgcttctgaacttttgctattaaaaagagaaaaatataccggcttgaaattaacactgattgaagaaattgaagcacatttacatccccaagcccaattgagactgatagagtatttgcagcaagaaagtaaaacccaagaatctgatgaaaaagttcaattaatacttacaactcatagcccaaaccttgcttcaaaagtcaacttggaaaacctgatcatctgcaaaaatggtaaggttttcaatatgggaagagaatacaccaatcttgaaaaaggcgattacctatttttagaacgtttcttagatgtcacaaaagcaaacctgttttttgctgagggggtaattcttgttgagggcgatgcagagaatctattgattcccacaattgctaaaattattggattacctctttcaaaacatggtgtttctatcataaatgtgggaagtactgcatttttgagatattcgaggatatttcagagatcaaaacctgaagaattcattgacacatatgttgctgttataactgattgtgatgctagacctgattacttctatactgcagaaaataaaaatcggaaagaagaagtgaaaaagcaacctgaacttggttattcgcaaagagttgaaaaggcgataaaagataaagaatcacattataatgggcatcctgtaaaagcgtttatttctaatgattggaccttagaatatgcaattgcattaagtgatctcaaaaaagatttttgtagagcagtattacaaggcaaaaaaattaagaacagtaatgccatcactttaacgaaagaaaagaagaaagaagtagatgaggaagtagaatcaaattttaagaattggaatgatgaagaatgggttaatgaaaaaatagcttttgagatttataataatatccaactcaaaggaggtatttcaaaagctattgttgctcagtgcttttccgaaatattagaagaatattctgatcaaaacgaacttaaggaaaagctaataagtgactctaatttcaaatatatcattgatgctataaattataccatttctggaaaggtagaaaaggaggcatccgatgattga

SEQ ID NO: 75613 - DNA, 1914 bp, Methanosarcina lacustris Z-7289
atgattgagatctcggatggggatattgagtatgccgagaaaatatttttgccagaaggttgctcttttgattccgaaagaaaaactgtcataaaatgtatggaatctaaagatatccaagcctgccccggaagtgggaaaacaactacattattagctaagttagctatacttgctaaaaaaatgccattagaggacaataaaggagtatgcgtcttaactcacacgaacgtagcaattaatgaaattaaggggaaattgggcaaaaaaggagacatcttattttcctatcccaactactttgggacaattcaatcatttgtagatcgttatttagcgataccatcctgcctctattattatggtacaaggccctctaagatagactcgtcatcttatgactttgaaatgaacaacatatataataaagtgccatatcaaagtcctttaaaaaaatggttatacgcaagctcaaagtataaaggtattaaaccacatgaactttttttacgaatacgaattgattttgtaaatgggaaaattaaagatgatattaatgcaacaaaagctcttttgtctgacactaaaaatgaaaaatatgtagagttattttcaataaaggaaagtctgttcaaacagggaatcttacattatgatgatgcttactctttagcctttaggtatttaaatgaatttggagaatttataacaaaaccactatcagagagatttgcttttgtatttattgatgaaatgcaagacactgatgagcatcaaaacagactaattacacaaatatttgacgaatcaaaagtagtcatccaaaggtttggcgatacaaatcaatcaatatatgataactatgtcagagaaaatagtgtttgggaaattggagaagatagcttacaaatcaatggaagtaaaagattttcaaacaaaattgcagatattgtcaaaagactttgcttacatgaacaggaccttcttgggaattcattagttcaagagattcaaccaaaaatcttggtgtttaacgatgaaacaataggatcagtaatacctttttttggaagaataataaatgaatgtaatctttgtgaagaaaaaaaagagtttaaagctattggatgggtagcaaaagaaaaagaaggaaaaagaactttaccgtcttatttcccagaatttcaaaaaaagtctcaccacaataaaatagagtctgatttcttgtgtgagtatctgcagaggatagatgacaatactatcaaaatttacggtgctaattattacaggcaattaatggtaaactcactcctgaagacattaagacttcttgaaataaaaaacccggataatttacacaatttcactgaaaagtcattaattgaatattttgaaaaggaagataagactttcatggataattttgaagcaaaggtagtaaaatggtgtttgaagattcattcgggaacaaacatttcagaggagtttgcaaacgttatcagaactgatttttgttcaaattttgatggagtgaatattgataagcttagagacttttttaataattctatacacggaagagaagaacaatctcgagaaacgaacatttatggaggagctgattttaatattgaagtagctacagtccacagtataaagggagaaacacacactgcaacactttatcttgaaacttattacagagattacgacgttggacgactaataaagtatcttgcagaaggaaatggcaatccaaatagtgttcataatatgtcacttaaagtagcctacgtaggcatgacgagaccaacttgtttactatgcgtagctgcacatgaaaatagtatttctgggtatgaagaatttctacgagaagcaggatgggaaattagggaagttagaaatgaataa

SEQ ID NO: 75614 - DNA, 771 bp, Pseudomonas sp. 10B238
caggtgttgcactcagtttttgccgccgccaagtttctgcatcagtatatgacgttgacccgctgcgacctgtttttttccgacaaagcgatcctagtagaaggtttgagcgagcgactcttgctccccgcgatcatcgaaaaactggaaaccgcagagccagatcggccaaagctatcaagccagtacgtaaccactatggaagtcggtggagcatatgctcatcttttcttcgggctcctgcgctttcttgagttgccaaccctaatccttaccgatctagattcggtagaaaaaccgggcggaagcgcgtgcgaggtccacaagggaacctactccagcaacgcctgcctgaaagcctggttctccgatgataatccattcaccctcaatggcctcttgaccaaggatgaatccgaaaaggcaaagcatggcaactgcatcgcctatcagtgcgcggagaaagagaacgggccatgcggtcgcacctttgaagatgctttcattctcgcgaaccgagcattattcggcttgaatggagccacacgggaagagcttgaagcgggagccagaagccaagccagtaagatcaagaagtccgagtttgcgctgaagtacgcaatagaagaaaaagcctggacgacccccaagtacattctcgatggaatacgccggctagcggctggcatcgagccagctatccctgacccggcgcttgccctggcggccgaggcgatgatcgccaacgaggaggatgccgctgatgcctga

SEQ ID NO: 75615 - DNA, 1740 bp, Pseudomonas sp. 10B238; identical to SEQ ID NO: 73877

SEQ ID NO: 75616 - DNA, 1539 bp, Burkholderia pseudomallei MSHR1328
atgggcgtggatggcgatatcgaggaaacgttggtctatgtgctggaccttaatagtgacgggtcgcctatgacgaccgcacaggttccacgagtcgaaagaaatcacgtgcaggttcactatctacccgcgcgccgtgatccagccgaacacattgcttacggtacgaatgcattgcttgggcgcatgttgagagccgttaattgggaagacgagcgcgaggaagtcaaaggcttcacggaccagatcagtgggagtctcgccgcaaaccgctcggttgctgctttgagcgagagcctgaaggcgacctggagtacgttgcacaaaggcagcttctttgcagatccgcacatcaccttcgtcgcatctgagattgaagcccttctgcgccacttgtccgtttccttctcaccgggacatgacgaagaactcgtcgatttctcgagactgagcgatggtcagaagtccatgctctacttgtcgctggtgctctcagcacagtccatagggcgtgccgtccttgccggcgaggacgattcattcgacccagacaagctgcgtccacccgtatttacgatcgttgccctcgaggaacccgaaaacagcctgtcaccccactacctaggacgcatcgtgaatgccttggtggctatgacgggcaacgaggacgcccaggccctcatcgccacgcatgcgccttccatgctgaggcgtgtcgacccgaagcacattcgctacttgcggctcacggatgaacgtacgacgaagatcacgcgcattcggatgcccaagaagacggacgaggcacacaagttcgttcgggaggcggtacaggcataccctgaaatctacttctcccgcctggtcgtcctcggagagggtgatagcgaagaaattgttttgcctcgaatcctgcgcgccaagggcatcccggtagacgagtccgcagttaccattgcgccgctcggtgggcggcatgtcaaccacttctggcgcctgctttccgcgctcgagattccgcatctcacattgctcgacttggatgtcgcccggtatcaaggtggttgggggcgaatcaagtacgtcaatgatcaattgggcgaatatgcgcccagcaagacgcttcctccggatcacagcgttcctgattggaactcggcagaacacaaggttcgtgactacgacaactacttggacaagttggaaagccgggatgtcttcttctcttacccgatggacctcgatttcgcgatgcttctttcctatccgggtaagtatggcgttgaatcgaaaccaccgagtgagaccaccattaaggcggtgctgggcgacagctatcacgatgcgaagcaatatactgccgatgaactcggcctgttcggcacctatcacaagcgcttcaagcttggcagcaagccggcagcccacatcgaagcattggcccaactgactgataagcaactcctcgaagacatgcctgagtctctgagtcgcttggcggacgcagtgatcgctaagctggaggagttgccggagtga

SEQ ID NO: 75617 - DNA, 1668 bp, Burkholderia pseudomallei MSHR1328; identical to SEQ ID NO: 75071

SEQ ID NO: 75618 - DNA, 1968 bp, Sphingomonas sp. SRS2
atgttcatcgaacgcttgatcctgaccaatttccgctgcttcggtcccgaacccggatcgatcgacctggcgtccggcttgaccgcgtttgtgggggtaaatggtgccggcaagacagcggtcatgcaggcactgcaacgcctgttcggggtgaccggcgaccaacgccgcctgcggcgtcaggacttccatgtgccggtcgccgaagccgcaccggcgcgacagcgggccttcgtgatcgaagcgatcctcgccttccccgagctcgatgcggaaggcggcgacaacgccgccgtgccagagttcttccaccagatggccgcggacgacgctggcaggctgaaatgtcgcctacgcctacaggcgacttggactgaagacggctcccttgacggcgccatcgaacagaaattctgggcgatccgaacattcggcgatttcaccgagaccgactgcatcgagttgaaagcgatcgaccgcgcccgcgttcagatgatctacgttcctgcggcgcgcgacggcgcttcgcaggtgacggcgttcctgcgcgggcggctttggcgcgccatcgactggtcgcaggaagtgagggacgttttcgccgaagccggcgccaccttgaacggggcgttcggcggagaggcagccgtcgatctggtggccgcggcggtcaagcggcgctggcaggaagtgcatagcgcgggcaccgatacgactcctgtctttcgaccgctcgatctgcggtttcaggaattcatccgcaaggttgaggtcgtctttcaccccgacgaagctggtcgcgagcgcagtctcgacgatctcagcgatgggcagcgttcgcttttccatctcgccatgaccgccgccattcttgatgtcgaagcgcgaatcgctgcggacccggctggaatcggcttccaggcggacggtgtctcgctgcctgccctgactctgatcgcagtcgaggagccagagaacaatctcgcgccgttttatctgtcgcggatcatccggcagatcgaagacctgacacgcgggaggcgcgcacaagcggtggtctccagccactcgccaagcattctcgcgcgcatcgacccgacacaagtccggcattttcgcctcgatccggccgaccgcacggcgaaggttcgtccgatccggctgcccgaaggtcaggaagcggcatcgaaatttgtgcgcgaggcagtgcgaacctatccagaactatatttcgcgcgcttcgcggttttgggagaaggcgcttcggaggaagtcgtgttgccgcggttggcagacgcgctcggcttcgcgatcgatcgctcgttcgtggccgtcgttccgctcggcggccggcatgtgaaccatctctggcgcctcctaacggacctcgacattccctacgcgacgctgctggacctcgactggggtcgggccgggggcggctggggtcgcgtcaagacggcgtgcacgcaattgctagaaaatggcgtcacgccgcgtgcgttgttcggtgaacaccttcaagctgatggcccggccgcgaacctcgccgcgttcgatcgcctcgctgccgatgactccaacaatcttgatgcttgggcaaagtggctgcgccagtttggcgtgttcttctgcgcgccgctcgatctggactattcgatgctgcgcgccttccccgccgcgtatcaggtggcggagcccaatcggcagggaccctcgaaccgcggcgatccacggacggcggtactcggcgacgacggattaccagcgctatatccagctgatcaggatgggctgctacgttggtatcgctacctcttcctcggccgcggcaagccgagcacgcacgtccgggtgttgagtggcatggcggccgcggatctcgcggccggcgcgccggaggagctgcgcgcgctgctcaccgcgatcgtcgcacggcttgagccgccggcgccggtggaagcctga

SEQ ID NO: 75619 - DNA, 1884 bp, Sphingomonas sp. SRS2
atgccgcgcgttcggccggacgactggcgaccgcgagggatagaggacctcgaaccccaggcttggcgagcgctccgtcaggccggctgcacctgtgtcgtcgccgggcctggcgccggcaagacggagttcttggcgcagcgtgcggtttatctgctcgagacaggcgcttgtccgccgccctatcgggtactcgccatttcgttcaagaccgatgcggccgacaatctcgcagcgcgcgtgcggcaacggtgtccgcccgagttggcgggccgcttcgtctcgctcacctttgacgccttcaccaagggcttggtcgaccgcttcaccaccgccatcccgcccgattggcgcccaggtcggccctacgatatcgcgttcccgacacggcgacaggttgaaggattcctcgaccagacgcgcctcggcgccccgccgcaatggcagtccgcgattgcgggcttcggggtcggagatttcgagtcgcgacatgtgggtggtcaccgcctgccggtaattcgcgccgagccggcgtctggcgaggaatatgctgtcgatcgttggtggcacggccaaattcgagggcgggcgcgggcgtcacttaccttcgtcagcctcaatcgcctcgccgaactgttgttgagggcgaacccgcagattcgccacgcgttgcgggcgacgtatcccttcgtcttcgtcgacgaattccaggacacgacttacgcgcagtacgatttcctcctctctgctttcgccgacggccggacgaccgtaaccgcagtgggagacgataagcagcggattatggcgtgggctggtgcgcggctggacgcgtttcagcggtttgaggcggattttggtgccgtccggattcccttggccttcaactttcggtcgtcgccgggcctcgtgcggattcagcatgtggtcgcccgcgcattggacgcgaacgcgatcgcaggcgtggcgcaggctgctcagctcgtggatggcgatgtcgctcaggtctggaacagtcaaacgcgagatggcgaagctgaatatctcacccgatggctcgccgaggacatggcgcgtcgcggtcggtcgccgcgcgactacgccttacttgttcgacagaagtcggacgactacgaagcggagctctctgcgccacttgcccaggcgggcttgcggctacgaaatgagagtcatgcgctcggccgcaccacgctgcaggatttgttggctgacgagctcgctcgcatcgcgatcgcgctactgcgcctaggagcgctccggcgcgcgcccgacgcgtggcggctggcgtcgaacgcgctccaaagcctgcgtgcggtcgatcccgacgatgagctggcttgccatagggtcgaagcggaactcaccgtgtttctgggggatcttcgagcagaaatggcgcgcgccgcgccaacagtggagaacagccagaccattactggtcgtctctttggatttctcgatctgggtgcggtcgctcgaacctttcttgagtatggaacgggtgagttgctggccatcatggtcgaagcgtttgggctgcacctggcggcgtccgttgctggagctgcgagctggtcagcatgcctcgactcattcgaaggcgtcgcacagattccgttgatgacggtacacaagagcaagggcctggagtacgacacggtcatcttcgtcggcttggacgatcaagcttggtggagccacacgcccgggaatcccgagggtctagcgacgttctttgtggcgttgtcccgagctaagcagagggcgatcttcgcgttctgccagggacggggccagcgcaggcgggtagcggacctctttcaactgctgaccgacgccggcgtcccggagatcgccatatga

SEQ ID NO: 75620 - DNA, 2046 bp, Porphyromonas gulae
atgtatattaaagaaattaaaatatcaaactttcgaaactttaaagatgcttcgatacccttccatgaaggagtgaatgtcataataggccataataatacaggtaaaagtaacttgctccgtgcaatggggttagtgcttggctatagtaatggtcataggttaggtacgagtgacttattttatgagacaaatgtggcaatgcttcaacagcagtcaccacgtattcaaataactcttgtcctccgtagaagtgaagatgaagccttggattctgcagaaatgggactgttctctagtatgatgacagatcctgcattaagtgaagaagctgaattgagatacgaatttaaattgactgatgcgcaagaggacaactataaggcagatgttgctaacgcaaatacagctaaggagatatggaaaattatagatcatgactacatcagactctatagaagtagccgctctggtggaaatcaggcggcaggtatcagcgtcaatgatgctttggggcagattgatttccagttccttgatgccattcgcgatgtcagtcatgacctatacgctggttataatccgctccttagggatgtgctgaatttcttcattgattactctgttaaaaatgatgccacaaagacagaagatgaaataaaggaagaattaaaagcccgaagagataaatttgtccaacagtctagtcctctgatgcaaactttacaagaaaggttacaggatggtaaaaacgtatttctgaaatacgcactcgatacaggcgcaacatttaacggagctgtaccagattttgatggagaggtgacggaggatgagatgtttgcagtgttgagaatgattattaagtatgctgttggtatagaagtaccagctacatataatgggttaggctataacaacctaatctatatgtcgcttttgctcgcaaagatgcaggctgacggtagcgttacctatatgaagcgcaatgccaaggtgctctcattccttgctgtagaggaatgtgaagcacacctgcatccagccatgcagtacaagtttctaaagtttctgcaggacaacaaatccaatggacatgtgcgccagatattcatgacctcacattctacccagattgcctcagccgtgaaattggatgacttgatttgtctaacttcacctgaattagggcagatcaacgttggctatccacgtgtcatttatcaaaaagataatattgatgatgtggtgtctaggcaatatgttcagagatttctggatgcaaccaaagcggatatgttttttgccaacagattgatattcgttgagggcattgcagaggagttattgctccctgtctttgccagatatttgaataagaaccttacagatgagcatgtgctggtggtaaatatgggtggtcgctacttcaaccatttcttaaagttgtttgatacgaacaaactatacaccatcaacaaaaagatagtctgcttgacagacattgattcctgtaggaaaaagaaaggacctgatgaggaatacgaagcctgctatccatacgagtacaatatagatacagacaactatgactataagcatcatgcggatacagaggtagctcaatatgcaaaccatcccaacattaggttctacaggcaagatgcgacatatggcaaaactctggagtatgacataatgcgtgagaatccagattgtgagctgttgctgactcattctgtttccaatttgaaggagataaaagctatgatggcagagcaggatataaacaggatgatgactaaaatgcgaaacagcgaggccaatacccgtatcaagagctctatagaagcatcggagtggacggatgaagaaaagcgaaaagccttacttgcatcacgttatttgaactccgtttcaaaaggttccaatgcgctggaactaaacgtagcacttatggctaatctggagaaaccagaagcagacagaaaagagttccatgtgccccaatatattgttgacgcattaacatggctactatcataa

SEQ ID NO: 75621 - DNA, 1665 bp, Porphyromonas gulae
atggctactatcataacatcagaagagaccatacctataaacgaaccgtttaaggtgactgctgggcctggtgcgggaaagacgcattggctaataaatcatatcaagaatgtggtgtcaaatagccacaaacttgatgtggtgaggaaggtggcttgtatcacttataccaacgtgggtatcgatacgatcacttcacgtttgaatatggggaatgacgtagttgaggtatgtaccatccatagtttcttgtatgccaatgtggtaaaaccctatgttcatctggtcgctgaagatttcgggctgaagttggacgaacttgtggttatagatgactctaattttaaatcagaaggaatagctgcattagtattaaggcgtatcggtaaatcatggttagatccccaaaaatatctgggaggcttgaagaatgccacgtggcgttatggaaaccatgagtacaacgattataaacccaatcacccaataaaggttggcaaatggcatgtgggtaatgactgctatatggagttcaaaagatggctatggagtgaagggtacatgtcttttgatgacattttgtatttctcttatattctgctttcaagataccccaacatatacaagttgataaaggctagatatccatatattttcgtcgatgaatttcaagacacgattccttttgtggttgacttacttactcaattaggcaatgatggggtgattgtgggggtggttggcgacaaagctcaatcaatctatgattttctcggcgctacggtgcagcaatttgacaatttttctgtgccaggaattcaggagtatgagatacgagggaataggcgtagtacgaaacagataatagacttgctgaatattatcaggactgatttttcgcaagactggctgaatggatcagaaggaatgatgccagaattgcttgtcggtgatatgcttaactgttaccaacagtgtatagaaaaaagtggaactgacgaaatacaatcgcttgcctttcaaaacatacttgccaattccatgcgtaaaaagaacgggatgcgggaggtagagaatatattagagatggattttgacagcaatgcagggcgtcagatggtgataaaggcattgattaaagccgtggaatatacaagaatgaacgacttgcgaaatgcttggcatcaattagacatcatcaatcgcgataggacaataaccattgtggttctaagacgcttgttagatggctataaggactataaagacggaagcctgatggatttctacaattttctggtgaataatttacatgtcgaaatgaccaagataaaaggcacggcaatcagggatttctaccagaaccacacgtacgctgatgctgcccttggagtgaagtatggtgattcaaatggcaagcataaaaccatccataagtcaaaaggagaggagtatgataacgtgtttgttgttctgaaagaggaaaaagacttagaattcctgttgtcaccaaacctaaatgacaacaactcacatcgggtatattatgtggctgccagtcgtgctattaaacgattgtttatcaatgtacctacgctgaatgcagaaaaccgaataaagtttgaaggtaaacctattgatatttctttcataaggacaagttga

SEQ ID NO: 75622 - DNA, 2097 bp, Flavobacterium psychrophilum; identical to SEQ ID NO: 71912

SEQ ID NO: 75623 - DNA, 1902 bp, Flavobacterium psychrophilum; identical to SEQ ID NO: 71913

SEQ ID NO: 75624 - DNA, 1164 bp, Flavobacterium psychrophilum
atgtacaatcataatgaaagttcattgccagaacattacaatggtcttgggtatatgaatttaataagtatgatatttgaaattgaaatacttattcaagattttaaaaatagtaaagatgaaaaaccttcggatataaatttactatttattgaagaaccggaagcgcacactcatccacagatgcaatatgtatttattaaaaacatcaaggaattattaaaacaaggaattaaaagagatgatggtcaaagtggagaattgcaatcaataattagtacacattcttctcatattgtttctgaaagtaattttgatgatattaaatacttaaagaaaaacgacaacaattctgtaatcgcaaaaaacttaaaagaattaaaagaagagtataaagcaaatactaaacagtatgaatttctaaaacaatacctcacaatcaatagagccgagatattttttgctgacaaagtaattttaattgaaggagatacagaaaggattttgtttccaactttgatgaaaaaatatgatattgatgaagaaaaaaaatataaaaacctcggaaccgttgatgattcacttcctcttctttctcaaaatatttcaattatagaagttggagcatattctcaaatttttgagaaattcatagaatttataggcataaaaacattaattattactgatttagatactgttggactagatgataaaaaatgtgaaccatcaattggagttagctattctaacgatgctttaagctttttctttaatgatccgacattaactgatttaaaaggttttactattcaaaataagatttttagtaatactaatggtttatggaatgttgatgctaatggtaaattatgtgttgtttaccaaatactagaaaatggatttaattctcgcagttttgaagattcctttattcatttaaatagagaatttatcactccattaaaagatgagtttaaaggcttacaaaatcgcacaaattttgataatacagctaataacgcttatctattagctgaacattgtattaagaaaaaaactcattttgctttggatatactatataatagcaacgatgattttagtaattggcaaataccaggatatataaatgaaggattgttatggttaaaacaggattag

SEQ ID NO: 75625 - DNA, 1902 bp, Flavobacterium psychrophilum; identical to SEQ ID NO: 71913

SEQ ID NO: 75626 - DNA, 2097 bp, Flavobacterium psychrophilum; identical to SEQ ID NO: 71912

SEQ ID NO: 75627 - DNA, 1902 bp, Flavobacterium psychrophilum; identical to SEQ ID NO: 71913

SEQ ID NO: 75628 - DNA, 2097 bp, Flavobacterium psychrophilum; identical to SEQ ID NO: 71912

SEQ ID NO: 75629 - DNA, 1902 bp, Flavobacterium psychrophilum; identical to SEQ ID NO: 71913

SEQ ID NO: 75630 - DNA, 2097 bp, Flavobacterium psychrophilum; identical to SEQ ID NO: 71912

SEQ ID NO: 75631 - DNA, 1902 bp, Flavobacterium psychrophilum; identical to SEQ ID NO: 71913

SEQ ID NO: 75632 - DNA, 2019 bp, Xanthomonas campestris
atgcatctcaagcaaatagatgtcaagaacttcaggctgctgcacgatgcccggttgcttttggagaaccgaacgacagtcatcgtcgggcgcaacaacagcggcaagacatccttgaccgaagtgatgaagcgccttctgtctgatgcttctccctccttctccctggaggatttctcattctgctgctatgaccaattctgggattcccatctccaaaaatccgagaatgaggacgaggcagagataaggaagatcttgcccgcgatagaagtccggcttcgcttttcgtatgagaagggcgagcacctcggtctactcagcgaattcattgtcgacctcgaccccgaatgcacgggagccttggccgtcgtccggtacgcgctcaaggacggcaagctgactgaattgtttggcgactttgcggaaacggacgaggatgcgagaccagacttcttccgtctactgcgcgaccgaattccgtcgctgtatgaaaccactttcgtcgccatcgacccaaacgatgaaaccaatgtgaaaggcattgaaaggtcgacgctgaggaaactttgcgtcggtggcttcatcagcgcacaacgggggctggatgacgctagccaaaaagagcgcgtggtcatcgggaaggtgctggagaatttgttctcgacggccaagagcaacacggacgacagggacagccacgtcatcgcccaggaactcgaggtcgcggtcaagtccatccaagacaagataggcgacgacttcaacgaaaagctcgacaggttgcttcccgcattgtcgctatttggctatccgggcctcaatgacccaaagctcctgactgaaacgactctcgacgtcgccaagctcctgaccaaccacacgaaagtccggtacaccggatccaatggcatccatctacccgaggcctatagcggcctgggaacgcgcaatatcatcttgatcctcctgcagctccgggagttcttcaagctatatctcgcgatggagcctaggccctcggtgcatctcgttttcatcgaggaacctgaggtccacctgcatccgcagatgcaggaagttttcatccgaaagatggcggatatagcgtcagcgttcaacaaggaaaccggcgaatcgtggcccgtgcagttcgttgtctcgacgcactcgtcccatgtcgccaatgaagctcattttgaaaccatccggtatttcctggcttccgcggacaagaacggcactgtcagcaccaaggtgaaggatctcagggaagggcttgccggtaagcccgaaccggatcgcacattcctgcatcaatacatgaccataacccgatgcgacctgttcttcgcagacaaggcggttctgatcgaaggcacaacggaaagactgctgctgccaaggatcatccagacgttggacaaggaccttgcggagggaaagaagctcggtagtcagtatctttctgtcatcgaagtcggcggcgcctatgctcacatcttcttcgacctcgttaaattccttgagcttcggaccttggtcatcactgacctcgacagcgtgaaggccaacagcgccggcaagctcgtagcttgccaggtgtcgcaaggccacaagaccagcaatgcgtgcctgaagtcctggtacgacaacaatgacatcacccctgcagaactgttggcggccgatgatgcagccaggaccaaaggccggctgcggctcgcgcaccagtgtcctgagaccgaggcgggcccttgcgggcgcagtttcgaagatgcgttcatgctggcaaacccggaacttttcccgttgccgggacccggcgagcaagagaaggaaacccaagcctgggaagaagcgaaagaggtgaagaaatccaaattcgcactcgagcatgcgctgtccgatggcgactggaacatcccgcgctacatttggaatggattggtatggcttgctgaaggcgacctgccccctgcgcccgcgccgcccgccgaagcggaagtggctgcatga

SEQ ID NO: 75633 - DNA, 1755 bp, Xanthomonas campestris
atgaatgccgtccccgaagccagccccgcgctgatcgccgcgcgggaagcggaagcacttgtcgcgcaatgcctgcaggatcaccacagcttcctgctcgaagctggcgccggcgcgggcaaaacctattcactggtggaagcgctcaagtccctcatcgaacatgagggccctcagctgcgcagggaccaccagcgcatagcttgcatcacctacaccaacgcggccacgtccgtcatcaacagccgcatcgacagcgacccgctggtctttgtcgacaccatccatgcgttctgttggtcgctgatcaggaaatttcagccggcgctgagattactagtcgcggcgatgccggaatgggaggagaagctggcagaggtcgatggaatcggcagccggaccgtcgagtacgaactgggctaccgccgtgtcaccgccgacaccgtcaccttgcaccacgacgacgtcttggggttgatggtctctctactcccaaacgcaaaattccaggcgcttcttgggcagcagtacccgttcgtgttgatagacgagtaccaggatacggacatagcagtgatgaccagcatgagcgagcacctgctcggacgcgcggccgggccaatgatcggcctgttcggcgatcactggcagcgcatctacgacaagacatgcggccacgtcgcccatgaatctctgacggaaatcggcaagaaggcgaacttccgctcagcggccaagatagtcgatgtcctgaataggatgagaccaaacctaccccaagcgctgaaggacgagggagtcgttggttcggcgatcgcgttccacaccaatgcctggcagggtgaacgccgatccggcgcgggaggtgggcactggaaggccgatcttcccgccgagatggctcatgcctacttggcgacgctcatcaagaagctggaatcagacggctgggacctggctcctcagcgaaccaagattctcatgctcacccacaacgttctggcttctgagcagggctacgattcgattaccaagatcttttcttatacggatcagttcatcaaaaaagaggatccgctcattgcattcttttgcgacgtgcttgaacccgcctgtgcggctttccaacacaagcggttcggagagatgttttcattgctaggtggctcggcacctgccgtcacttcgtatgcggacaaggtcgcatggtcgtcctctatggagggcctcgtcaaaattaggctcgatggaactatcggaaaagtgctggactacatactcgagcatgtgcagcctcgactaccggaggctgtgctcggcacgcttcgacaggccgcggagtggcatggcgaggaaggggaggagcccccgcgccgggttcaacaactacggctgctgcgggatgtcttctacaaggaagtcatcgccttggatagctttatcgatggtcacaccccgttcgctactaagcacagcgtgaagggtgatgagttcgagaatgtcctgatcgttatcgggcgcggctggaacaagtacaacttcgaccagttccttcaatggtcggccgaaggtgtcccagaaggcaagcgggaagcgtatgagagaaaccgcaatttattctatgtctgctgttcccgtccgacaacgcgccttgcgctgctcttcactcaggagctctccgacacttcattggcattgctccacaactggttcggcggtgcaatcggacccgcccctgcaccaccagagggctga

SEQ ID NO: 75634 - DNA, 1860 bp, Alicycliphilus sp. B1
atgcgtgtagcccgcatagaaatagagaacttcaggggtataaaacaggcgaggttgctttttcccaagcatggcgttcttatcggcgacaacaacaccggcaagacaacgatactggaggccctagatctcgttcttgggccggatcgcctcaatcgccagccctcgattgacgagcatgacttcttcgggggtatttatgtccaaatgcccgattcctctccgggaaacgttggggccgagggcggcgctccgcctgagccatctgcagaagttgcggaagacacggctccgaaaatcgttatagaggcgacgattgcggacctaagtgatgagcagaagggaaaatttggcgactacatcgaattctgggactcagcctcggacaaattttatgacgcccccaatcctgctggcgtcgatgctgcgtcgatcgtagaggcacttcgcgtcacttttcatggttggtacgacaaagaagaggacgacttcgagggggcgacctacttcacccgcagccttaccgaaggcgacaagcccgatcccttttcgagaaagcacaagcagctttgcggctttctatacctccgctccattcgcaccggttcgcgtgctttgagccttgagcggggcagcttgctcgatatcattctgcgcttgaaggaagtcaggccgcagatgtgggaggacaccctcaccaccctttcggatatctcagtcgccagcgatcctgcgttgggtatttcccctgtattagagagcatcaacactgcgctgaagaaatacgtcccgaaagaatggggtgttgaacctcatctcaaggtatcgaccctcactcgtgaacatctaaggaaggtcatcacagccttcatcgctacaggcgatgggacgcatgcagcgccgttctatcgccaaggcacgggcacgatcaatatgcttgtcctggcgatgttgtcccaaattgctgagaccaagcagaacgtcatatttgccatggaggaaccggagacagcaatccctccttatgcgcagaaacggatcatccacgaagtacgcaaactggcatctcaagccctctttacatcgcattcgccctatgtattggaggaatttgcgacagaggaaaccgttgtgctcgcgcgcgacgccgaagggcggttgggacaaagggctatagcgctacccgacaatgtgaaaccaaagcgctacaggcaagaattccgcacacgcttctgtgaaggtttgcttgctcgccgtgttcttctcgcagaagggccaactgagtattcagcgttcccggtagtgtgccgccgtctcgctgaactcaactcggagaactatctctccctggaggcgctcgggatatgcacggttgacgcagacggtgagaaaaacgtccctggaatggcgcagctatacaaagaactcggtaagcgaaccttcgcgatttgcgacaagcaagaggaagccaacaaggcattgattgaggcgcaggtcgaactggttctaatgcacgacgaaaagggctttgagaatctggtcctgaaaggcacaaccgaagaggctctgaagcgatttgcaaagcagttggactggccaccacacttggcgcagaagttcccagacgcggaagcacaggcagaagccgcgctgggcgagtacttcgcttggtcgaagggcaacttaggcattgccgattttcttgctcagtgcagcgaagcagaaatcccggagtggcttcgtgacgccgcgcgcaaattgaagtcggcttgcatgcccgcgcctgtagctggcggtggaggagctgcgcccgcgcacacggaagccaacccggaagccagtgccgatggaactgactaa

SEQ ID NO: 75635 - DNA, 1818 bp, Alicycliphilus sp. B1
atggaactgactaagggtcaactggatgtaatggaggcggatggccacctgctcgtcacaggggggcccgggtcgggtaagacaaccgtctccatcatcaaagcggcacaaatcgccggacaggatatccttcccggtcagagaattctgtttctcagcttcgctcgcgcaaccgtttcccgcgtggtggaggccatcgaatatgagcagaagattccgtctgcgacgaaacgtctcatcgacgtcgacacctatcatgcattcttctggcgtgtcctaaagacacatggctatctgataggccttcctcgtcgcttgacgcttctcaccccgcccaatgaggccatcgctctctctggggtaaggtcaggtttccctgccagaaatctttcggatgagctgaaggcagccaagaaggcagccgaagccgcagaacgaacccgcctggcaacggaagaggggaggatatgtttcgatctctttgccccgtacgtaggggacattctgcatggtagcgagcgcatccgccgtctcgttgcgaccatgtatccggtcatcatcctagacgagttccaagataccaacgatgcgcaatggcgcgtggttcaggcattgggcgagttttgcaggctgatcgctcttgccgacccggagcagcgaatttacgactggatcggtgccgaccccgctcgccttgatcacttccggaaggcgttcaccccgacggaaattgacctcagtacagacaatcatcgaagcgctggaacggacatcgccatttttgggaatgacatactcaccggtagatttcgccagcaggaatacacgggcatcgcatttgatatgtttgacccgttccctgacccggcgatgacgaaactcgtgacaacgatctatgcggctcgccagcgtttgatcgcacagggcatcgaagactggtctctggcgattcttgtaccaaccaagagaatgacgcgcctagtgtctgatgccctgcgtcaccccccggcagggatggcggaggtggttcacacagcaaccatcgagatggaagctgcaattcttggagcagaagtcatcgggctcttgatgcaaccctcagaggatgagcgtcatttcgcgcagttcattgacctgttgtgcaattacttccagggcaaagacggaaatgaaccaacacagggggccttgaaagaggccgcaagtatccgaagcgcctatgaagagctgctggcgaatcgtgctaatggcaaagccattcgcaagaacagtatcctcgtcaacgtgttggcggtatacgaacaggtgcacgcgcttgtctttacgggcgatccagacaaagactggcgagccgtgcgacgcgttctggaagatggcgcatgcaaacgcctgaaagagatcgcggaagaagtcaggaacattcgcctactggatcggggcactcaacttcgccagcagctctcacaggattggcgcgacaacggatatcgcaatgcgctgacgatcattcgacaagcatttgtccaagaacacttttctacgagggccaaacctgagtccggtgtcgtcttgatgaacatgcacaaggcgaaggggaagcagttcgacgaggtgataatttttgaaggttggccgaagcgggtaaagcgagagatagtcgctaacccagaccgcattgtgcgcttcaactccagggagcaaatcaatgaccaagcgcgccagaattttcgcgtcagcgtcacgagaggtaagcggcagacaacgatattgacgcctataggtgatccttgcgtgctgcttcttggtgagggtgactga

SEQ ID NO: 75636 - DNA, 1785 bp, Methylobacterium sp. ME121
atgctgttgagtaatttcagcataagaaatttcagaaattttctacaggtcgatatccctctctcgggaaacatcgttatcctgggggaaaaccgcatcggaaagagcaatctcctgttcgcgatacgcttggttctcgatcctacgcttccggactcggcgcgtcagctcaagatgtcggacttctgggatggtgcggcgcccgactacggcagtccgatcgaaatccatctggatttcgcggaattcacgaccgatttcggtctgctcgccttattgacggagtatcgtgtcgccggcgatccgacgattgcgcgactcagctacatcttccggaagaaggccgacgtcgctggaattccgcagtcgagcgacgacttcgaatttgtcgtgttcggcggcggcgaggagtcccggccggtgcccagcaaggttcgacgccggatcgcaatcgacgtgctcgacgcgttgcgcgatgccgaagggcatctcggcacatggagaggttcgccactgcgcccccttcttgaggacgcgatttcgagcgtgacccgcgaggatctcgccgcggtcgcggccgatctcgacaaggccacgaagacgctggaggcgtttccgacgatcaaggtgctggagaacgagctgcgcgccggcatccttcatctctccggcgaagcgcatgatatcgatccacgtctgggattcgcgccgtccgacccgctgcgactgttccgggcgatcgcgatgttcatcgacggcggcaagcgcggcatcgcggaggcgagtcttggatcagccaacgtcgccctgctggcgttgaagctggccgaattcgcatggcgccggaggaagaacgagcgcaacttctccctgctgtgcatcgaggaaccggaggcgcaccttcacccgcagctgcagcggtccgtcttcaagaagctgttcgcttctgcggatgccgcacaggcattgatcgtcaccagccattccccgacgctcgccgcggtcacgccgctgcggtcgatcatccagctgaaaggacggaaccggtcgacgcaggcattctcccttgccaacctgccggtgacgtccgacgagttggacgatctcgagaactacctcgatgccacgcgagcggagctgctcttcgcccgcggcgtgatattcgtcgaaggcgacgccgaggaggcgctggttcccgtgttcgcctcggctctcggacaagtattggatgatctcggcatcacggtgtgcaacgtcgccggcacgaacttcggtccatacgtcaagctcgccgaagctctgggcatgccctacgcggtgattaccgactgggatcctttggatggtgccaaacaaccgctcggaaaaaagcgtgtgatcgatctctggagcgatgtgctgaaggtgcgtgggcagccgcccatccatcccgcgcagcggacagcgtgggaggcgctccagttcgtgtcgttcgcatcgacctgggccggtgccggcatctttctcaacgagcagacatttgaagtctccgtcgcgaatacgccgtcgctgctgaagcctctcctcgacatcctcgatgagcagggcttcggatccacccgaagcacccgcatagcgaactggagggcaggctcggcccccgtcgacgcgtcgcagctgctggccatggtggcggacatcggtaaaggccggctgagcgcgaagctcgcgaaaaaggcggttggtctggctccacccgactacatcaccgatgcaatccgcttcgtggccggccgtgtccagtag

SEQ ID NO: 75637 - DNA, 1791 bp, Methylobacterium sp. ME121
ttgcttcttcaggcgctcgaggaactcgccgcgaatccggagcagtcggcggccgtacgcgagaccgggcattgcgtggtgctggcgggcccaggcagcggaaagaccaagacgctgactaccgcaatggcgcgcgcgctggcggaggacgtggttgaaccacgcggcgtggcatgcatcacctacaacaacgaatgcgcgattgagctcgaaatgcggctggcgcgcctcggcatggaagctggcgaccgcgtcttcgtcggtacggttcacggctttgcgcttagccaggtgatcgcgccgtacgcccgatgcgtgccgatcggactgcccgccgatttccgggtcgcgaagcgcgccgagatgcgcgcgtcggtggaagccgcctacgcggtcgcgatcgccggcacggacgaccctcatcgccgatggagcttcgcctcggagaagcgtcgtcgggacgtggatcgcacccgaccggagtggcggggacgcaatccggagctcgcgatgttcatcgaagcatacgagttcaagcttcggcagcaaggcttgatcgatttcgatgacatgccactactggcctatcgcatgatcaaggagcatgactggatacgcgacgcgcttcgcgcccgctttcccatcctgttcgtcgacgaatatcaggatctcggccatgcactgcacgagctcgttctcctgtcgtgcttcggcggaggcatccgattgttcgcggtcggcgacgcggaccagtcgatatatggtttcacgggagcgaacccggaactgctcgagggcctgaccgaacgaccggatgtgcgaacgatcagattgcgcttcaactatcggtccggcaggaagatcgtccgcgcctccctaggcgcgttgggcgaggagcgcgattaccgggaacgtgcaggcgcgcccgaaggcgagctcaccttctggtcgacgacccagggcctcgatatgcaagcgcgggcgatcgccgagacggttgttcccaagctcgtggaaaaaggcattccgctcgacgaaatcgccgtgctgtaccgagccgcatacctcggcgacaaagtcgcggacgccctgaagcaagccgacattcccttcgtgcggacggatggaaatgcgctcgtacgacgtagctcgcgtctcgctcgcttcatcgaggactgtgcgcgctgggtcgtcgggggctggcgggatgcggacccgcgatacagtcgtctgatctatcgagcatcgctgctcgtcttcggcaggcacgccaccgccgatgaagagcgatttctgtcggagcaactcatcggcttccttcaatcgacgataggacatgtcgacggcacgcatgcttggctgcaacgcttcgatcgcgagctgatatcctcttggcggtcaattggccgtaattcggagcaggagtgggatgtctgcgtcgagatgatcgccaacaccgatccggcttcgagtctcgatatgccgctcggccatttcgccggccgcgtgggcggaaccggtcgcgtcaatctgagcacgttgcacagcgtcaagggaagggagttcgatgccgtagtcatgtatggcgtgaatgcacgagactttcccagtgaacgcgacaaaaggaccgccggagccctgcgtgagactcgccgcctgttctatgtgggagttacccgaccacggaaagagcttgggttgatatttcaagaaaatcaacaatcaccctgggtgaacgaactataccagaggagtaaagccgatgactcggacgcgggagttggtctctga

SEQ ID NO: 75638 - DNA, 2055 bp, Streptococcus uberis Ab71
atgaaattaaaaaaagtaaaaatcaataattttagatcatttggtgagagacaaataattgaaataaataatcaaactgttctgataggaaataacagttctggaaagacaacagtattagatgcattgaggaaactattttcagataaacaaaatgatagaataattcgtaaaagtgattttcatttgcgaaagggaatgaaaccaggtcaaaattcaaaaagtcttttcatagaaactattttcgaatttgatgaattacaaggtcaatcttatagtcctgcaattccaactttttttgaacattttacagtttctgaaggttatgacaatccttttttgcgaattagattagaatcttcttgggaagatgatggaacagttgagggaagtattgatactcagatttactttatttcatcaggtgacgaaaattttagcgagaaagataagcatcatgctccacgaagagacctagacaaaatcagattattatacgtacccgcttcaagaaatccagacaaagagttaggtaattcatcaggcagcatgttaagcaggttagttaatagtattaattggacatctgatgaaataaatatgataactgaaaaaattgatgaattaaacgatatatttttatcagaaacaagtgcattaaaacaaataaatcaaggaattcagaaagcatgggaaatttatcatcaagataaccgtttttctcaagcaaatttgacgattaattcttctgagatgtctggagcacttagacagatcgccctaaaattttcaccaagtacaactgaagaagcatttagagtctcagatttaggggatgggttaagatcaatcttttacttttcacttgttgattcaattcttgatttagaaaataagattactaaggattatggagagaaacctgattatcctagattcaaactattacctcccctactaaccattttggcgatagaggaaccagaaaatcatattgctcctcatcatattggaaaacttgtaaaaaggtttaaagaattgagtaataacgataattgtcaattaatccttacatcgcattctccagctattgtaaaaagaattgacccagaagatttgagacatttaagaattgaaaatactgataaagttcttcaaactgttgtttctgagatacagttacctgaagctattgatgaatcttataaatacgtaaaggaagcagttcaatcttatcctgaactatattttgcaaagttaattattctgggtgaaggtgatagtgaagaactgttaataccaaagttttttgatttacttgggaaagaaattgatagctctcaaatttcggttgtccctctaggtggaagacatgttaaccatttttggaaattattgaattctctcaaaattccttatattaccttattggattttgataatgaaagatacggaggtggttggggaagaataaaatatatttctcaacatctgaataagcttaacttagagtttcaaaaatggttcaatacaaataaacttgattttaatgaaatagggttgcgagagtgtgaatcgatagaaagccaacgtctgaaaaattggtttaataaattcgaagaatttaatgtctacttttcgtcacctctagatattgacttcttgatgttaaaacattataagacacattatttgaagactttatcatcaaaagaaggtcctgttgtttcgtatatagatttagaaggaaatagtgcaaaagtaaaactgactgaattagattgttatgataaatcacaggttgaaggtgccaacaatcgtaaatatgaagctatacaagctactttaaaagataagagtggatcaggtgatagttttactgatgaagaaaaaagactaatgatttggtatcaatatttctttttaggtagaggaaaaccaacaactcatatgaaatttttatcattgattagtgatgaagaattaattttaaacttaccccctgtttttaacaaaatagtggaaagtgctgaaatattacttggagataaatag

SEQ ID NO: 75639 - DNA, 1818 bp, Streptococcus uberis Ab71
atggtaaagtgtgatgaatggtttcctaaaggagaaattactttagaaggcgctgcattggaagctgtcaagaatgtgaccaactgtctagttattgctgggccaggttctggtaaaactgaattactagctcaaaagttagactatcttttctctactaatacatgtgtttacccgaaaaaaattttagcattaagttttaaaaaagatgctgcctcaaacttgaaagaaagagtgaaaaatcgttatggcgatgattatgcgtctcgatttacttctctaacctattcagcatttgaaaagaggattttagatcagttcggtgatgctctacctgaaaacattagaccatctaaagattacttgattgaagattggaatgttataaaacaaacattttctataaataaattttttgatgagaaagagtttagaaaaccacaactaagaagttgtgccgaaaacataatacttagtgataagactaatcacaagataaaaaatgacttgttaaaaggaacagagtataataatcctgttctcctatataaacaaattacaaagttgagtactcaaataataaaagataatgaatttatacgtaaagcacttcaaaagacatatgaatttgtatttttagatgaattccaggatactacagatgatcaatataatttactgaaaacgagttttttaggttcgtcttgtaaattgactgcagttggagatgatatgcaagcgattatgagatgggcaggtgcgaatcccaacatttttcccaatttcattcaagactttaatgcaatggaatatcaattgatgatgaatcatcgctctgtccctaaattagtagagtttcaaaaagaagttcataagatattggacagtgacaatagttcgattcagacaaaaaactatcctagatttaatgacggtgaaatcaagttatttgaattcaaaaatgaaagtgaagaagttgaaactatttcacaggatattaaattaaaaatggaatctggtcttcgtgcatcgcaaatatgtattcttacaagacagcatgttgataaatatacctcagaactaattcctaaattgagtagtaatggtataaaagcaaggatagaagatgaataccaagaaattttaaaggatccattttgtaatttcttattagatttaattttatgtagtcaaagaaatcggaatcctcaaatttgggaaaatatcaacaacatatttggaagaataaacggtattgacgaatttactgatggaataacattagaatcctattacagaaagttagatgatttaattcgtgagattgataatttgcttacgaattttatttataatgaagaatatatgttaaatttagtaagtaggattatagatagagtaaatcctgataaaattatttcaaacctttcaatatataatggtcagaatgacatggacgtcagagtcaccaaattttcaaaattattgtataaagaatatttacaatcgggtaataactggactctaatagtttctaatttcaagggtgaaaactcaattccaatcatgactatccataaaagtaagggattagaatttgacgcggtatattttattggcttagaagacgatgcattttggaattttaatcgggaaccagaggaagaaaagagaacgtttttcgtagcactttctagagcaaaacgttacctgatttttaccaaatgtaaattaagaaaaaatcatcatcaaacaaatataaaaataaatcaaatatattccttaataacagaatctagtctagttgataaaatatga

SEQ ID NO: 75640 - DNA, 2055 bp, Streptococcus uberis EF20/0145
atgaaattaaaaaaagtaaaaatcaataattttagatcatttggtgagagccaaataattgaaataaataatcaaactgttctgataggaaataacagttctgggaagacaacagtattagatgcattgaggaaactattttcagataaacaaaatgatagaataattcgtaaaagtgattttcatttgcgaaagggaatgaaaccaggtcaaaattcaaaaagtcttttcatagaaactattttcgaatttgatgaattacaaggtcaatcttatagtcctgcaattccaactttttttgaacattttacagtctctgaaggttatgacaatccttttttgcgaattagattagaatcttcttgggaagatgatggaacagttgagggaagtattgatactcagatttactttatttcatcaggtgacgaaaattttagcgagaaagataagcatcatgctccacgaagagacctagacaaaatcagattattatacgtacccgcttcaagaaatccagacaaagagttaggtaattcatcaggcagcatgttaagcaggttagttaatagtattaattggacatctgatgaaataaatatgataactgaaaaaattgatgaattaaacgatatatttttatcagaaacaagtgcattaaaacaaataaatcaaggaattcagaaagcatgggaaatttatcatcaagataaccgtttttctcaagcaaatttgacgattaattcttctgagatgtctggagcacttagacagatcgccctaaaattttcaccaagtacaactgaagaagcatttagagtctcagatttaggggatgggttaagatcaatcttttacttttcacttgttgattcaattcttgatttagaaaataagattactaaggattatggagagaaacctgattatcctagattcaaactattacctcccctactaaccattttggcgatagaggaaccagaaaatcatattgctcctcatcatattggaaaacttgtaaaaaggtttaaagaattgagtaataacgataattgtcaattaatccttacatcgcattctccagctattgtaaaaagaattgacccagaagatttgagacatttaagaattgaaaatactgataaagttcttcaaactgttgtttctgagatacagttacctgaagctattgatgaatcttataaatacgtaaaggaagcagttcaatcttatcctgaactatattttgcaaagttaattattctgggtgaaggtgatagtgaagaactgttaataccaaagttttttgatttacttgggaaagaaattgatagctctcaaatttcggttgtccctctaggtggaagacatgttaaccatttttggaaattattgaattctctcaaaattccttatattaccttattggattttgataatgaaagatacggaggtggttggggaagaataaaatatatttctcaacatctgaataagtttaacttagagtttcaaaaatggttcaatacaaataaacttgattttaatgaaatagggttgcgagagtgtgaatcgatagaaagccaacgtctgaaaaattggtttaataaattcgaagaatttaatgtctacttttcgtcacctctagatattgacttcttgatgttaaaacattataagacacattatttgaagactttatcatcaaaagaaggtcctgttgtttcgtatatagatttagaaggaaatagtgcaaaagtaaaactgactgaattagattgttatgataaatcacaggttgaaggtgccaacaatcgtaaatatgaagctatacaagctactctaaaagataagagtggatcaggtgatagttttactgatgaagaaaaaagactaatgatttggtatcaatatttctttttaggtagaggaaaaccaacaactcatatgaaatttttatcattgattagtgatgaagaattaattttaaacttaccccctgtttttaacaaaatagtggaaagtgctgaaatattacttggagataaatag

SEQ ID NO: 75641 - DNA, 1818 bp, Streptococcus uberis EF20/0145
atggtaaagtgtgatgaatggtttcctaaaggagaaattactttagaaggcgctgcattggaagctgtcaagaatgtgaccaactgtctagttattgctgggccaggttctggtaaaactgaattactagctcaaaagttagactatcttttctctactaatacatgtgtttacccgaaaaaaattttagcattaagttttaaaaaagatgctgcctcaaacttgaaagaaagagtgaaaaatcgttatggcgatgattatgcgtctcgatttacttctctaacctattcagcatttgaaaagaggattttagatcagttcggtgatgctctacctgaaaacattagaccatctaaagattacttgattgaagattggaatgttataaaacaaacattttctataaataaattttttgatgagaaagagtttagaaaaccacaactaagaagttgtgccgaaaacataatacttagtgataagactaatcacaagataaaaaatgacttgttaaaaggaacagagtataataatcctgttctcctatataaacaaattacaaagttgagtactcaaataataaaagataatgaatttatacgtaaagcacttcaaaagacatatgaatttgtatttttagatgaattccaggatactacagatgatcaatataatttattgaaaacgagttttttaggttcgtcttgtaaattgactgcagttggagataatatgcaagcgattatgagatgggcaggtgcgaatcccaacatttttcccaatttcattcaagactttaatgcaatggaatatcaattgatgatgaatcatcgctctgtccctaaattagtagagtttcaaaaagaagttcataagatattggacagtgacaatagttcgattcagacaaaaaactatcctagatttaatgacggtgaaatcaagttatttgaattcaaaaatgaaagtgaagaagttgaaactatttcacaggatattaaattaaaaatggaatctggtctacgtgcatcgcaaatatgtattcttacaagacagcaagttgataaatatacctcagaactaattcctaaattgagtagtaatggtataaaagcaaggatagaagatgaataccaagaaattttaaaggatccattttgtaatttcttattagatttaattttatgtagtcaaagaaatcggaatcctcaaatttgggaaaatatcaacaacatatttggaagaataaacggtattgacgaatttactgatggaataacattagaatcctattacagaaagttagatgatttaattcgtgagattgataatttgcttacgaattttatttataatgaagaatatatgttaaatttagtaagtaggattatagatagagtaaatcctgataaaattatttcaaacctttcaatatataatggtcagaatgacatggacgtcagagtcaccaaattttcaaaattattgtataaagaatatttacaatcgggtaataactggactctaatagtttctaatttcaagggtgaaaactcaattccaatcatgactatccataaaagtaagggattagaatttgacgcggtatattttattggcttagaagacgatgcattttggaattttaatcgggaaccagaggaagaaaagagaacgtttttcgtagcactttctagagcaaaacgttacctgatttttaccaaatgtaaattaagaaaaaatcatcatcaaacaaatataaaaataaatcaaatatattccttaataacagaatctagtctagttgataaaatatga

SEQ ID NO: 75642 - DNA, 2055 bp, Streptococcus uberis C5072; identical to SEQ ID NO: 75638

SEQ ID NO: 75643 - DNA, 1818 bp, Streptococcus uberis C5072; identical to SEQ ID NO: 75639

SEQ ID NO: 75644 - DNA, 1836 bp, Methanosarcina mazei
atgtacatttccaaattaaacattaaaggcttcaggttttttaacgataattttacattacctttgaataaaggactcacggtcttagttggagaaaatggaagtggaaaaagtacagtaatagattccattcgtttgttgctcggggaagatgagtacaacagatctggaatatctctaaatgactttcatagacctttctctgtagagagcgccagaccagttgcgaatatcagaattgattgtatttttgatgaattagagggtcctgaacagattgcttatttaccttggttgaagcccagtaatgtgaatcaagcagagctacatttggaagctataaataaagaagatgcgaggggccggataagaaaaaatatgtggggaggaacctctagaagagggatttttgaatgggaattggtaaattcgatcaattgtgtgtacttacctccattgagagatgcagaagaaaaattgaattcttatcgtgggtcaaggcttgctcgtttattaactagtctcaacggttcaggggacgaagataagcgtttggaggaaaaggtaaaagaacaaaataatgaattgcttagtgacccccttataaaaagcgctaatggattaattaaaaaatgcttaattgactctgtgggggagatcttaggacaggatgtttcgatacaattttctgaaataaacttcaataaaattatccatcagcttcgcctgctatttttccctgagataaaagagggagaaatcccgagagaggcattcagagatctatcagaaaacagcttaggttacaataatcttctttatttagctactattatagccgagatggaagctaaaaattatgtaagtacaacatctttaaaggtactgttgatcgaagaacctgaagcccacttacatcctcagcttcaaactcgccttctccaatatttgcagggtgccgctgaggaaaacaacattcaggtgataattacaactcattctcctacgattgcagccgctgtgggacttgaccccgttgttgtaatgtcatcgtctccacttagtcaagagagaaaagctatagcacttaccaattgtggtttggataggaaaacgaaatttttcttagagaggtggcttgatatcacaaaatcggttttattattttctaaaggggtcattttagtagaaggaatatctgaagccatacttttttcggaatttgttaaaagagtattggaacaagagactcttgaagattatggaatttctgtggtaaacatcgatggcatctactttaaatatttcatgcaactgttttgtggttacaaaatagttgaagaaaactttgaatcatgtgacaatatcccaattcgatgtgttggaattaccgattgtgacccagaaggaagcaatattggtgagggagatgggaataacatagatggatgtaagaatccacaacgattccttgttcacgatttaagaaatcacacatctaattgtagactgtctattaactcaaaaacgtttgaatttgacctggcattagagggcaataatcttgctattatgaatttagcattagagaacattactgaaacagatggagacattaaaaaaagggcaagaattgcaaaaagcatggactggagatcaacaacctcttgtgaaaaaattgttgaagcacttttgcttttaaaacgcattgaaaagaaaaaaggtgaatttgcccaagaacttgcaatgttactaaaatcagaggatgaaccggattttgaagtaccctcctacattcgagatgcgattttgtatgtcacaggaaaatccaactga

SEQ ID NO: 75645 - DNA, 1878 bp, Methanosarcina mazei
atgtcacaggaaaatccaactgatgaagaaagaaagcgacaagaactattagagcaactttataaaagactggagcatgatgaatatatagagaagcttagcttagaacaattagaatttatcgtaaaccctatagctaattcctcttttcttaattcatgtcccggaagtgggaaaactgaagttgtaggatttaaagccgcttatgaagcatcctcttgggatagtccttattcaggaatggcaattctaagttttaccaaaaatgcagctgctgaaatctggaaaagagctaataaatattcagaacagaaagcagtccagttccctcacttcgtaggtactttagacagttggttgcaccagtatatatttcaaccattttgttattcggtaatggatcatgaaggtaaagatggtgacacaagtgtaaacatcattgactctgattcaaatgcacctttccttgaaaattataaaagtgttatatcgagtcaaccttcatatcaggaagtaaaagtaaacgggtattatattgacagcaataactcaatcaaatttaacaggaatcgtgaaagtaatctgaactcttatcaaagaggaatactaatagaaaataaattaaaatttgctaaaagtggatttgcgacatatcaggacgctgaatattggtcatatagactattaaatgaaaacgagacgattctggatctcatctcaaaaagatttccgtatattataatagatgaatgtcaagatctggctccatcaagacttgatgtgattgaaattcttcaagataagggagtaattttccactttgtgggggacattaaccagtcgatctatgattttatagatgtagatccattccaaattcaagactttattactgcttctggtatgcatgagatgaaattaaccaaaaatttcagaagcaaccaagatatcaccaatctttgtgctaggttagttggaatccaatgccctcccgaaggtagagtacctatagcggatgcagtttcttgtgtcctgtgggaatgtccttctgatcaattatgcaggttaccttcactctttgagtggtatctcaattctaaaaatattgaatgtggaaattgttcgatatcagttcgtggaagatctttattaaataaagtaaggcaaacgaatccattggaatcaatttcttatgatattacaaaagccttttttctatggaattctgaatctaaaaaaaccgagtatattactgaggcattagaacttttagggagatcaatgtgcaatttggcttatgaagggagagggaatcaccagaatcaatattgtcctgaaagtttcgaacatattgattggagaatgtttctatcaaatatacttaattcctcaaaagagcttgcaacatttagaaatggagacagacttcaaacatggagccaatggtgccgttctctcaaaggatttttagagacatattttttgaacttgcctgatacttacgttaaatgggacgaagcaaaaaggaaaataaaagctccttccggaaaggcaaatgaattggtggctagctctttattttcatcaagtgccagtaaaaggattcgcatgacaacaattcacgacataaaaggggaaactttagacgctttaatgctcatttcaaatccggatagacattcaaaaggaggccactttgagcactggttagaggatcctacctcggaatatgcccgttttgcatatgtagcttgttctcgacccaaggatttacttattgtggcagttccgccattaaataggatacagagaatgaaattagaaggtattggattagttagtcaaggactcccaggtacgttatcgcagtggttttaa

SEQ ID NO: 75646 - DNA, 2055 bp, Methanosarcina sp. 2.H.A.1B.4
atgtacctttctgagttaaaaatatcgaattttcgtaaatttggtgaaggggaaaatggcaattcaggtttacatataaagtttaactctggattgaatctattggttggagaaaatgactcaggaaaaactgccatcatagatgctataaaaatggttctttttactcagagctacgagtattacagactggaagatgaagatttctatatccatcccaatgcatctgaggaagaaagagcgaaggaattaagaattgaatgtatatttagaggattccaaccttcagaagccaaaaattttttggaatggattggtattgaaagtgactcagaaggtactcccaattattatttaagagtttttttgataggcagaagagaaaatgggagaatatatcgagatttaaaagcaggatctgacgaacaaggaacttctttagatggaaaagctcgcgatttgttaaggattgtttacttaagaccgttaagagatgctgagtttgagttaagcccgagaagaaactcaaggttatctcaaattctctattctcatggtgattttgctgacaaggaaaaacatccaataatagaagttataaaaaaggccaatggagaaattgagtctttttttgaagagaaaaaggatcctgaatcagaagggagtgaggaaggaactgaatccgaaaaaggtaaggaaatcgaatctggacaaaagggcgaaacggaatccaaagaaaatgggacaaaaatagtcactcacataaatgactatttaagaaacttttcaagtaaaaataatcaacttaaatccagcatttcaattgcagatatgaacttaaaatcaatattagaacaattgagcttgaatttatccatcaataaagctggattaggttctgataatcttttatttattgcttctgaacttttgctattaaaaagagaaaaatatacgggcttgaaattaacactgattgaagaaattgaagcacatttacatccccaggcccaattgagactgatagagtatttgcagcaagaaagtaaaacccaagaatccgatgaaaaagttcaattaattcttacaactcatagcccaaaccttgcttcaaaagtcaacttggaaaacctgatcatctgtaaaaatggtaaggttttcaatatgggacacgaaaacaccaagcttgaaaaaggtgattatctatttttggaacgtttcttagatgtcacaaaagcaaacctgtttttcgctgaaggggtaattcttgtagagggagacgcagagaatctattgattcccacaattgctaaaattatcggattacctctttcaaaacatggtgtttctatcataaatgtgggaagtactgcatttttgagatattcgaggatatttcagagatcaaaccctgaagaattcattgacacatatgttgctgttataactgattgtgattctagacccgattattactacacctccgaaaataaaaataaaaaaagcgataaagagcaaactgacgaagaactagatgaagaggaacaagatgaagaagaacaaactgaacttgattatttacaaagagttgaaaaagcaataaaagaaaaaaaagctcattacaatgggcttccggtaaaggcatttgtttctaaagattggactttagaatatgctattgcattaagtgatctcaaaaccgagttttacagagctgtattacaaggcggaaaaattaagaacagtaatgtcctcactttaacagaagacaagaagatacaagtaaataagaaagtaaactcagatattaacaaatggaatgagagaaagtgggataatggaagaatagcttttgagatttacaataacactcaactcaaaggaaaaatctcgaaagctattgttgctcaatgctttgccgaaatattaaatgaatatcccgatcaaaaagaacttcaagataaattaataactgaccctaatttcgaatatatcattgatgctataatttatgccacttctggaaagttaaaaaagggggcatccgatgattga

SEQ ID NO: 75647 - DNA, 1911 bp, Methanosarcina sp. 2.H.A.1B.4
atgattgaaatctcggagatggatattgagtatgctgagaaaatttttttaccagaaggttgctcctttgatctcgaaagaagagatgtcataaaatgcatggaatctaaaaatatccaagcatgccctggaagtggaaaaacaactgcattattagcaaagttggcaatcttggtccaaaggatgcccttcgaagataacaaaggaatatgtgttttgactcatacgaatgtagcaatcaatgagattaagggaaaattgggtagaaaaggggacatcttattctcttatccgaattatttcgggacaattcaatcatttgttgatagatatttggccattccggcttgcatttgttattataatacaagaccttctaaaattgattcagattcttatgattttgaaattataaaaagatatcaaaaacttccaagaagtggaggtttaagagggtggatgtacaatagatttaaacaaaggccgggttttgagttagagtatttgaaaggtataagatttgattttataagtgaatgtttctttgacattaaaggaaataagttgaatataggtaaagctagttcttcatatcaacaattatttgaaataaaaatgagtgtgttgaaagaaggaatcttacattacgaagatgcatattctttggcatttaaatatttaaacgattttagcatagtgctaaaaaaagcattttcagagagatttacttttgtttttatcgatgagatgcaggatacagactcaaatcaaaattcaattctggaacaaatatttgatgcctcgaatgtaattatacagaaatttggtgatagaaaccaagcgatatacgatggttttttagaagaacaggacacattggaaatcgatgattgcttatgtatcaatgggagtaaaagattttcaagttcaattgctaaaatcacccaaaaactttgtgtacatgaacaaaatattgttggtgattcatcagttcaagatatacaaccaaaatttttggtttttgatgacgacacaatagactcagtacttcctttttttgtaaaaataataaaagaacacaatttatatgatgaacatagcgattttaaggctattgggtggatagggaaagagaatgaaaataaaattactctgtcatcatactacataaattatcaaaatagatctcgtcgccgtaaaatagagttaaattttttgaatgattatttgcaaaaagtagatgataatacaataaaaattgagggtgctggttattaccggcaattaatgataaatgccctcttaaaagtattaaaacttctcgaagtaaaggatccaaataattctcaccaattcactgaaaggacattaattcaatacttagaaaataaggatacgaattttgaggacatgtttaactcaaaagcagcagattggtgcttgaaaattcatgttggagaagatgtttcagagccatttaaatactttatattaaatgatttttgtcgatactttgaggacgtagatattagaaagctcaataactttttaataaatagcaatactgaaagaagggaacaacttccagaatttaatatatataacgaatttgatattaacattaaagttgctacagttcatagtgttaagggggaaacacatacagctactctctaccttgaaacatggtataaaaatagtacggatattaaaagaattataaactatttaataagcaagaaaaaaaagataaaacctattttagagacgtctctaaaagtggcttatgtgggcatgacaagaccaacttgtttattgtgcgttgctgcacacaaagacactatttctggcaatgaaaggtacttacaagaggctggttgggaaataagggaagttaaaaatgaaaattaa

SEQ ID NO: 75648 - DNA, 1836 bp, Methanosarcina sp. 2.H.T.1A.15
atgtacatttccatattaaatatcaaaggctttaggttttttaatgatggttttagattgtctttgaataaaggacttaccgtcttagtgggagaaaatggaagtggaaaaagtacagtgatagacgccattcgcttgttgcttggggaagatgagtacaatagatctggaatatcgctaaatgacttccatagacctttctccatagagagcgccacaccagttgcgaatattctaattgattgtatttttgatgaattagaggggcctgaacagattgcttatttaccttggttaaaacccagtaatgtgaatcaagcagagctgcatttggaagctataaataaagaagatgcaaggggccgaataagaaaaaatatgtggggagggacctctagaagaggaatttttgaatgggagctagtaaattctatcaattgtgtatacttacccccattgagagatgcagaagaaaaattgaattcttatcgagggtcaaggcttgctcgtttattaactagtctcaacggctcaggagacgaagataaacgtttggaggaaaaggtaaaagaacaaaataatgaactgcttagcgatccccttatacaaaatgctaatgggttaattaaaaaatgcttaattgactctgtgggagaaatcttaggacaggatgtttcgatacaattttcagaagtaaactttaataaaatcatccatcagcttcgcttgttattttttcctgagataaaagagggagagatcccaagagaatcattccgagatatatcagaaaacagcttaggttacaataatcttctttacatggccacaattatagccgagatggaagcaaaaagtgatgtaagtacaacatctttaaaggtgctgttgatcgaagaacctgaagctcatctacaccctcagcttcaaactcgtcttctccaatatttacagagtgctgccgagaaaaacaacattcaggtgataattactactcattctcctactatagcagctgctgttggacttgatccagttgttgtaatgtcattgtctccacttagtcgagagagagaagctatagcacttaccaattgttgcttggataggaaaactaaatttttcttagagagatggatcgatatcacaaaatctgttttgttgttttctaaaggggtcattttagtggaaggaatatcagaagcaatactttttccggaatttgtaaaaaagatcttgggacaaaaaactcttgaagattatgggatttctgtgataaatatcgaggggatatactttaaatatttcatgcaattgttttgtggttacaaaatatctgaaggaaactttgagccctgcgacaatatcccaattcgatgtgttggaattacagattgtgatccagaaggagataaccttgggacttctgatagccagtctacagaggattgcaataatccacaaagataccttgtatgcgaattaagagaacataccaccaattgtagactgtacataaattcaaaaacttttgagtatgacttagctttagaaggaaataacctcgcaataatgagttctgttcttgaaaacataaccgaaacaaacggtccgataaaaaaaagagcgggacaatcaaagaacattgattggcgtacaaaagagaagaaacaaaagacagatgaggctctttggtttctaaatcatgtggatcagaaaaaaggtgaatttgctcaagaacttgcaatgttactgaaatcagatgataaaccggactttgaagtgccttcctacattcgagatgcgattttgtatgtcacaggaaaatctaactga

SEQ ID NO: 75649 - DNA, 1875 bp, Methanosarcina sp. 2.H.T.1A.15
atgtcacaggaaaatctaactgaggaagaaagaaagcggcaagagctattagagcaactttataaaaggttggagcacgatgaacatatagagaagctcagcttggaacaattagagtttattgtaaaccctatcgctaattcctcttttctaaattcgtgtcctggaagtgggaaaactgaagttgtaggatttaaagccgcttatgaagcatcttcttgggatagtccttatgcaggaatggcaattctaagttttaccaaaaatgcagcttctgaaatatggaaaagagctaataaatattcaaaacagaaagccgtccagtttcctcactttgtgggcactttggacagctggttgcaccagtatatatttcaaccattttgttattcagtaatggattataaaggtaaagatggagacacaagtgtaaatatcattgactccgattcaaatgctcctttccttgaaaattataaaagtgttatctcgagtcaaccttcatatcaagaagtgaaagtaaatgagtactacattgactgcaataactcaatcaaatttaacaggaatcgtgaaagaaatctgaattcttatcaaagaagaatactaatcgaaaacaaattaaaatttgctaaaagtggatttgcaacatatcaggacgctgaattctggtcatacagactgttaaatcaaaacgagacgattctagatcttatctcaaaaagatttccgtatattataatagatgaatgtcaagatctggctccatcaagacttgatgtagttgaaattcttcaagaaaaaggagtgatttttcactttgtaggagacattaaccagtcaatttatgattttatagatgtagatccattcaaaattcaagattttattgctgtttctggtatgcatgagatggaattaaccaaaaatttcagaagcaaccaagatatcaccaatctttgtgccaagttagtcggaatccaatgccctcccgaaggtagaatacctagagaggatgcgtcttgtgtcctgtgggagtgtccttctgatgaattacataggttaccttcactatttgaatggtatcttaattctaaaaatattgaatgtggaaattgttcaatagtagttcgtggaaaagccttaataaataaagtaaagaaaacaaatccattggagtcaatctcttatgatattgcaaaagctttttttctgtggaattctgaattcaaaaaaaccgaatcaattattgaggcattagaacttttagggagatcgatatgtaatttagcatataaagggagaggaaatcaccagaatcaacattgtcctgaaacttttgaacatattgattggagaatgtttctatcaaatatccttaattcctcaaaagagcttgcaacatttaaaaatggaagcagacttcaaacatggagtcagtggtgcggttctctcaaaggatttttagaaaaatattttttgaacttgcctgatacttacgttaaatgggacgaagcaaaaagaaaaataaaagctccttccagaaaggcaaatgaattggtcatgaactctttatcttcatcaagttccagtaaaaaaattcgcatgacgacaattcacgacgtaaaaggagaaactttagacgctttaatgctcatttcaaatccagatagacattcaaaaggaggccacttcgagcactggttagagaatcctacctcagaatatgcccgttttgcatatgtagcttgttctcgacccaaagatttacttattgtagtagttccgccattaaatgaaatacagagaaagaagttagaaggtattgggttagttagccaagaacttcctggtacactatcccattggttttaa

SEQ ID NO: 75650 - DNA, 1836 bp, Methanosarcina sp. 2.H.T.1A.3; identical to SEQ ID NO: 75648

SEQ ID NO: 75651 - DNA, 1875 bp, Methanosarcina sp. 2.H.T.1A.3; identical to SEQ ID NO: 75649

SEQ ID NO: 75652 - DNA, 1836 bp, Methanosarcina sp. 2.H.T.1A.6; identical to SEQ ID NO: 75648

SEQ ID NO: 75653 - DNA, 1875 bp, Methanosarcina sp. 2.H.T.1A.6; identical to SEQ ID NO: 75649

SEQ ID NO: 75654 - DNA, 1836 bp, Methanosarcina sp. 2.H.T.1A.8; identical to SEQ ID NO: 75648

SEQ ID NO: 75655 - DNA, 1875 bp, Methanosarcina sp. 2.H.T.1A.8; identical to SEQ ID NO: 75649

SEQ ID NO: 75656 - DNA, 1836 bp, Methanosarcina mazei; identical to SEQ ID NO: 75644

SEQ ID NO: 75657 - DNA, 1878 bp, Methanosarcina mazei; identical to SEQ ID NO: 75645

SEQ ID NO: 75658 - DNA, 1986 bp, Pseudomonas syringae pv. persicae; identical to SEQ ID NO: 71686

SEQ ID NO: 75659 - DNA, 1905 bp, Pseudomonas syringae pv. persicae; identical to SEQ ID NO: 71687

SEQ ID NO: 75660 - DNA, 1701 bp, Hafnia alvei
atgagaattgaaactgtttatatcaaaggatttagaaattactgtgatgccgttattaattttaatgaaacgaatttgattataggtgcaaatgatgttggaaaaaccaacctattatatgcaattcgattattacttgataaaagtttgtctgaattagatcttgaacccaaaagtaatgacttccatgtaagttcggcaggtgaacaggttgaaaatatagaaatcactatcaagtttatagatgttagtgaagatgctgtaatatctaaattaggagggtatgttagcgatgaaggggaaacttacattaagtatcttgcttcatcattaactatggattacaagatcttacttagccatgagcatgacaattttgatgaggtttctaatagattttacttaaagtgtttaagtctaaggtatataaattcgcaaagagatcttgaaaaatacattaaaattgaaaagaaacatcttttaagattagcgcaagaggttcgtagtgaaaaggatactgaaaatgacggggtggtttttactgaattaaataaattgcttactgaagtgaatgagaaagttaaaggtataagttatgttgcatcagcaaccgaggagcttaacgaagaacttaggaagttatcatatacccatgatcgattaacagttcaacttgatactggtgcaatcggaattgatcagtttatagaaaaattagaattaagtgcgaatacaaatgggaagaaactaatgcttggaggagatggatttaataaccaaatccttctagcgttatggaaagcaaaaagcgttcgcgagcatgatgttgaaagtgaagtagtgatatattgcatagaggaaccggaagcacatctatttcctcatcagcaaagaaaattggcggcctatttaatcgataaacttccaggccaagcaatagttacaagccactcacctcaaattgcagtgaattttaaacctgattcaatcataaaactatactatgatgatggagaaactttagccgcaagtaatggatgttctgactgtattagctcagcatgggatggaatggggtaccggatgagtattattccggcagaggcattttttgccaacgtggtttttttggttgagggaccatctgaagtaattttttacactgaattagcaaaagcactaaatatcgatcttgattattataacattagtattctttctgttgatggtatccaattcgaagtttataggaaaatattaacagctctaaatattaattggatcgtaagaacagataatgatggttcaaaagtaccccataagaatgaatggcaatttgctggtgtaaatagggcattagcgctatgtggaaataataaagagccaaactcaagtattcctatagatagtaaggctttgcatactaaatggggaaccatttctccaataataaatcctaacggtatatatatatcttttttggatcttgaaggagatcttacgaatgacttctcgaagcatgttcttgattatacaggtaaggacaatcaagatgatgcggctgattatttgagagggaaaaaagcaatacgtatgcgtgagctaattaaagagaaaaaagattttttaattgagttaaagaataaagatatagccagacctctaatacatacattgaaatttgctagaggtgaattatga

SEQ ID NO: 75661 - DNA, 1623 bp, Hafnia alvei
atgaacttaactaaggaacagttagatgcaattaattatgatggtaacctggttataactgcatgcccaggaagtggtaaaacaacaatactcgtccataagattttcgcctgcttatcctattccaaggattatcagggagttgttgcgttgtcatatacgaataagtccagcgaggagctaaaggccagatgcagaagattaggagcagagttaaattctagcttctttgggactattgataaatttttcattaacgaaataatatttccttttttaaggcaaatatggggcggaaacgaaatcggtctcgaaatagtgaagtatatagatcttcctcaagaattaaaagataagacaaataaatattttgaacgggccgatttttattctaacacttcatttgatggcatggattctttgagaggtgtttatttaaagggaatggtggttttagatttcattcctcatttggctttttatatagctagaacatcatactcttgtcagcggtacttaatggcaaaatatattagtttctttgtcgatgagtatcaggatacaggttattttactcatcaggttttcaagttcataccaacgttagggatacctcttattatcgttggtgatttggatcaatcaatttacttgtattctcatcgtagttcggattcactaaaggatttcatgactgatagcagtttctgtcataaggaaatcacagtaaaccacagatgtcacccatctatagtgaattacgctaatagaattaaaaattttgagtgtcaattaactccgtgtgaagaaatttttgtttatagaaaatgtattgatgggaatcaaattgatgtagccaagtggattggtgaaatccttgataaggtaaaaaataaattctctatatctgataataaggaaattgctatattggtgagaagcaacgcttgtgctgagctagtttctgataatctagaggtttctaatagagcttatttggataatgatttgacaaagtctggtggtaaggtttctggtctcgccaatgatttgttatgttacaaatacaactcaaataaaactgcccagtctattttggaaggggttttgggaaacaatataaaaaggagtgaggctactcgaattcgtaaggctattaagcaggtgagaagaacgtcagataccttacttattgatgtaataaataaagttgtagtaatccttttagggactgaactcgagcagcatcataagtctgctctttcagagatattagttactccgaggatgcaaaataattatttggatgttagaagtgacgaagtacaaataatgacattacataagtctaaaggtcttgagtttgactttgtttttcatttggatctgtatgattggattttgcctaaaagagttttcatagaaggaagttatgatgttgtattcgaaaatgaacaacaatgtacaaatcttcattacgtagggattacacgagcaagaaaaggtattgtgctaatgcattcaacgaagcggtataatggttcaggtgatattaaaaatggggctccatctcaatttcttttgaaaccagggttagatggtctttataaaaaattaaattaa

SEQ ID NO: 75662 - DNA, 2211 bp, Bacillus sp. SA1-12
atgaagattacaaaaattaaaattgaaaattacaggttactaaagtctttgaatctcgacgtagaaaatgacttgtcattgattatcggaaagaataactgcggtaaaacatctctactttctatacttgagaaatttattggaacaaagaatggttcaaatgatttttcctacgatgattttaatattgatttccaaaaaaatctgaatgatatagtagattctagttcattattatcaaaaatgcaatttcctataggaattaaattaaaattatttattaactatgatgaattagataacctatcaaatatttgtcagctaatgatggacttagacccagataatagaacaattgtattatcttttgaatatatattattcgaagctgatttaaaaagactaagatctgatttcacaatgtatcaagaggatattataaaagctggtggcgaaattttaccctctaatctagatactagcgataatccaatatcctttaattatttcaatgacttcatgaaaaaaaatcataaaaattattttaaacttcaaaaaaaatctatcgaatttaattcaatttcgagaaaagaaaatgacttagaatatattgacctgacaagagagaatattcctttaaacaaaattattaattttaagacaataagtgctaagaggaatatttcaaataatacttctgacaactccttatcaaccttatcctcaaaatactatgagagtaaagctgacaatgaaaaaggacttgtggaaatccagaaattcaaatcaactcttagtaagactgatggagaattagatggagtatatgaagagttattcaaaatagttattgaaaaagtaaaacaattcggtggcataaaggaaggagactctaatataaaaatagtatcgaccttacaacataaagagttattaaagggtaatacaaccgtaatgtatgaacatattgaaaaacaatcattacctgaaagttataatggtctggggtacttaaatttattgagtatgatttttgaacttgaactgattattagtaattttcgtaaagaacataaagaaaatgagatgcctgccgatattaatttgctttttatagaagaaccagaagctcatactcacccacaaatgcagtatatatttattaataacatcaaaaaaatattaagtgaagctagtatgggtattgatgggaaatctaaatttaacttacagactttgataacaactcattcctcacatataacaactgcaagtaattataatgatattaaatacttttataaaaaagcgaaaaatgaagtgatttctaaaaatctcaaagacttagaaaaagaatataaaatagatggagaaataaaaaactttaaatttttaaaacaatatttgacaatccatagatctgaattattttttgccgataaagctatatttattgaaggcgaaactgaacgtatattattacctgcaatgatgaaaaaaattgataataatccagagtatagctctagtccatctctaatttctcaaaatatctcagttgttgaagtaggtgcctattctcaagtttttgaaaagttcatagactttattggaattaagtctttaattatcacagatattgattcagggaaacaagtgatagaagatcgtaaaacaaagactaagaagtgtagagtatctgataatgaagcttctctaacaactaattcctctctaaagttcttttttgaacaggcaatagaaaataatattcaaaccggcatacacaaaaatgaattggattacctacgtagtctttcattcaaccaaaaattaattaaaaaaaatagagaaaatagaatttgggaactagacaagaacggtaacgttgctattatttatcaaacaatagaacccaattctaaaaatcaaaaatatcatgctaggagttttgaggattccttttttcatttaaatagagaatttattatcgaaaataaagataattttcatagcctcaagaatataaaacattttgagaatgatgatatggatgtttatgatttatcggaaaattgtatagataagaaaccttcttttgcaatggaaatactattgaatagtaagatggatgaatctgaaaatgaatatagtaactgggaaatacctgattatataaaggagggactattatggttgaaatacaactag

SEQ ID NO: 75663 - DNA, 1917 bp, Bacillus sp. SA1-12
atggttgaaatacaactagaagaagaagttattcaggtctttaaacacattgaaaaaaataaaaactttctattaactggtggggctggtagtggtaaaacatattcattagttcaagtaataaagaaagtaattcatgataatcctagttctatgattgcttgtattacatatacaaatacagcagtaaaagaaattggaggacgagttaatcatagcaatttaagagtatctacaattcatgaatttttatgggaaaatattaaaaaatttcaaaaagaattaaaaatggggctggtatctctaattaataatgaaaattctaaaattaaaattcaaggctcaaacgaaattattgatcaaacatattttaataaattagaagatggcatccaatataaagaattcaatctagttaacagtggcatcatttctcatgatgaggttcttgaattggctaattatatgtttaaatcacatcctttactttgtgatttgttgaaggacaagtatcaatttattttaattgatgaatatcaggatacaaacccactaatagtcgagatttttttggaacatctgaaacaaggcaaaaagaaaacaatcattggattttttggtgactcaatgcaatcgatttatgatgatggtattggcagtttagagaaatatattgcttccggggatatcgtagaattccaaaaacaagaaaacagaagaaatccaaggttagtgattgaattagcaaatagattaagaatagatagtttagttcaagtaccatcatctgaccaaaaagctcctaatatgtatgatggttcagtaaaagaaggaagtattaaatttttatattcttcaaatgataacttggatatgatcaagactacaagtttttttgaaacatgggattttaaagacacaactcaaacaaaggaattaaacctcacacataatttgattgctgctaaggctggattttctgaattaatggagatttatgacaaggaccccataatatcatttaaaaatgatgtattaaataaagttaaacaagattcagaagaaataagagagaagatactaaatgataataatataacatttgaggaagtagttgatttatatcctataagaaacaggcaaagactgttaaaaaaggatctaattatgcaagactcccatactaatcaactttataatcaattgaaaaatctcccattttctcatgttagaaaaatatatataaacaaagattctcttatagatgacaaaaagcaagacattaatgacgataataagaatggaacaaaaagagatgacttaattaagcatttatttaaaatccagtctcttattcagttatataaagataaaaaatacaatgaatttattagaagaactgagtttaaagtaacctccatttctaaaaagagagagataaaggcccttgttgataaaattgaggaaatgtctgataaaaccatagaaacagtaattgatttcgctgatgaaagtggcttttgtaaaaaagatgataatttcaataattttattgaagttaatctttatctttttaacagagttaagcatgtaaaatatcacgaatttcaaagattatttaaatatttagagggatttacaccattttcaacacaacataaaattaaaggtgaggaatttaataatgttcttgtcatccttgataatggtaaatggaacaaatataactttgaatacttattttgtaatagaactgacaaacaaagtatattaacaagaacacaaaaaatattttatgtttgttgcacaagggcaaaggaaaacttaattgttttctatcataatcctagtattcctattatcaataaagcaaaagagtggtttggtgaatgtaatgtacatgaaatagtggaatag

SEQ ID NO: 75664 - DNA, 1830 bp, Candidatus Filomicrobium marinum
atgagaatccgccgactgagactgtcgaacttccgaagcgtcgccgacggtgaggtgatcttcccgggtcacacggtcatcattggcgggaacagcgtcgggaaatcgacgatgtgcgaagccctggatctgctgctcggtccggatcgcttgtcgcgggcatcacctatcgacgagcatgacttcttcgagcgccgctacctcgatgacgatggtgatcccatcgtcatcgaattggaagtggtattgaccgatcttaccgctgacgtgcttaccaagttccgaacccaccgcgaatactggaacacgaccacgaacacgctgctggatgagacagcaacgccggaagatgtcgaggccgacgacgtcgtgccagcgcttcggatcaggttcgagggcgcatacgacattgaggaggacgagttccgtgcggagacctacttcgccagtccgccgccggacgacgaaacccgacgcgccaaggtcacgcgtcccgcaaaacgtcagttcgggttcatctatcttcgcgcgctgaggaccggctccagagcgctcagcctggaacgcggctccctgctcgacatcatcttgaagctcaaggacgatgatcgctccgccatgtgggagcagacgcttggggcaatggaggatctggatccagcgattgacgccataccccagctcagagcgatcctggacgaagtcgacaggcgcgtgcgtcggttcgtgggtctttccgatgatgatcgtaccttccgcctgtatccgtccgcgttgacacgagagagcctgcgtcgctcgattacgctgttcggttcctcggagcgctcgaacattcctgttccgtattggcgtctggggtcgggcgtcatcaattccatggtgttctcgctcctgacgttcatcgcggacctcaagtccaacgtgatattcgcgatggaggaaccggagatcgcgatccctccgcatacgcagcgccgcattgtccaattccttcaaagggaaatggatcagtcgatcctcacgacccattccccgttcgtgcttgagcaatacgacccggaaaacgtcatcctcctggagaggggcagtggcgggaaggtcgcaggccgccggatcgaagtcactggcatcaaggccaaggcctataggggaaatcttcgccgcgtcctcgccgaagccatgctcggcaatggcgtgctctgcgtcgagggcgtttccgacggcgaagcgatctactccgcttccgccattctcgaagagcacagtgctgagggtacgtacacgccgctcgatctgtcgggcgtcacggtggtgcagtgcgagggggatggcgggctgttgcggtacggcgagttcttctctggcttgggcctgaagacctacgccttctacgaccgacagaagaatgaagcgatcagcgaggagatagtcgaggtcttcgatgcggcctgggagttggagcagacggggatcgagtatctgcttgccgacgagataacggtcgacgtcatccgcacattcctcatcgaagcttcggactgggacgactatccgtacaacgcgaagaacgcgagcctgttcgagtacgaccccgatgcggatgacgaagccgtacaggcactctgcaagagggtgctcaagtcccggaagggtgccggctacgcgcagcggctggtcgaactttgtacggaagcggatttgccggccatcgtcgtcgaagccttggagcgcatcagcgaggatcttcccaacgagctttccgccggtgaaggcgatgatgatgacgacgatgatggtgatccagaagcgcccgacgacgagacatga

SEQ ID NO: 75665 - DNA, 1740 bp, Candidatus Filomicrobium marinum
atgacaaacccggaagaccgcttcgacctctgcgataaacgccgtgccattctgggtgatgcgggtcacatgctggtgttgggcggtcccgggtctggcaagacgaccatcgctctcctgaaggccagacgcatggtcctcgagcgcctgcagccggcacagtcggtcctctttctcagcttttccaatgctgcgatccggcgcattctggaaagtgcggggagcgtcctgacgcgcgacgtcggccgccaggtggaaataaagacctaccattcattcgcatgggacatcctgcagtctcatggctatctgctgtcatcacagcgaacgcttgggatcgtcgcggcgcaggacgccgcggtcattcgagcagggctggaagatgacgagtggctcgccgaggaagatcggctgtttcaggaagatggccgcgccacctacgaccagtttgcgccgcgcgccgctgatattcttgaaaggtctgcggtcgttcgcgattgtttttgctcggcgcatccgttgatcctggtcgatgagttccaggataccgatgaggatcaatggagactggttcgggcattgtcgaagaactccgagatcatcgctctcggtgataccgagcagcggatctacgcctggcgcaagggtgtcagccccaaacgtctgaatgagtttgcggaaacgttgggcgcggatacctatgattttcagaacgagaacaatcgcagcccggcaacgggcattgccggatacgcccgcggtctcttgtctccagacgtccatcttgtgctgcccgatgacattgcattcaagcgatttcggcctggccagtttgcgattggccttcgcgccgggctcatcaagacgtggaacgagaccgtgaagagaacgggacatcgcgacatcacggtggcggtggctgctcgcagccggacgatggtgcggctgatctcggatgcgttggcacaaaaactcacgctgggcgtgaaggagcacgggcccgttccgcatgatgtgatgttcgatcagatgcagatcacccttgcatcgcgggtgattgcctatctgctggcttcgcagcaaaacccgcgagatgaaaggctggccggagcgctggaacggatcagtgccgttttccggtcctctggaaagaagacggcgatcaagacatccgatcgcttgttgggttgggcggagaagtgtcgccacggaaaggtgccgagcacaaaatgcgtcaccgcgctgacggccgcatttgatgcgatcgacgccgccggattttcaggctcaccgaccgacgactggctcctggtccgccgagccctggagcgggctgacgcggacgaattgaaacgtacaggagatcatgctcgttatctccgactgctgaggcgtggctcggcaatcgaggatcaactggcggaattgtggaaggaggctggaacctacgctggcgccgaagccgcgttggacaatgcgatccttctagatcagatgacggacagccatcgcgaagtctcgagcattagcgtcatgacgatgcatcagctcaagggccgggaatacgatgccgtccttcttgtcgaggaccagcacaggacatttcggggaagagatcaggaaccgccctacatggaaacacggagactgctgcaggtctcgctgacgagggctcggcatttcgcctatgtcctgtcggcaacgaagaatgccacgctggatgtccttttcgaagactga

SEQ ID NO: 75666 - DNA, 1830 bp, Candidatus Filomicrobium marinum; identical to SEQ ID NO: 75664

SEQ ID NO: 75667 - DNA, 1740 bp, Candidatus Filomicrobium marinum; identical to SEQ ID NO: 75665

SEQ ID NO: 75668 - DNA, 2034 bp, Citrobacter amalonaticus Y19
atgcagcttaagaaaattttcatctccggttttaaaagcatttcgaatgaaaatcctcaaatcattaaccttgaccatgaattaactacatttatcggccataacggaactggaaaaagtacggctatggaagcgctaaataagctcttctcggtggatcattcactacgtggtatatcaataaatgacttccataatgcggatggtgggaacgatgaaaagagcaaaagtttaataatagaagcctggtttagcttccctaaaccaaatgaaggaaaaatttcgatccctcctttaattgaacacctcaccattgataaatctgatggggtcattctttttagggtgcgattagagagtaaactttcctttgaagcaaacccgatgggggatattgacgaagacgtctgggtggttaacaccagtgacgacgtggttgaggagagcagtaaacagaagctttccgctgcagtaagaaactccatccaggtaagttatgttccagccaatagagatcccttattgcaattgaagtattcatcaaaggcggtgcttggtcgtttgctaaaggcgattgagtgggttggaggtagtcaggaagtcatagaggagcaagcggcacaactaaacgcattaacgaagagcaatcctgcaatgaatgagattgcggtggcgattaacgccagttggggtaatatctacaaggggcgttatttgtcccaagcatcacttaactttccactcgctaatatcgatgaaatactgaaactgattcaacttcagtttaatcctgatgaaactggcaacacggtaaatgtagatcgattaagcgatggacaaaaatcattggtctatttttctcttataaaggcgatgtttgatattgataagaagaccagggagttgatttcctctggagaagcttctaattttaaccctgaaaaaatgagattgccgatttttagtatgatatccttggaagaacccgaaaaccacctttcgcctcattacttaggcagaataattaagttggtgaaagattatagtcgtaatgaattgtgtcaggttattatttcttcccattcttcttccattttaagccgaatagagcctgagcaaatacgtcatttcagactggataaggattcaaaaagcacggtggtgaatgcgttaacgttgccggaaaaagaagatgagctttctaaattcattaaagaagctgtaaaagcgtatccagagatctatttttctaaactagtgatatttggtgagggagatagcgaggaaatcataatacctaaggtacttgagctacactcaacggaaattgatagtcactccatctctgttgttcctcttggcggacgtcatgtgaatcacttttggcgtctgttgaagtcgttgcaggtcccctttattactttgctggattttgatattgatagaaatggcggtgggtttggacgacttaaatatgccattgaacaattagctatgtttagtgaaagtggaagcacctatatccataaagatattgctgggcttataccgtcatgggatgacgcacggaacccaatagatttcaccattaaatataacgacggagcgacaataaatattgttaatgaattagaaaagtgtaatatttatttttcttctccgatagatattgactatgccatgattgaagctttccctgacattttttgtgagaaagatgaagtttatggtgaaagaggcccccaaaataccaagaaacaagaaggtaaagaagaacaagatgagctaataaaagcagtattgaaaaaaggaaactccggtattcgttacggattttcagctgattatctaaaatattttctgtggtatcgctatcgctttttatccaataaaagtaaacctgcatcacatatcagaatgttttctaaaattgaagaaaagtatacgtcagaagaaatgagagcaaaattgccctcagagctaattagagttgctgaaaagacagtgacattattggcgggggtcattgaatga

SEQ ID NO: 75669 - DNA, 1665 bp, Citrobacter amalonaticus Y19
atgaccatacaatggcaaccttcagaaggaattacaccaacactggagttaatggatattattctgtgtgatcaatccatttctgtacttgccggtgcaggagcgggtaaaacagaacttatagctcaaaaatcgaattacttgttgcagacaggaaagtgcatgtggcctaaacgcatattatgcctttcttataaaaaagaggcgcaggaaaatattaaagagcgagtaaataaaagatgcggacaaaaaggcgagcgttttgattcgtatactttcgatgctttttgtaagagcattgttgaccgttttaaggatattttacctgagcataaaaggcctttaaatagttatgacctagtgttcaacgccaaggccagtaatggtaaggataagttatcttttgatttaatcagaaatctggctgtagagattttaaaaaatagagcagatattgttgatcttttttcttttacctatccacatgtttttattgacgagtttcaagatacacgttctgatcagtatgagttgattaaaattctttttaaagatagaggaacacaattgctagctgtgggcgatatcaaccagagcatcatgttatgggctggcgccagaaaaacagtgtttgaagactatgaaagagaatttaacactaccaggaaactactggtgcaaaattttagagccagtgatgaaattcaggaagtattgagatgttttattcactttgtgcaaaatgatgccaatttttctccaataacaaagaatgtcgataattgcactatccattgttatgatgatgagatttctgaggctgatggcattgctgataaaatagaaaattttatagcttccggcattaaagaaaaagagatatgtgtgctagctaaacagcagtcagaacaatatacggaaaaactccgagataagttaacgacgaaagggattagaaatcttgatatgtcagaactgcaagacttcttaaaagagccattagggcgaatatttgccgctctgttcaaggtttatacatcacgatcatcatcaagctatacagagctctgcgatttataccttaatttacatagagttacccgtggcgatgaaaaagaagactcgttgattaaagggctgtcggataaaatagcggcaaatagagaaatgttgggtgactcgcccaaccctgatttattaatatcctatattaaagatattataagtttttttgggttaaaaaaaatgatggggcgatggaatcaatacaagtccactcattattggagtcaggtctggctcagtcttgaacgacacttgcgcaacacaataggcgcaacgcactctcttaacgaagctgcactgatgtttcaggcagaaaattccgtacaagttatgaatgtgcataaatgcaaggggttagaatataaggtggttatttttcttggtttagaggatcaggccttctggaactataataaagaaaaatttgaaaatgactgcgttttctatgtcgcgttatccagagcgaaggagaaaatattagtcacgacagctaaacatagagaacacagaataaataatggatatgacaatagaaaatctaactatcagatggttatgccggtatattcatttttgatagatcattgcaagttcaaatga

SEQ ID NO: 75670 - DNA, 1953 bp, Pseudomonas aeruginosa; identical to SEQ ID NO: 74520

SEQ ID NO: 75671 - DNA, 1668 bp, Pseudomonas aeruginosa; identical to SEQ ID NO: 74521

SEQ ID NO: 75672 - DNA, 2190 bp, Enterococcus faecium MRSN 11639; identical to SEQ ID NO: 71696

SEQ ID NO: 75673 - DNA, 1794 bp, Enterococcus faecium MRSN 11639; identical to SEQ ID NO: 71697

SEQ ID NO: 75674 - DNA, 2073 bp, Escherichia coli MRSN 10204; identical to SEQ ID NO: 72136

SEQ ID NO: 75675 - DNA, 1734 bp, Escherichia coli MRSN 10204; identical to SEQ ID NO: 72137

SEQ ID NO: 75676 - DNA, 2004 bp, Staphylococcus aureus; identical to SEQ ID NO: 75344

SEQ ID NO: 75677 - DNA, 1926 bp, Staphylococcus aureus; identical to SEQ ID NO: 72299

SEQ ID NO: 75678 - DNA, 2142 bp, Citrobacter freundii
atgcatatatctgaacttacattaataaattatagaaatttcaaacgaagcaagttcttttttacaaaggcaattaatacagtaattggggagaatggtacagggaaaagtaatctttttagagctataagattaatgctggatgatgaaatgctctttagggcatataaattagatgaaaatgattttagtcacgagttaggcgattggaaagggcactggataattataagtttgaagttctctgatatttcacatgatgagtctgtacaatcacttttcattcatgaaagtggtgatgtaatgaatgatgaaggagagtatattcaaagtgcaacatataatcttatttttagacccaacatttctaagcgttcagagttggctgaaattcctcatggtgattttgtcgaattggaaagggtgaggtctgaaataaaagtttctgactatgaagttatttttacaggccgtagttatgctgatttttatgataaggaaatatataagaagattgtaggcgatttcgacaagtgtatttttccagataagattgatgtgaaagatgtagggtggaatcttggaaggcagatttcattgtccaaagatgtctctttcacattcattaaagcgctcagagatgttgtttcagactttagtggcagtaaacgtaatccgttgcttgagttacttgaattaaaaagcgaaagcttaaatgacgaggactacgagaaaattattgatgatgtgatctctctaaacagtgaaatagaattattgcccgatgttattcaggtatcggaaggaattcactcaactattaaatcgacagttggtgaagcattctcaccaacaaaactcataattaaatctaagctaccggaagagcccaaagaacttttaaaatcactaacccttagtgtgagtgaaggtagcgagtattttgatggtagcatcagtgacatgagtttgggaggggccaatctattatttttgacattgaagatattaaaatataaatatcttatcaataaaggtaaggtggctaatttcatattaattgaagagcctgaagcccatttacatactcatatacaaaaggcattgttcaaaaatttaaactttgataatacacaaatcatttactctacacactccacccaaatatctgagtcatctaaaatcagcagggttaacattatatcaaaaaaagaaaaagcaaatgatgttgatgtatgccaacctagcacgggtcttactccacaggagatttctaaattagaacggtatctagatgcaaagcgtgggaatttactttttgctaaaaaagttgtactagtcgaaggtgatgctgaagaaattatgattccagcgatgttttttaagcattttggaatctctcttgatgagttaggtgtaacgattgtgaatgttggtagcactggttttaaaaatattgctagcatttttcatgaatctaggctgagaaaacgttgtgcgatcatcaccgatttagataaatcaatttacagttcaattaaaaaaactgatgggaagattttacatgctaaaaaacgaaaggcagaacgttctgaaaagttagggaaggaaaggaaaaaaatattggatgatttttgtaaaggcaatgattatgtgaaagcattctttgctgaacaaactttcgaagtcgaatttataaattttttccagaacgagaagtatcttaaatcagtggtgagcgaagtttactccaatgaaaacaaaatattgacagttaataaagatttgagttccccttcaattgaaatttgcggcgatcgtgttttgtctgtggcaaaatatatgggcaaaggctggttggcattgatgctggctgataaaatagatcatgatgtcgtaattcctccatacattttagatgcactttctttctctatcggtaagttcaatagagtaatcctaatctcggtcttgaagtataaaagaagtaagcttggggcggatgaaactaaagacattgctcctgggatagacgagatattagataagttaaatggaacagaacgtttgctgagacaagagattcgtgatcttatttctaaggtgtttggtgttgatgatgctttagtaaggatgatatag

SEQ ID NO: 75679 - DNA, 1764 bp, Citrobacter freundii
atgaacgagctaactttgaaaggttttcttagtgatgagcagataaagtctgtattgcatgaggggaatgcagtggtaatggcttgtcctggaagtgggaaaactcggactttatcctataaaattgcttatgaattatctaaaagcaaagtaaaccgttttataattgctttaacatatactaatagtgctgctgatgagataaaaaaaagaataatggaattgggtgtttctattgataatttatggataggaacattgcattctttttgtcttaaatggattattaaaccttactctgctttatgtgatgaaaccaggtatgggtttaaaataattgatcctcacgattcggaagaccttaagttacagttatgttctaaatacagtagagactatttcaaaacggattttggctggtgtgaatacggattgagagaaaaagataagcatgggaaagaagttgttgaaaaatattatgaatgtctaagggatagtggctttgtcgattttgaacaaatagtatatctttcttataaagttgtcagcaataaccatttcgttgcaaaaaatctttctaatattttcgaagttgtaatggtagatgagtatcaggatacccaggtattacagtatgaattattgttttctctactgaaggtaaaaaggaatagctgtaggttgttttttgtaggagatcctaatcaggcgatatttaattcaatgggaggtgttgctttagattttgatttgttttcttcacgcactggagttaaatttgatttattgcagttaaaagataattatcgctctagtcagcaaatagtggactatttcactaattttagaacggtggccggagaggcgtttgaagcatgtggagagttcaggaactataagtcatcaattactttcgataattcatgtctgatggaagacctagattcaaatatttctaaatttattactggagctattgaggaaggtatctcagttaatgagatttgtgtaattgcaccttggtggtatcatctttcagaaattacccgaagattgatggcaataatgccagatgttgcatttaacggtcctggtataacgccaatatctcataatagagaaagtttatggtataaatttgcaaagatagctctcattagcccttctccatataactacagacatcgaatttcaactgccggagaaatatttgagcaattgattgattcaggttttttcattgatttgaaatcatgctctccaaaattgtttttaaagcattgcaatgctgtcaaagttaatgaagttggtggggtggagtatttgagtgctttctttgaaaaggcctgtctttattttggctttgatgtgttaagttcaattgaatttgctgattcttatgatgcctttttttcttcagctgaaaaaagaaaggaaaaattaatatctctaaatcttgcagtgcttacctcagtagaacattataaaaggatgtttgaaaggaaaaaaggagtcaccgtaacgactattcactctgcaaaaggattggagtttgattgtgttatagcatttggattattggatggtgttatgaataaatttggtgaggaaaatgatcactcaaaaagattactttatgttttgagttcaagggctaggaagaaattacatctaatatccgagggtgatagaagatatagtaggggagtttattctgttaacaaggttcttggtagtgttaattatgactacacagcttcataa

SEQ ID NO: 75680 - DNA, 1905 bp, Citrobacter freundii
atgaagcttgaagtaattcggatatctggtttccaatcttttggcccagaaccgacagaggtaagccttgaaaatatcacttacttaatcggtcctaatggctcgggtaaaaccgcggcacttcaggctttatgcaaactatttgcctttgatcctgcattgcgtcggatccatcgttctgatttccatgtcccttatgatgaagaagaagttccggaagagcgccaattgtggatagaagctgactttttatttcctgaacttgatgaggaagatgataacagtaccgtagcacctcattttagtcatatgcgacttgatgatccgggaggcctcccacgtgtgcgttttcgcctcacggctactatgggactggatggtgatatcgacgaaaacttagtgtatgtactggatgtcaatgctgatggttcacctcaaaacacagctcaagtaccacgagcagagcgtaatcacatccaggttcattatttaccagccagacgtgaccctgctgatcacattacttacggtgcgaatgcattactaggccgtttgctccgtgccgtacgttgggatgctgagcgcgatacgatcaaaggtctgaccgatcaaataagcgacagccttgcagccaacccttcagtgaaagcatttagtaagagtttgaaaacaacctgggccactctacacaagggcaaatttttcgctgatccaaaaatcacatttgtggcttcggagattgaagcactgttgcgacatttgtcggtttcttttacccccgggcacgacggttcacttgtcgatttttcgcggttgagtgatggccaaaagtcaatgctttatctttccctagtattatcatctcaagcgattgggagagctgtgctcgccgaggaagatgtatcttttgatcccgataagttacgtccaccggtctttacgctggtcgccttggaggagccagaaaatagtctttctccacattacctgggacgtatcgtcagtgctttgtataccatgacgaaaaatgtggatgcacaagctctcattgctactcatgcccctacaatgttacgtcgcgttgctcctgagttaatacgttatctacggttaactgaggctcgaaaaacacgggtcacctgtatcaaattgccagagaaagctgatgatgcacacaagtttgtccgtgaagccgtccaagcatttcctgagatttatttctcacgtctcgtcgtgctaggtgaaggtgatagtgaagagattgtgttgccatgtctacttcaggccaaaggcgcgccagttgatgagtcagcaatcacgattgcgccgttaggcggtaggcatgtcaatcatttttggcggttgctttcagcgttgcagattccctatctgacattgcttgatcttgatgtagctcgctatgcggcaggatggggacgaatcaagtatgttaatgatcagttttctgcatatgagccgtataagaaactccccaaagatcacggaattccaagttggaaagataaagctcaaaaagttcgggactttgataattatttcgaacttctcgaagaacgtggcgtttttttttcttccccaatggatttggacttttcaatgttactggcttatcccgaagcttatgatgttgataaagaaaaacctgatgagtcaactatcaaggctgtcctcgggaaaagccatcacgattcatctcaatacagtgaagacgaattaatgttgttcagcacctatcatcagcgctttaagcttggcagcaaaccagcagcacacattgaggcgttaactcagctaagggacactgaattacttgaaaacatgcctgagtcgctaagcaggctggcagatgcagttattgccaaactcgaagagctgccagaatga

SEQ ID NO: 75681 - DNA, 1680 bp, Citrobacter freundii
atgattgctgctgaagcatggcaacccgccgatggactgactttggaaccaaatgcaaaacgagcagcaaaagcgcgtaagcgctgcttggcactcaccgccggaccaggtgcgggtaaaacggaaatgcttgcgcaacgagcagacttccttttgcgtacaggaacatgtcggtaccctaagcggattctagcgatctccttcaaggttgatgccagccgaaacctaaaagagcgtgtcgaacggcggtgcgggactgatcttgcctcgcgttttgatagctataccttccatgcatttgccaaacgtatcatcgatcgtttcaggccggtgctcacggggaaagatgtcctggatgcgggttatacaattgtggacaagaaaaatggcccctctcgtactcaaattgaattcggcgatctggtccctttggcaatccagatattgaaaacctcaaaaattgcccgtcatgcaattcggcaaacttacagcgatattttcttggatgagttccaggattgcacgaatttacaatatgacttagttaagcttgctttccaagggactagtcttcgccttacggcagtaggtgatactaaacaaaaaattatggcttgggctggagcgctggacggtattttccaaacctttgccaatgattttaatgccgtaccacttaacatgtatcgcaatttccgttctaaaccacaattgctgcgggttcagaacgaaattattcgtacgcttgatcctgactctgtcatgccagatgaacaattgggtggcgatggaggtgaggtttatgcctggcgttttgaagacagttgtaaagaagccgtctatttggctgatctaataaatggttggataaatacagaacaattaccacctgcagaaattgcagtcttggtttctaaacagttggaactttatgctgaccaccttatgaccgagttggaagcacgcggtattccatatcgtaacgaacaacaattgcaggatatcactatagaacctgcagcacgtttgatcgtagattatttatcatgtctctacggtaagcgtgaacctaaggcttggattagattgatgaatcaattgattccttttgccgatgaagaaatacagtcaagtgcgagaaaggatcttgatcaattaattaaaaaacaacgtaaaaaagtatctgatgctaggcatacagactcgcctttttcggattgggtacaattggcaatagagtttctgaagtatatcggctccaaaattttggttgctttatcacctgactatgaaactcgttcgcgtttaaatgatgttatccgtgaaacttttgcccggattaaagaattgcataaattagaaccagatttgccaaaagcgttgggacgttttgcggatgatcaggctgtacgcattctgaccattcataaaagtaaagggttggaattcgactctgtcattatcatggcagtagaaaacgagattttctttggcgatcaggatgagaatcgttgcgcttttttcgtcggtgtttcacgagcgaaaagacggttgattctcacacatgccgatcagcgagaacgtcctgctaacgccagacgttggaatatcaatcgaactgctcaatctgagtattttagttatgttactccatttgtagcgggtaacaagtttaagtga

SEQ ID NO: 75682 - DNA, 2355 bp, Pseudomonas stutzeri; identical to SEQ ID NO: 74454

SEQ ID NO: 75683 - DNA, 1953 bp, Pseudomonas stutzeri
ttgagtaccgctctgccatcgtttggaaacgatcgcgacgctcatgtcgtcgaagatatctgcggctacatcacgacaaccccgcctcggagtttctttctcttcgctggcgcagggtccggtaagactcgcacgctaattgaggttttgcgtcgagtcactggagtgataaagcatgaagcaggggctcactatgcagaacgacttaggtctcgtggacagtcggtgcgtgttatcacctacaccaaaaacgcgaccgccgtcgtcaacggtcgtctcggcgaaaattacctgaccgaagtatcgaccatccattccttttgctgggaactcatccagggctttgatgatgacatccgggaagccttgcttgcgttcaatgccgaagatcttgtggctgccaaggcccatgcgatgggtaagaaaaggggcgagtccgacaccgaccggcggaagtatgcggagatcgaggcagaggcggaggaattacggaagactgatgaatttaggtatagcccggacagaaacaccttcggtccgggggcgctatcgcacactaacgttctggacgtgaccgcatggctaattgttaaacgcccaacgctgcagcgcatcctagaagaccgtcaccccctcatccttattgatgaatcccaggacacgatgaagggagtacttgatgcactatttgaactctccaaaaaccgtccggatcgcatcacattggggctcctcggggatcatcggcagcgaatctaccctgacggtcaccacgacttaccgtcacacgtgccggaagactgggcgcgccctgcattgcagatgaatcatcgtagccaaaagcgcattgttgaactcattaacaagatttggggctcggacatccagggccgtactcaacccaagacgggtgtcccccagcaccctaggacagagaaaaacggtggaaccgttcgaatctttgtcggcgatgctaagacggattccgccgagaagatccggagggaaacggaatgcgcgttggccatgtcggccgagactgccttatccgcctggcaagagcgtgggcgtggttacaaaaccctcgcccttgaacacaaacttgccgccaaacgaggcaatttttacgaggcataccgctcgattgagctgctggacaaggatgccgcggtgcccaagagcaatggcgagcggacggggcccactatggtgaggccgctcctcggcccaatggttgaacttgccgaatgtctgcagcctaatggttcagtgaacgagttcgccgtcatggatgtgttgcgtaggcacggcgcacttgcaaatgtcccggaatctcgcgccgagcgtcaggccgcgctggacaaagctcacgctgcagttatgaggttcgcaaccgccgccgccaagcccggaataaccgtgcgagaagtcttggaaccaatcatcgaagccagcctcttcgaagcggatagtcgcctagtcgaggcctacggtgattcgtcgccgcctcctccagagccaaagacaaggagcaaggaagcgaaggaggaccgacgtaagcgtggctggcacgccctcttcggcacgccctggcaagaaattgctcgttatcacgcctatcttgggggtgaaaccgaactcgcgacgcatcaagtcgttaaaggttctgagttcaagcatgtcatggtcatcatggatgatgaggaagctggcggcacgtggttctcctacgacaagctcttcggcgctgaggaattgagcccgactgatcttgagaacgttgacgggggaaaagagaccactattgatcggaccctaaggctactttatgtcacctgcagtcgagccgaggaaagcctcgctctggttctttgggcgaagaaccccgctacagcgctcgacgcaatcaaacagtccgaatggtttaccgagaacgagcttaccgctttgtag

SEQ ID NO: 75684 - DNA, 1746 bp, Halomonas sp. A3H3
gtgtatctagcaaaactgaaaataacgaacttcagaaaattgcaatctgttgaccttgagtttcagcccgggctgaacgtcctggtcggctctaacaacattggcaagaccgctattgttgatgcattgcgcgcgctacttgcaggatacgacgagccatacccgcgctttaacaacgacgatatgcatcgaccaaaggggggcgatccggcaggtgacatccagtttaagtacgtcttccaggatttggacgtagacgacgaagcagactttctggcagcactgaagccggacgaagatggcaggtttgaagctcacattaacatccgttattcagaagctgacaagattggcaggctgcgagtaaggcgttggtgtggagaccatgaagagataggcctgaccgcggatatgatcgagaaccttcgcggtgtctacctgccacctcttagagatgcttcacagggtctcaagcccaatcgccatagcaagctggctcgactatttcagctccttgccgatgatgaaggtcgtgatggaattaatgaagcacttaaactgctcgatgaagagctaaggggccacgatccgattattaccgctcactcggccatcacaagtcggcatgacacgatgctagggtctcagctagcccaagtgttggatttgggattgagcggaagcgattttcagaagctggcatcacgcctgtcgttagtagtggacgacttcgaaattgaacagaacggccttggatttaacaatctgatttacatggcggtggttctctgtgagctggccaggaacgctgacgcgagttaccgaggcctgatcattgaggagcctgaggcacacttgcatccgcagttgcaggcggtgttgctagattacctggaatcgattcaagatggggagggtgagaagcccgttcagttgtttgtttctagccattcccccaacttcgccagcattgctaatctcgacagtctcacctgtctggtcgaaacagccactggcgtggagactttcttcccacgcaccatccaatttgaaaggggaaaaagagaaaagctcgaacgctaccttgatgtgacccgcgctgaactgttttttgcccgtcgtatcatcttcgttgaaggcgcggccgaattgatgctggtcaatgtgctcgcggaaatgtgtggctataacctgcgcaagcacggcgtcagcctaatcagtgtcgaaggactcaattttgactcttttttgcctctgtttggcgaggaggccctgaaaattccagtatccgtgatcaccgacgcggatccagtaagtgaagcggatgaaaccggagaaacggtggccgtttatcccacgttcgacgaggaaattagggtttcaaacaataccgccaggatgaagaaaaacgaggattccctcgttaaggttttctgcggtctcaaaactctcgaatatgatctggcgttggttgacgttaatcgcatcgcaatgctggctgcacttagaaatatgcacccgagaatcgcgcaagacctccagactaaggtcgaagaggaagatggcgatgcagccaaagcacggactttattcagcggcatgtttgagcgcaaacaaaataatgtgcagaagggccgctttggccagtcactggcgcaagttattgccgaaggcaatgcttttgtagtgccagactatatccagaatgcgatttctcatgcctgtcaaacagcggaggccaagtag

SEQ ID NO: 75685 - DNA, 1710 bp, Halomonas sp. A3H3
gtgaaccacccttccgaagagcagacgcaggttatagatgcctcagtagagcccttgtcagtaattgcctgtgctggcagcggcaagacattcactgccgtgcgacgtctggccaatattcgtcaaaaacttggtaatcatcgtggacgtgtggcactcctgtccttctccaatgtcgctgtagatactttccgaaaggaatatcaagatctggggctcagcagcaacgtcaacaaccgcgtggacataaatacgctggatactttcatcaccagcaatgtgttgcgccctcatgcctatcggacgatgggcgcgcaacagacggctttccttgtgaccggtggagaagcatttctgaaaggattcacctttcaaacggatccttacccgcgcgctatcaatgaaatgcaggtcggtattgacgctggaggtgtctacttctgctactcggatattaaaagtgaaatgcacaggctcaatactgcccaagctgcagacgtggtgcatcgccttgggcggatcggtgcctacacacacaacctcgggcgttactggtgctatcgcacgttagcagatcaacctgggattctgcgtgctctggttcgccgttatccgcatatcctgattgacgaggctcaggatatcggaacggttcatcaggtcatcatcgagcagctagtgagtgctggttgccaggtctcgctgataggagatccaaatcagggtatttatgaatttgccagtgctgatggggcgttcttgtcaaagtacgggcaacgtgacggcgtaaatagcctcgaattgaagagaaacttccggtccgtgccaccaatccttgatctggccaaccatctggccggacgaaccgatgccgcagatagggaagcgcctgatacagtccatggtaccttctttgtagcttacggtaagaatgacagagagcaactcattgtttcgtttcagagagcagtggaggccgctggccttaggttggagcgttcggcggtactctgccgcggacgcaaacaggcagataaactggctggcaacaaagggtctccgggctggggcatcgtcaaacggtttacacaggctgcaattctgcgcgaccgttttaaagactatcaaggtgcattcaggctggtggctatcggtatcgtcaacctactcgttgatgctccaaatgggatgttggctaagctaacatcccaacatgaggatcaggcgttacgtcggctcatctgggcttttactcgcaatcctgatatgggactgcccggtgtatcgctcaatggaaaagcgcagtggcaccccctattacttaatagagtcaaaactttactggctcaaattaataaagattgtggtctgacgagcgtcgataagcttggtagcaaactcactacaagagatttgcctgatggaccgttactatctgccgctgacctgaatgggaataattaccgaccccgaattcgcgttgacacagttcatcaggcgaagggagaaagcctggatgcagtgctgtatttgacaaacaaggaacatgccgaaggcttaatgaacggcgtggatacagagatcgggcgtattggctatgttgcggttacccgcgcccggaacttgttttggcttggtgtgccagccagtgcgttagttgatttacggccaggattactcgatcttggctttcaggaaactgaggcataa

SEQ ID NO: 75686 - DNA, 2040 bp, Syntrophomonas zehnderi OL-4
atgaaacttgatttagcgcaaatcagaaactttagaatgttaaaagaattggatgttgattttgaggatatcctttcattagttattgggaaaaacaattcggggaaaacatctttcctctcaattcttcaaaagtttctctctgaaaacaaacctgagtttacgtttgatgattttaatattaatacgcaaaaagatattcttgcctgcgaaaataataatagctctcctgaagaatatgttgaaccgctgctatcattgaaactatacatctcttataacgataccgacaatcttggtaacgcttctgcattacttttggatttagatagtgagatgcaccaacttgttgttctttttgaatattttttagggtatgaaaagtatcttaaacttgtcagcgattattcagaatacaaatctaaaggcataaatagagattttgaatactacctcagaaacaatattaataggtattttacagtgcgcataaaagcacttgaatacggcaatgagacaaatttcaagattattaacagtgatatagtaagttctgttatttcaatgcagataattggtgcaaagcgtgatgttgataatgagcagggacatagccgagctctttcctttcttgctggaaaatactacaattccagtgttgtctccgaagaagagtttccggagttacagaaaaagcttagcgaaacagatgaaagtttaactgggatttatcatgatctctttcgtcctgttataaaagaaatcgccgctatgtcttataatcctcaagaagctgaattatcaatcatatcaacactaagtgaaaaaaagatatttcaagataatacgactgtgaaatataagcatgaagatacacttttgccagaagattataacggtttagggtacttgaatctgtttgctattattttcaacatacgaattaaacttgatcagttatcaaagaaaaataagcctgatgaagatcctgccccgcttaatctcttgttcattgaagaacccgaggcacatacccacccacaaatgcagtacatttttatcaagaatattaaaaagattcttacgcagcattgcttagagtcaagtaaagatttttcactacaaactataatcagcactcattcgtcgcacatcgtatctcaatgtgattttgaagatataaaatactttttcagggagagtagcacaagtgtaaagtcccgtagtttaaaggcacttttttcaaagatggtaaccgcagagaacacgcctaccaaagaagaagaagaacgcgcatataggtttgtcaagcagtatgtaacattaaatcgtgcggagcttttttttgcagataaagccatcctattagaaggcgataccgaaagaatgttgatatacgcaatgatgaaaaaggttgatgagtgtacagaggctgataattataatcctcttctatcacaaaatatctcggtaatcgaagtaggagcttattctcatatttttgccacattccttggttttctaggtattaaaacactaatcataaccgaccttgattgcgcaaaatcggatggaagtgggaaaccgaaaaaatgcaggttttcagaaggaacgaccacaacaaatgcttcaattaaacattttactcagtgttcagatttaaccgatatattatcgttatctgctttgcccataacattaagttatgataataataccacttcgtggagccttgacgaaaagggacaattgcgcctcctttttcaaaaagaagagaattgttatcaagcgcgcagttttgaggatgcttttatctgtaacaatttgcagttcatcgtagaccataaaaaccattttactagtctaaagaacataaccgtcttagacaactcgcctccagatttttatgacattgctgatagatgcattagcagtaaaacttcatttgcgctagacgttcttctatatggtggaacacataatgaaaaatggacaaccccgttgtacataaaggagggattggaatggctggcacagtaa

SEQ ID NO: 75687 - DNA, 1611 bp, Syntrophomonas zehnderi OL-4
atggctggcacagtaatggaaagtatcatatcttgtttggatggtaaaaagaattttttgctaagcggtggcgctgggagtggcaagacttatactttgatgcaaactttgaatcatattttcaagagtaactctaaagcacatgtggcttgtataacatataccaatgtagcagcagatgaaataaaggaacgctctccgtattcaaaacttcgtgtttcaactattcacgattttctgtgggatgagataaaagattatcaaaagaatttgaaagccgctgtgataaatttaatatctgcagagaaagtaagtaaaggaagcggaatagcctactcaggtgagtgtgaaataaatgagcagacatttacttatgttgaatatcaaaactatcgcgatctagaacacgggattatttcccacgatgatttattgaaaatcgcaaatcatatgttcgccacatacccactattatcaaaaattctatgtgataaatatgattatatttttatagatgagtatcaggatacacaaagtgtagttatcgaaatatttttagagcatattaaagttgctgccaaagatcgattatgtgttggattttttggcgacaaaatgcagtctatttatgattcaggtgtcggtaatattcagtcatacgtagctactggcgacgtatgcgaaataataaaagaggacaattatcgctgcgctgtaaatgtgataagcttacttaaccacttacgttttgatattcaacagcaaccagcaaaaatgacaatggaaggaatcgttgctaataaatcagggagtgccacgtttatatactcaatcaatgaatttgacctacaggctttcaaatcaagtaaatttgctactggatggaattttgagaattataaagaaacgcgagtgctatttttaacccatagattaagtgctattcggttggggtttggggaactgttggctgcctattcaaataacgaccgacttataggaaatgaacccgatcgcttagctcggcaccttctaaaaatcggtagtattctattctgctatggtagaaaagatttcgcatacgtaatcagtgagatgcaacgtaagataaaaaatgcctctgataaaaaacagattagcgaatcattatcacgcttatatgcaaatctcaatataagtatagaacaactaattgaagcatttgacaaagaacgttttgttcgcaaagatgaccgcttcaatgagtttcttgaaaatcatgcagaaacatatgacaaaattaaggtgttgcccgcctctcaagtacttgcatatttcaagtactacaatgatttttcgccatattcgacgcaacatggaatcaagggagccgaatttgataatgtacttgtcataatggacaacggcagatggaataattacaacttcaaatacctttttgaacgaacgccaggcaaagaatctgtaatacaaaggacagaaaggattttctatgtatgttgttcaagggcaatggacaatcttgtcgtatactatcccaatccttctgcgagaattattgcacaggctaaagccttatttggagacgaaaatgtctgctctttggattaa

SEQ ID NO: 75688 - DNA, 1857 bp, Neorhizobium galegae bv. officinalis
atgtatctcaaaaatcttagtctcaggaatttccgttcttttggtcagtccgaaattcctctttgcaaggatctgacgatccttgttggagaaaacaacggcggaaaaagcaacgccattgatgcgatacggcttttaacggcgccacttggtgggcgccgggaactctattgcgagacgacggacatccgatttggtagcgacgagagaaagttcgagctgaccgcgaccttcaccgagctgactccggcacaacaaggccggttgatttcagcggcgaccgacgccgcgatctccggctgcattttcggtctcaaatatgatgagaccacgggccgcttccccgtgcgtccggtcttgtggggcgggcatcagcaaggcaatccggagcccggatgtcacgacatggtccggcatgtctatttgccgccgttgcgcgacgcaaagcgggccctggcatcaggcaatccgactcgcatctacgcacttctcaatcacttccttgatggcgaaaagccggaggccttggctgaggcacttcggcgcggtgtggaatcggagattcttggtagagtcgggggcgctgtggaagtcgggcttagcgcgttgactgctggcgtgcggcggcaagctgcgtccctgggcttcgcaaatgatgagaagctcatcgatatcgcgcgcgacctccgcttcaagctctccgatcacggcatcgagcccgaggatctccgttattcgggacacggctacgcgaaccttctctatatggcgacgatcgcggtcgagcttgaaaaggtcaacgacgccgatttgacgctgttcctggtcgaggagccggaagcccatctccacccccagctccaggcagctgtgctcagcttccttgacgagcaggccgagaaatcgcgtaagccgcgcgctgatattcaaggtccggcgggcgagctgcaggtgatcgtagcaacccattcgccgaacctttcggcgtgggtggaaagcaagaagctcgtctttttccgatcgtttcttccctcgccagatttggccgaggcggctgttgcggaggaagagccgcatgtgctcgccggcgttccagccgagatcatgccggaaatcgagccgaatcccgtgatgccggtggccaggccgaggcgagaaacacgctgcattccgctcagtgcattggcgctcaatccggtcgagcgtcgcaaggtcgatcgctatctcgacgtgaccaaatcggcgctcctgttcggtggtcgcgtgctccttgttgaggggatcgctgaagcgcttttgctcccggtcatcgcgaagaaggtcgtcctgaagggcgaaccggagaagctccgcctgtttcgctcggcggtgttcgtcccgattgatggcgttgactttgagccttacgccaagttgctcctctcaccctacaatgaggtgcggatcgcggatcggctcgtcgtcttgacggacggcgacggtggcgaggttgcagacggggcaatgacgccaggcgccggacgcaagcgcgatctggaggcggccgccgcagaacttggcgcaagtgatctgcttgaggtcgtgatcaacgactattcgctcgaggcagaattggtgcaagcagggaacggggctctgcttaagggggcctatgtaaagctccacccgcgctctgctgacaagtgggaggccgccgtcgggcaggccggcgctgcacaggcggtagcaattcaaagattgtttgagacgacgcgcaaaggtgattttgcccagctagtcgctgaggaaattaacaacggcgcggcgttcacagtaccgggctatttgaagacggcgatagaggcgctcgtgaaatga

SEQ ID NO: 75689 - DNA, 1725 bp, Neorhizobium galegae bv. officinalis
atgatcgtggcgccgttcaagccgactgatgagcagaagcgcgtgatcgagcatccgggatctgccttcatcgcggcgtgtccgggtgcgggcaagacccgtgtcatggtggagcgggcgcgcaagcttctaaatggtggggccacgagtggcgcaatcgctttcctctccttcacgatcgctgcggtctcggagctggatgatcgactgcgccgcgaaggcgtgatcgatacgccggcttttccccacttcatcggcacgttcgatgggtttctctggcagttcctcatcgcacccttcgcgatcgatggctgcgccgcgaagccgaaactcattccggacaaggatgaccgcattattcagccgttttccggggcgcaggcgttgccgctggaatgctttgatcgcacgacggggaaggcaatcccggcgcttattcaacgccatggctttcgcgggcagctcaaggcgcatgaaactgcggcccggaacgcacgagcgcgcttcttggagcgcggcgaactcgacttcaccgacgcgcgatccatggcgctcgcccggctgcgcgatccggcgcggggcgcagtcctcggccgggcgctggcggcgcgcttcctcgagctcatcgtagacgaggcacaagactgcaatccggtcgacctggagatcatcgactggttgcggacggccggcgtgcccgtgaaggtgatctgcgaccccaaccaggcaatctacggctttcgcggtggcgtaacccgcgagctttcgcaattcgcggagaagttcggcaaagccgagcgtcttcccatgagcggaaacttccgatccagcgggcacatcacgaagtgcttggtggcgttgcgcgcgcccaatatgcgtggtgcgatcgacgaagcgctgggcgagtgtcgcgacgaaccgaaggcggttcagatcctgtcttattcaggaaggggcgttccttcgacgatcggggcgaaattccaagaactcgtgcgggctatggggttcccggcacaggattgccctgtcgtttcggcgacaaggcgaacaggcgcgaacgcgctaggacatccccaggatacgggcgttcgcgatctcagttacaggcttgcagttgcggtgagcgattttcacttctcgttcgagattggcggtcgaaaggaggcgcttgtcgcgatccaccgcatcatgctcgaattgggtggcggcatgggcggaaagacctatcaccagcatctcacggatacagacgtcagcccggagtcgtggcgccctgcagcactcgcgttggcgcaggccctgaagttcagtccggagcggtttgcaacggccgaggcgtggcacgatgaagcccgtcgtctgctcgcgccgttgctgccggccggcggcccgtcaatcaatcagcggcttcgccgcaatggcgatctggacaaggcattgtcggtcgcgcccccatccggccacgccgcgcggacaattcatagtgtgaagggcatggaatttccagcgatatgcgtggtgatgtcgccgagcactgcgaagggcatcgttgattttctgacgggagacgcagcggtcgacaatgaggaagcgcgcaagatctatgtgggggcgtcgcgggcgcagcgtctgttggcgatcgcgctgccgcgaacgcaggctccgcggctgcgagatttgatggcgggaatgggaggctcggtcgactttactgcgctctag

SEQ ID NO: 75690 - DNA, 2136 bp, Neorhizobium galegae bv. orientalis
atgtatatttctcgactgcagctcgttaactatcgaaatttcgcccaagcagatgtgatttttaagaagggcgtcaatacaatcatcggcgagaacggatctggcaaaaccaatatccttcgtgcgatacgactgctgctcgatgagagcatgatacgaatgatctaccgacttgatgagcaggatttccaccgcggcttaaaagactggcgcggccattggttgataatcagcctcgaattcagtgaagtctctgaacacgagtcggtacagtccctcttccttcacaacgctggaaatatcgagggtggttcggtcggtcgcgcaacctacaaccttcttttccgccccaaagctgcgatccgacaggcgctaggaaaactaacaccgggcgatttgccgggcctcgcttcaattcgatccaaaatcgagctcgatgactacgagccggtttttaccggcaaaagcagtgtaaatttttgcgacccgggcatctacaggtcggtggtgggcgacttcgacgatgtcgtattccccgaaggattacatgatgcgtcgatactcggcggcatcatcccaggtggtttctctatcaccagagaaatttcatttacattcgtgcaggctctgcgcgacgttgttgcagatttccaaagcaacaggacgaatccgctcctatcgcttttgaagcgcaaaagcggggaaattgatcctgtgtctttcgaaccgatctcggccaaggtcaaagatctcaatggcgcgatcgaggccttacccgatgtgcgaaccgtgaggtcagacattcgtgaaacgatcaccgacgccgcaggtgagacgtactcgccgaggggcctatcgatccgctcggacctttccgacgaggcagatcgtttgtttcagtcgttaaagctcttcgtcgccgaaaacgacgagctttatgaaggcggcatccatgagctgagcctgggaggagccaatctgatctacctcacgctcaaactgctggagttcaaatatcgaagccgcaaggagtcattcgcgaacttcctgctgatcgaggagccggaagctcacattcatacccatattcaaaagaccctcttcgatcgcttaaactacgcagacacgcaagttatctacacgacgcactcgacgcatatttcggaggtcagcaacgtcgaaaatgtcaacatattaggccgagatgctggaaggtgcgaagtatttcagccgtctcaagacttgaagccggacgagatcgggaacatccagcgatacctcgatgcagtacgaagcaatctactttttgcgagaagcgtactgctcgtagaaggagatgcagaagagatccttgttccgatcctcgtcaaaaaggtattcggcctcagccttgacgagctcgggattagcttgatcaacatccgtagtacaggcttcgagaatgtagctgtactctttcacgatcgccggatccgaaaacgctgtgcgattatcaccgaccttgatgcggcgtttatcgatgtcgtggaagatgctcttgatctcgaggccgacaagaatcgcaagaaaaaggcgaggaaagcggccaaagttggcttggagcgccaaattgccctcaataccctatgcgacggaaacaactggctgacggtgcactttgctgaccacacgtttgaggtcgatttcgttatggcgggcaacgtagcaaccgtcgtctccgttctaaacgacgtttacaaggacgctcccactatcgctctcgcaaaaaaggagttggagtccggcaagatcgaggagtacggaacgcgcgtgctgacaatggcaaatcatgttggcaaggggtggttcgccatcgtgctcggcaaagcaattcacgccgacgttaaaattcctgattatctgctggacgccatttttcaggcgcacctccccgtctcgaaagaaaccttcgcagcgatattgacctacaggttgcggcttatcggggaagccggcggcgatgagattgagctcggcaaaatgcgccatcagatcgagcaatatcgggtggataaattggactttgcaggtgtgagagcggctatgttcatggcctttccggctgacacgatcaacgcaattctcgcggatttctga

SEQ ID NO: 75691 - DNA, 1788 bp, Neorhizobium galegae bv. orientalis
atgttcgtgtgggacaaagatgacctcaacgaggaacaggtcgaagcgatcgacgagccaggtaacgtttttctagcggcatgtcctggaagcgggaagactcgaacgctgatctaccgtatcgcgaagcagctatcggaactgagatccgagaagcatcgcgtcgttgccatcacctacactcgccgtgctgctgatgagatccatgagcgtatcgaacgtttagggatcgataccagccagctatggattggaacgatccactcattttgtcttgagtggatccttcgcccttacgcaggtttccaagaagagctgaagctagggtttcgggttaccaacagccacgagacggaggccgttattgaggggcttatcgaacaaagatacccaagtctcaccattttcgactggggctacttcttcaccagctctggctatcagctcaactgctcggacgcatcgaaaacgggagcacttcaacggctgctcggagaatattgggctctcctacagaaaaaccgccaaatcgattttgagctgatcctgtactatgcatatcagctgatctcgtccgtgcctgtgatcagcaaactcctggcctcaatctttagggcgattttggtcgacgagtatcaggacacacgcgagattcagtatgttatcctcgcctcgatcctgcgccagagtggagaaaacgctacggctttcattgttggtgacccaaatcaggcgatcttcggctcgcttggcggctacgcggtttcaccggcagagttcagccagatgtctggcctgccctttcggcagatgcacctttcttcaaactatagatcgtccatgaagattgtcgggtacttcgaggacttcagctcgcctaccgtgaaggtcgaggccgtgggcaaggagcgggactacccaagcataatctcctataataatcaggtccggaaagatgatctgcaggcggagctggtgcgtctcattcggctaacgatcgaggagaaaaagatcgctccgagcgaaatctgtattattgcgccatggtggacccatctcgcaagcgccgccagacaacttatgactgcgatgcccgaatatacattcgacgggccagggatggctcctttcgcacgcgatccggataatttctggttcaaactgtcccgcattctactgacgacaccgtcaccctctcttttcatcaagcggaggagatgggcaggcgaagtgattgatgccctacaggcggtaggcatcagtgttgcggggaccgatcagcgcgaactgctgatgatatgcaataaggtgacctgtttggagcaagacggcctgacttacctcagacaggctttctcgcaggtatttgacgctctagccgtcgatcatacgcgaaatgcatcgctgcaggagcatcatgaggcatttttcgaaagtgctcagcgacggattgccaggctcatcaaggagggttcggtcgcaatctcggatatcgcaatgttccgcaaagtgttttcagagcgaagcgggatcacggtgtcctcgatccacggggtgaaaggcgcggaattcgatgtcgtgattgcctatggattgcttgatgggatggtgccacatttcaccgctgtcgatcaggacggctccgcacgcaaactgctctatgtgatctgctctcgcgctcgaaagaacctctacttgatatctgaagtgggccgcgcaaagggacgcactcggacctactcgccaagcccattgttggcgagtaaacagtttgcttacgatgtgtga

SEQ ID NO: 75692 - DNA, 1917 bp, Listeria monocytogenes; identical to SEQ ID NO: 73702

SEQ ID NO: 75693 - DNA, 1908 bp, Listeria monocytogenes; identical to SEQ ID NO: 73703

SEQ ID NO: 75694 - DNA, 1791 bp, Paenibacillus sp. DMB20
gtgaggatttcgagactacttatccgtaattttaggggcatcaaagaaggcgagttattgttaagtccaaagacagtgcttgtaggagataataacataggtaagtcttcggtattggaggctattgaccttgtcctggggccagataggttatcaagaccttcagtgatcaatgaacatgatttctatgctggagaatatctcgacaacgagagtaaacttgtagaaataaatatcgaggtagttgtagtcgatttgactgaagaccaacaaaggcatttcagaaaccacttagaatggtggcataatgagaatcaaactatactggatggcccgccaccagagtctactgatgaagagaaggttgttcctgcgttacgtgtttcttttacagggagatatgatgaggacgaagacgacttcattggtaaaacgtattttgaatctccaatgaaagacgatggttcaagagacatatttggaacgaaggataaacgtctttgtggtttcttattactccgaacccttaggacaggttcaagagcactaagcctagagaggggctcccttctcgacataatagttcgcttgaaagaaataaaccttccaatgtgggaagaggtattaattaagcttagaaagataactgttgtagatgaccctgcattgggcgttactgaaattcttacttctgtacaagaaggcctgagagcgttagttccatcggaatgggctgataaacctcattttcgggtttccgatctgacacgttccagtatgagaaaggcactaaccgtatttatgggaacaggcgctatccgtagtgatggcgaagaatatgcagccccctttcaatttcaaggaacagggactattaatacccttgtgttgactctgttgtccatgattgcagagctcaagcaaaatgttatatttgctatggaagagcctgaaatagcgattccaccgcatacacaaaaaaggatcatacacagcatcatagccaaatcagcacaagccatcttcacttctcactccccttacgtattggaggaacttgatccttctgaaattcttgtaataacgaggcagcatggaatcctctctggaaaacctgcccagtatccaccaagcgtgaaaccaaaagcatatcgggatgagtttaggagaagattttgtgaggcactacttacacgaactatattaattacggaaggtagaacggagtacgactcattccctgtggcggcaagaagattgcagcagttattcccattcaagtacagaacacttgaggaattaggaatagctatcgttaatgctgaaggggagtcaaaagtagctacgttgggagcttactttagaagcatcggtaaaacaaccttggctgtttttgataagcaagccgacgaaagtaaaaagctgattgatcttgcagttgaccatccttttgaagctcaagaaaaagggtttgaagacttgatagttaatggttctgatattgcagctttacggcgttatgcaaaatcagtaactgaagcgggtgaatggccgactcatttatctaaagtcactgatagtagtacagatgaagagcttaaaaagagtcttcgtgaattcttcaagcagtcaaaggctgctggtgtaacatctgactttattaatcagtgtgaagaatctgaaatgcctagctttatcactgatacattacaagctatacaagcaataatcgaaacacgagctggcaaatcaggagaaaatgaagaggataatgacgatctactgggatga

SEQ ID NO: 75695 - DNA, 1677 bp, Paenibacillus sp. DMB20
ttgggagggcctggttctgggaagacaacaattgctttattgaaggcgaatcaaataattgagcaggatggtttgagtaaagggcaactggttttatttttaagttttgcacgggcaactgtttctcgagttgaagaacaggttggccaaatgatttcaagtggtaataaaaagcatatcgaagtcaatacttatcacggatttatctgggggatattgcggagtcatgggtacttgttgaactccaattctccgttaaagctgctgactccgcctgaagctgcgtccagacttgctaatatcagcaacgaacaggagaaaacggctgagaaaaggcgattgtttgatgccgagggaattgtacattttgatttgtttgcaggtttgggggcagaactgctatcacgaagcaactctttggcaagaatcatttctgatgcctaccctgttataattcttgatgagtttcaagatacaaacccagatgaatggagcttcataaaagaattaggtaagaggagtagactgatagctctagctgatgctgaacaaaggatatatgaattcagaggagctgatccagcacgcatctcagaattcataaagcagtacaacccaaagcagttcgacttcgggtttgaaaataatcgtagtaacgggaccgatatagccatctttggtaacgatttgttgtcagggcgaaacaaagaaaagaagtacaacaatgttcatatagtaacttatccatttcgtaaagggaattggcttcattttgatgttaagatcggggccattaaagcagctagaaggttaattgctgcgggccaaaagaattggtcggttgtagtacttgtacccacaaagaaactcatgatggaagtgtctgactacttcagtgaaactcaaaatgttatgaacaagacattgcgtagggttcctcatgaagttgcccttgaaacaacgggaccatcacttgctgcgatccttattggggaattattggatttaggtgttgctaaggaagatggattaaaccaattaataaaaaacttatgtgaacacattcggggaaggaatggtaatgagcctccaagcaaggctaacttggaactgtcgacagctctattggattatctagcaacaggtaaaattcggggtacaaagcgtcaaagcataataaacgattgcaaagccataaatgatgccatttatgatttggagtatagcgggaaccccagtgaagactggattcaaatagtcgacatcttatccaagtccagttcagatgtcataaaacaggttgttgtcgattcacagtatcttagaatacttcataagggttcagaacttaggtctagtctttcaacaatgtggcgatcttacggttcgtatagaggagcgggacaggcaataaggttatccttgcttcaggactacttttcctcatcaacgaaagaatatagaggaattcatattatgaccattcacaagtccaaaggtaaggaattcgatgaagtcataatttacgaaggactatttcaaggtaaaattgtaaacaagatcggcggggccaaatctatagagcaatcacgattaagtcttcgagttggagttacacgtgcaaggcaaaacacaacgattataaccccagcgaatgatatttgcccatttttataa

SEQ ID NO: 75696 - DNA, 2310 bp, Serratia ureilytica
atgtcagcagcagacgccactacatcattatctgggcagatatcccttcggtttgttgagctttgccagttccgccgacttggtaaggtccaacttgagattgatcctaagactactattctcgtcggtgctaataatagcggcaaaacatcaattctggcagcactgcgccacttccttgcagatggctcgtcatttggtgctttcgacatcagtgtttctcaatggccaaaattgcgggaacttggaagagcttgggacgcattagaagaagacccgtctacgtctggcgcatccgaaggtgaatgggaagagcaacttgaaaccttactttcggcgatgccaacgctagatctatggttcgatgctaaggccggtatgttccattatgtctccccgttcttgtcaaaattcagttggaaggggggcggggtaggtgtccgattgcgtctggaacctgcttcgaacattgaggatctgaagcagttggcttggaagtatcacctgacgagaatacctgtgaaggatatgggaaaggattcgcttgcgtggccgattgatcttcttgatttttggctgcgagaaccttctcaactcggccaagtttgggcctataagttagatgccgataacaaccctttggacggaataaagacctacgttagccaggtactggatgctgactctagcccaattgatcgtaagcatctgcagaaacttataaaagtagattttgtggccgcacagcgtggccttggtagtgaggaagctgattcccggtctgcttctggcccccatcgaataggtttattctccaatcagcttctcaaatttgctcgacagcatctaaatgtggcagcaacaggtcatgggcaccgagctgacctcataaaagctgttgctgatgcccagcaggaactagataaaaagattcatgaggctattggaccatcggtagaagaggttaaagagcttgggtaccccggcctgcacgacccccaagagattcgtttccgcacccgcatacagacagccgaattactcgaccatgggacagctgttcaatacagcatgcagaaggattcactagaagaacttcttccggaatattccattggtctcggttatcagaatttacagtcccttagttaccaactagtttctttcaaagctgctcgcttaaatcctgaaaagggcgctccagctcctgttcatctggttatgattgaggagcccgaggctcatttgcacgtacaggtacagcgtattttcccggggaaggcacataagctaatcagtcctaacggtagcaatgagtcaggtcttaaaagccaattgattatcagtactcattctagtcatctagcacatgctgaaaattttgaccggctacgatatgttcgccgtattgctaagagtgaagaacaaaacatgcctaccactgaggtggttaatcttgggcaagtttttggtgatgataaaacgacccgtcaattcgctgaacgttattttcgcgttcaacacacagatcttttatttgccaatgctgcaatctttgtcgagggggttgctgagcgaatgctgttacctcttttcattgaaagagattttgcaacactcaacagtcgctatctgtccttcctagatattggtggcagccatgctcatcggctaagatctctcgttgaaagactccgtattccaactgtaattattactgatatcgatccagttgaagaaagaccaggtaagcctaaaaaaaatggggatccgactacaaccttagttgctgtagctaatacaggacaacccggactgcaatgtgggaacccgactcttcgcggatggcaccctaagctgcaacagcttgaggatttcaagaacccgaaaaatgagcatcttgtctggaaagaaattgctgaatgttctgtacgttttgcatggcagttgcctgtagccgaagctgatggtcaatggccaagtacttttgaagactctctaattcttagaaatatcccttggtttaagcaacttattgatgaaaaagtcgatggcgatgggaagcaaatcaaaccgccgaagggtgcgctgggctcagtagcaagagaggtcgctgaaaatgataatattccagaactactcgcggctctgcataaattaatgcatggatcttttaataaaggagactttgccgcaagtatctttgaaatggttgctgcggatgagccgatagtctgccctaaatatatcgtggatgcattggaatggctccagacacagcttgagccaggcaaggaggtgatgccatga

SEQ ID NO: 75697 - DNA, 1977 bp, Serratia ureilytica
atgactaactcaccaatccttgacggcaatgatcgcgatgcaggagtagttgaagagatctgcggctaccttacagacataccacctcgtaactacttcctttttgcaggtgctggttctggtaaaacacgaactttggtagaagttttacgtcgccttactggtgtgactgagcatgagaaggggggacaattagcacgctccctgaagatgtatgggcgttcgattagagttgtgacctacaccaagaatgctgtgtctgtaatcaacggacgtcttggggacaataatttagtcagtgtgtctaccatccattcgttttgctgggagttaattaatgggttcaacgatgacattcgcgagtcccttatagcattaaaagaagctcaactcgctaaagagaccgcagaggcacaagcgaaaccgaagggtattactgcagcaaaacagcgtgaccttgacgaaatcacgaatgaaattgaggatcttcggacaacagaagtattcaattaccatcctgatcgcaatacatatgggcctggcgcactaccgcacaattacgtactcgatgcgacagcttggttgcttcaaaataagccaacactccaatccattcttaaagatcgacatccaataatattgattgatgagtcgcaggacacgatgaaaggtgtattggactccttgatggtgcttgccaaaaaacgggagagagatttgactcttggtctgctgggagatcatcgacaacgaatttatatggatggtcatgccgatcttccaagcattgttccggaaagctgggcaacgcctgagttacaaatgaatcatcgcagtcaacgacggatagtcacgctgattaataaaatctgggaaacagaacttgaaggcaggacgcaaccaacaaagggttcagcacaacatccccgaacggaaaaagctggtggaacggttcggctcttcttgggggatacatcacgaagtccagaggataaagtgcttagtgaacgctggtgcgcagagcgaatgtttcaaattagtggtatagcagattggaatcaagggcaatatcagttgcttgcgcttgagcataagcttgtcgccactcgtggctcgtttcttgatgtttatgaggcaatggttttgttagatcccaacgctgcagcaccatctggcagtggggacaataaggggccttcaacagtacaaattttgcttaatgagctggcgcatttagaagcctgtgtcagtaatgaaggaatcgttaatgagtttaaggccaccgaggtttttcgacgttatggcggtttagataatatgcctgaggactcagatgcaagagtttaccgtactgatgaaatgcttgaggcgatagcggtatttgcaatggcttgcgccaaccctgagtcaacggtcgctgaagtattagcaccagttttaaatgcaaaattatttgaagtagatcatcgccttcaggaggcttatgccgacaagtcaccagccccgccagcacctggacgaggtgaggatgagtcaaagcaaacaagagtccgccgtggatggtgtgcactgtttgctgcgccatggaaacaacttaagtgctatcggaattaccttgctgggatttctgagctcgcaacacatcaggtagttaaaggctctgagttcaagcacgtcatggttgtaatggatgatgctcttgctggtggaaatctcattaagtacgacaaattttttggtggtgcggagttaagtccaacagataaaaagaatgcagagtctggtaaggagacaacaatagatcggactttacgcttgctgtacgtgacttgcagccgtgcgcaagaatcgctcgccttagtgctttggtcgtccgatccaactgccgcaatggctcgaatcgaggagagcatgtggtttactaaagatgaaatacaggtcattccagagtgtctggtcaccggccttagtcgctga

SEQ ID NO: 75698 - DNA, 2316 bp, Pseudomonas syringae pv. syringae HS191
gtgcatcttcactcgtatcgcctcaagaactttcgacgcctaaaggatgctcatattgagctggctgacgacatttctatattcgtaggatcgaataacagtgggaaaacgtcagcgactcaggccattcatgcgttcgttacgggcggcagggaccggttcaccctctatgattttaactcaacatgttggaagagcttcgatgaggctgcagatatcgacttagctctcccgctgcctgaggggttctcgtttccaagtatagatcttgatctttggttcgaggttgcagcatcagacctctatctagtgattccattacttcctagtacagcgtgggaaggaagcaaggttggtatacgagtttccctgattgctaaaagccccattaaccttattcaaaacttccaagaagctaaggccaaaggtgctgtgcagacagcggaactgccgcccgagtcgcaatacattccttggccgcgttctataacagattatctccagcgcgagctcaagagcgaatacgagctacgctacttcatcttggatcactcgcaatttgatgagagcttccgcgaggtcggcgattatgttccagatgaactaggtggagagccaggcggcggaacgattctaaagtcccttattcatatcgacaatctgggtgctcaacgacaccttgctgatcctagcccggaagctggcggaagatcagaagacctgtcaaagcgcctgagccgcttctacaagcgcaaccttaatcagaggcaggacgatcacatagcgctaaaggcgctgttcgactctgagcaagcgctcaacattcacttggatggcgtattcaagccgacgcttgatcggctcgccaagcttggctatccgggcgtcaataacccgcgactgaagataatgtcagcgctagaccccgcccacgtcatgagccaggacgcgcgcgttcactaccagatcggagatggcgaagacacggccacccttcctgatagttataacgggcttggattcaagaatttgatctacatggttgtggagattctggattcccaagctagatgggcgacgatggacaatcgccctccattgcaccttctttttgtggaggaaccagaggcccatctacacgcccaactccaacaggtcttcatccgcaatattcttgagcttctgaatatagagggcgatgacggaagcatttttggcagtcaaatggtcatcacgacccactccccgcacattctttacgagcgaggctttaagccgatccgctacttccgacgcaagaaagttggcaatgaacaattgacggaagtactaaatctatcggcgttctaccaatcccagccagatgatcgtgattttctggaacgatatcttaagctgacacactgtgatctatttttctcagatgccgctattctcgttgaaggcaacgttgagagattgctcctccctgtcatgattcggaagagcgcgaagactctccgctcagcttgtctatgcattttggaggtgggcggtgcctttgggcaccgcttccagtcgctcatcgagtttctcggtctgacaaccctgatcatcaccgatattgatagtgttgccctcgtggctcaggcggccgacgataacgtggatgatgaggaagtcgaagagttcgaggttccagccgacgcggaggacgatgccgcagggcaggttcgggacaatgtgcaagatccagccggtgagcctatggtcccagcgcctaagaagaaatatggcaaggcttgtttgcccagtgagccgggcgctgcaacttcgaatcaaaccctcattaaatggcttccggggaagctcacaatcgaagacttgcgtaacgcatcggaagcggacaaaactcacgtgctcgaagacgatgcgaaggttcgcgttgcctatcagactgaacgggctatcacttggaacggggctagcgaaaccctctgcgggcgtacgctagaagaagacttcggcctcgaaaatccggactggtcccaggccatagcgaggaagcctttagggctgattgtgaagggcgaagccgctggtcctgctgctcttgccaaaggcctcaaccagaaggtttcgcggaagagtttcgataaaacgaagttcgcgctcgccgttctcactgaagacgagaaagcatggcatgtaccgacttacatccgtgatgggcttgtctggctgaaagacgaaatacggatcgaactcgagaccgtgctgcccgacgccattctcatcgcggaagaagatttagcgataggaggcaagcatgagtag

SEQ ID NO: 75699 - DNA, 1956 bp, Pseudomonas syringae pv. syringae HS191
atgagtagccgggcgaataagccggacacccaggccgacatcgacctgcgaaactgccttggaaacgttccaccgcgtagcttcatcatgaaggccggtgctggctccggaaaaaccacgtcgctgattaagggcctgtcatcggtcatccaaatgcacggcgataagctgaagaagactcgtcagcgcgttgcctgcattacctacacagagattgcggccggagagatttggagggatgtcggcagcgaccccctggttcacgtctcgacgatccacagcttcatgtggctgttggctaagcctttccagaacgacattcgcgtctgggtgtcgggacgcatagttgaaaaaattgaggcccttgaagaaaagcgggcaacctatggccctagggttcaacagcgcacgaaggataaggacacccgagacttggaacgcctccatcggcagtcggggcggatcgctgcagtcaaaggattccgatacggtacaggtagcaactacgcaaagggtattctgggccatgacgacattctgaaactcgtcccctgtctcattgccgaacgccctctcttccgaacccttattgcgcgccagttcccgttcgtatttgtggatgaaagccaggacacgaccagcgaggttgtggaagctttgaagaccgtcgagcgtgaacccggagtcacactttgtctcggcttctttggcgatccgatgcaacgaatctacgctacggggaccgggcaggttgaagcagagcccacttgggctgacattccgaaacctgaaaatttccggtgttcaactaaggttctgaatctcgcgaatgccattcgtagtgatggtgatgacctcgttcaaacccctggccagcggctaggtaatgacggcatcgttccaacccctgaaggttcggcgcaccttttcattttgcctgcagacgataaacgggacgcgaatctggttcgagtacgcgaatggatggcggcacaaaccggtgatgatcattggcgatcagatgatgatgacagcgcatgggtaaagcttctagtcattgttcatcaaatggccgcaaggcgattaggatttggagacctctacactgcgctcaactccaaagccccgtcagcgttcaaagatggttttttagacggctctgcatggcctatttcgccgtgtgtaaagtttttgatcccgatagctatcgctcacacccgtggccgacagcttgaagtgatgcgactgatccgggagtactcacctcttctcgataaagactcccttgtcgaggtgagcatagctgagcgtcttaaagaacttggtcaccttgttgctttaatcgcggcgggcatagtgggaaatcccggcgtaacgatcggcgatcttctgagacaggtacatgtctcagagttattgatcctcgatcctcggttggtatcgtatttggacccaaatgcagttgtgcctgtgcagcccaagcccgacgaaggagtggacaatgacgacgacgttcaagaagacgatgaatccgacaaagaaatggcttcaatggatgcttttctagcgtgccccgctagccagcttttgccataccatacctacatctcggagcgttctcctttttggactcagcagggtattaagggtgctgagttcgatagggtacttgtggttctagatgacgctgaaagtagccatttccaattctcctacgaaaaatatctaggccttaaggatttctcagataacgaccggaaacatatagatgctggtgaggaaacaactgtggatcgaacgcgccgtcttttctatgtgaactgcacaagggcgttaaaagatctggcggttgttctttttacggccaatcctgagcaggcagaggctcacatacgtcagcttgatctttttgaagataacgcgatccacactggagccgtcttcgaggttgcgtag

SEQ ID NO: 75700 - DNA, 1959 bp, Pseudomonas syringae pv. syringae B301D; identical to SEQ ID NO: 74292

SEQ ID NO: 75701 - DNA, 1896 bp, Pseudomonas syringae pv. syringae B301D; identical to SEQ ID NO: 74293

SEQ ID NO: 75702 - DNA, 2262 bp, Candidatus Moranbacteria bacterium GW2011_GWD2_36_12
atgtatatctcaagagtctatattaaaaatttcaggaactttgatgaatttgatctattcattccagatggcgagcccctcacgattattggcagtaataattctgggaaaacaaattttttacaagccatacgattagttcttgattctaatatacctacgtgggaaagaagactttcggagaatgatttctgttggctcaaagaagaaagctgctggacaaaaggagaagaaattattattactgtgacatttagcaatgtttcagacaaagaagaaatcaaggctttactccattctattgctcctgcaagtagcaatggggatgacgcacaagacggtttagacgcaaacatatcatttgtttttgccccttcaacatttaacaaaagtgaatcttttgatattaacgatgattatataagttttctagtcgcgggaagataccatccatctggctactattattcaagtgacggcacgatacaagaatatgataataacattttaagttctttgcatgcctgtgacaacaaggaagaattttacaaatatttctatctttcagctgatgacattgaaaaaatcagagaaaacaaagaaatctcatttgaaaaacaacttacaaaacaaatttatgcgaataaaattcgcaaacacatcaatcttttatttttagacgcattaagagatgtaaaaaatgatttctatcaaggatataattctcttgtttctcagctcatcagaggtgctgtccaaaatggcaaaaataataaaatatttgaagaagtaacgggggcgttgaaaactttgcggacagcaggatcaacaccggaagcaaatctcattcttgatgaaattgaatcacgactgcaaaatgaaaaagttaatcttctgactgataaagctgaacttgtaatcagcacaccaaaaataacacctgaaaatgtagggcgttactttaattttcttgtaaatcttaacgaaggaataaaaaaagattctctagatttgaaagttgtcggtcttggctttcaaaaccttgcctatatttcagcaatattcacattgtttgaacttaagaaagaaatatatgttaatgattctgatgaaaaaataaaaattatctataatctattactcatagaagaacctgaggcacatctggatgttcaaaatcagaaatttttacatacgcaaattgagaacaaaacagaaaaattaatggatgattttcctgctggcgacgagagtgccagcactgaaaaacctaaattttttgcattcacacaagttctgcaaacatcccattctactcatctagcctccaaatcagatttgaaaaatatcgttgtcatgcaaaaaaatgttaagcaaactagtgctacaaatattgatagcattttgcaacttgaatctggaacatataagcaccgaaggagaattcttaaacaataccttgatgcaacaagatccgcactgctttttgcgcaaaaagtagtgcttgttgagggtctttctgaaaaatatgcactgggcacaattctaaattcatatcttaaaaaagccaaaccagaaagtaaaaatttagatattgatagcgagggtattgaaatagttgaagttggtggtaaaaattttgatccttttgtggcactttttaatgacaatgacaaacaaggattgaaaaacaaatgtctaagtcttcatgatggagattttcaattaaaagcagatgcggatttttcagattataaaattattcatgactcactcaacgttagtgataccacgacaagcactaacattttttcaaggagcaacatattcacatttgaaatagaaactttttttattcctgaccctgaaaatccaacttcaaacaatgttgaatatttgaaactgatcttatacagattcatgaaagatggagattatttcaaaaaggacaagacatttgaaaaaaagattggaatcataaatgatgtcacaacagcaataagttcacatacgattgataaagaaaaaatagaatcattcttcgatgaaatattagggtatgaagtatcaaagccaactctttctctgtatctatcatctttactaaaggcaaaacttttaaatgatgatgttgagatagatgcatggagcaatggctattcccctgacgatacaacagaaataagcaaatttgaaaatctacccgagtttataattcctaagtatattgaagaaggattatcatggttgattacagaataa

SEQ ID NO: 75703 - DNA, 963 bp, Candidatus Moranbacteria bacterium GW2011_GWD2_36_12
atggttgattacagaataaaattaggaacagactttgatttatcgcaaaaacaaattgaaatacttcaaagaaacagtgacactttagtcagggctgttcctggtagcggaaaaactaccatattaacactgaaaataaaaaatcttcttctggataattcaaatattagccgtatatgttgcatttcttatacaaatgttaatgttgaggatttggaaaaaagttgttcaaaaatgattagcagtgacctgattggcaaaattgaattcctaacttttcataggttctgtattaaatacatattagagcctttttcttatctttacagaagcgacaaaggattaagaccatataaaaaaatctttaattataaagagcatggccccgcccttattgaatttttaaaaaacaacaacacgtcagaaaatgacatagataatatcattaaaagtgaatcaatatattataatttcaagctaataaataacaactggcaaccaataaacaatggtgatattcatttgaatacggttataaaatatttgaaatttttaaattcaaataaattaattgattttaatttaattagtctgttatcgctttttataataaaagataatgatattgtgaagcggtctctgaataaatcaatagattggatttttattgatgaatttcaggatgtctcagaaatacagtgtaaaattattgaagagctcaagaaaaatgtgcgcgatgcagaaaatgagctcaaatggtttatggttggagatcccaaccaatcgatttatggatttgctggtgcaaatccaagaagcatgtttgatatcagaaatatctttaatgaaatttgcgataataatgataactgtgaaataaaattagataaaactcacagatgctccaataatgtctttaattttgccagaaattgttataatcaagtcataacaaaaatataa

SEQ ID NO: 75704 - DNA, 2262 bp, Candidatus Moranbacteria bacterium GW2011_GWE2_36_40; identical to SEQ ID NO: 75702

SEQ ID NO: 75705 - DNA, 963 bp, Candidatus Moranbacteria bacterium GW2011_GWE2_36_40; identical to SEQ ID NO: 75703

SEQ ID NO: 75706 - DNA, 2262 bp, Candidatus Moranbacteria bacterium GW2011_GWE1_36_7; identical to SEQ ID NO: 75702

SEQ ID NO: 75707 - DNA, 963 bp, Candidatus Moranbacteria bacterium GW2011_GWE1_36_7; identical to SEQ ID NO: 75703

SEQ ID NO: 75708 - DNA, 1512 bp, Parcubacteria group bacterium GW2011_GWA2_38_13b
ttgagagacgcagaaaatgaactgaaagcaaaacaagggtcaagaatatcaaaaatattgaaaacccatagcgatataattaccgctgaagatgagcttattcaattattaaagaactttaaagatgcgtcagaagaattttttaattcagggaaagggaaaaatataagagaggagatagatagattattaaagatttttgacgaacaagctaatctgcagaataaaaacattaaatttggaccaactgaaaaacttgatagctgtctaaagacgctagagaaattagccctgtattatgatgatttgcctcgcccgggtttgggcacgcttaatatgatttttatagcggcagaacttttacatttaaatacgcaaaaagcgccaaagttaattttggttgaggaaattgaagcccatttgcatccacaaaggcaattaaaaatcatcaaagcgctacaagaagaatcgaaaaaaggcattcaaatgattctgtcaacgcatagcccgaatttagcttctgttatcgaagtggagcgtttaaatatatgttatggcggtcaaatttattcacttgcaaaaaacaggacggaattagagagcaaaaattattcatatttaggaagattccttgatgtcacaaaggccaatcttttctttgcccagggtgtaattttggtagagggccctactgaacaattgttgattccggaatttgcaaaaatacttgggtataatttaacagactatggcatgtcgattatttcaacaaataacttaggatttgaacattttgttaatatttttaaaaggaaaaaaacgccatataaccaaatacccattgctgttataactgacgcagataaaaggcaaaaggcagctatagatgactatgttgcgaagattaaggacgataataatagggtagagtgttttatcggcgaacagttatattccgatagtgatcttgaatccgatggtaaaaagaaaacaacttttgaaaaaataatatttaaaaacgcgcccaaattaaaggagttatatatacaggcttataattctttaaaatcaagaacggaaaacgccgtggaaaaaatggattttgaaatactttacgataaaattgattccgagaaagctccgatagcccaagaggtagcacaattgcttgctaataaagggactgttgcgaaatcaaagatttccggagttagtgtaaacggaggtacgattttaagtgagttaataaaaaaaggtgctttggaagaaatttcttcgacagaagtgcgtttaagcgcaaataagagtttaaatgaagtagatatccgagaaaccgcaaaggatgattttgaaaatgtttggggcattttgcaacagtcccataaacaaaacagtgaaaaactggaaataaagaaagaaattgaggataaattaaagtatatcaaggatgccattgtatttgtgatcccaaatacgatactaaataaggcggcggaaactacgacagaatag

SEQ ID NO: 75709 - DNA, 1842 bp, Parcubacteria group bacterium GW2011_GWA2_38_13b
atgtgtaattgtattcctacaaacaaagaaatagaagaagccgagcgggacatttttggaaatggattgcattttaatgacgatcagaagatatttttaaattgccttgattctcgttgtgtgcaagcatatgccggcaccggaaaaaccagcgcaattgtcggaaaacttcacatattagcccaaaaatatgcttggcaaaacggcaggggtgtttgcgtaatttcacataccaatgttgccgtggatgagattaaaaaacacgtagccaagcattatccggcaataatgcaatatccgaatttcatcggtacaattcaagagtttataaataaatttctctttattccttatttgttcagcaaggggctccaaattaaatttcaagatgattctagatattttgattacaaatcagaattatctgaaaatattgttaaccgaattgagagtcatattaacagcaaagttaatcatagcaaggattccgagcgagcgagaaaagaattttttaatagattgaaaacagtgcatcttgttgacggtaaattatatgcaagagcaaagaagagtggctttactgagtacgtggatttagaaactaaacaagtatcccaagccgtaattgttaaggccttaagtgatcttatccagaaaaaacataacgacggctattttctttttgttgagagttttttttacggatatgtacatttaaaacaaaatcaattattaaaagaaattatcgctcagcgttttcagtttgtatttcttgatgaagcgcaggattgttctgaaattcaacttcagatattaaatgagctgtttggggaaaattcaaaaacaatattccagcagataggcgatgttaatcaggccatttcagaaacaaagtggactcccgaaaaatatttgaccttgaatcaatcgacaagattcggaaataacattgcagggtttataaataaatttcaggtgagtgatggttccggtgtttctgggacatcggaagaaactaaaaaatatctgattatttatgattccggaaaagaaaaagatatattgcaaaaatttgccgaaatattaaaaagcgagaatatatctaccatagaggctatttttgctatttcccatagacatgagcatttagaagagtattttttaggatattcagaaaaattagcaaaaaataaaagcaaaaaaacatcctatcgttttgataacgatattgaatatatagatctgcttacaaaggaagccgtactacagcgaggatccaatctggtttggcgtgtgctttgcggtttgttgtataaacaatttaaaatcggcgacaattcctggagtaagttaaaagagtttttgcgaattggcgaaaaagcagatgattttaataaaatagttacagaaatatgctatgacatattgcaaaatggcggtatatctgatttagacagtttgaaaaacaggttaaacgcaattttaggggaagacagaattagttttgcaaacagcggttcatctagttcccccctcattcaaaatcagacgattaaaaataaatatagttataatggaatagaaattaatgttggtacaattcacagcgtaaaaggacaaacgcatggagcaactttactattctcaaataaagaggataagaagcaggacattcagcatactatagataacacggaaaagcgtactcctgaatttaaaagacgtttttatgttgcgtcttctcgcgcaagacacttatttgcgtttgctatagaaaaaaccgcttatagtgatttaacggataaaacactattccaagatttcactcaggaaacaatatga

SEQ ID NO: 75710 - DNA, 2088 bp, Streptococcus suis; identical to SEQ ID NO: 71734

SEQ ID NO: 75711 - DNA, 1818 bp, Streptococcus suis; identical to SEQ ID NO: 71901

SEQ ID NO: 75712 - DNA, 1836 bp, candidate division WWE3 bacterium GW2011_GWE1_41_72
atgtatatttcacacataaaaattaataattttcgaaagttttcaactgaattacgcttagatttaagagatggattaaacgtgctgattggagaaaataacttaggcaaaactgcaattgtcgaagcgcttagtgcctgcctatcaataggcgatgtatctaaacccgttaggattgtcaaagaagattttcatgatcaatctaaacccattgaaataacgctaacttttagtagtttatcaacagatcaacaagccgcatttctgcaaggacttcaattgaatcataattctatagaagatgcacaactgatattcagatttgaatttacttggagagatgatcgtccaatcctaaaaatattttgtggtgagacgcaaaatcaaataaaacttcagggagatgacttcttttcatatcttacatgcacatatttgccagcattacgtgacgtaaatagtgagtttaaagtaggtagaagtaatagaatttgcacaacagttaaatcaagattcaaattggatgacgataaagaggacaagcaatttatgtccattttttcacaagccaatcagtcggcaattaactactcttatcgaaatgaggttggtgaagaggttaagccaattcagaactatcaaacagatacaaacgaaaacattgcaaaattgtcactcgataatgatgacaacaaaattagtttggcttttgttgatacgcactttgatcatttgctaagagggctcatcatgaaaactaatggtggtaaccttgatatttacaggaatggtttgggctacaataacttgatttatatttcaacaattcttgcagatttggctaaagcttcctcgattcaaactcaagcttatcattgtttaatagttgaagaacctgaagcgcatcttcatcctcaattacaacgccttctacttggctacattaaagaaaacttttccggtatacaaatcctccttacatcacattccccaaccatagcctctgatacaccacttgataaattggcgataataactcgtagtaataatggtatagaaggtataacggttgctacattaattccaaatttaacacatcaaaatttacttcaaaggtatctagatgtaaccagatcacaactattttttgctcgaagaatcatcttcgttgaaggtattacggaagcgatgcttataaaagcattctgggattactattttaatgatttagaaaataaattcgaccgtaaaggtgtagaaattgtaaatatcgatggagtgtcttttgagccatacatggatttggttaagaatgtttattccaaaaccaatgttaaggttgcggttataacagatgatgatagaggaacaaattgcgatgaaccaatgcgctttacggatactgaagggaagctaaaaccaactaagcaaatcaaagaaatattcgataacgctccaaaatcatctagatactcaaatcttgaagctatggtatctggtcttcaccaagatggttgtagcattaacatttttggtgcaagaaaaacctttgaaatagaaattgcaatacagcctgagcaaaatttaaacttaattggaacatttgctgaaacagaattcactgacgagatgaaaaaagatttaaatgtagttggaattgaactttggaaaaaagtaagaaacgacaaaacgaaattttctgaaaaagtattaggctggttatcaactgagaatagagataatagttttgttgtgcctcaatatattaagaatgcttttgatttcctagttacagaaaatgaaaactccgacaattcaacaattggcagcaattag

SEQ ID NO: 75713 - DNA, 1761 bp, candidate division WWE3 bacterium GW2011_GWE1_41_72
atgaaaactccgacaattcaacaattggcagcaattagccagcgaaataattttattttaaccgcaatcccgggtagtggaaaaacatttgttgtgggaaaaagaattcacgatctacattcaaccgaaacaattcttccatatcaaggaattgcgacactttcattcacaaataacgcttcaagagaaaccgaggatacctattatcttactagtggcaaaagaataaagtatcctgattttgtgggtactattgatagttttttaaatcagtttattgttacgccatacgcacacctagtaatgggcgaccgaactaaaccgccaacaatagtgtcaagtaatgattttctatataaaaagtatcctcaaatgaataagtatgctcgtgcgtacacacccttagatgtcacttatagagtcgatggtagtatcactcactctagttccggtttcgaagaatcaatgaagcaaatgatgcataaaaacaatttgttaagtttgggagatattagttactatgcgatgaagatattagaaacaaccgacatagcatcacttttgattaaaaggtttccctacatcatgatagatgaggctcaagactgttcagatgttcaaatgaaaattatcgatatcttagttggtacagggcatgaaaatataatgttaattggcgatcctttccagtctatctatgtttggagaaatgcgagaccagaattatttatcgacaaagttaataattggaattcattgtctttagatataagtcaaagaagtggtaatgcgatatgccagctacttaatcggtttcatcaatgtgaagaatatataaaaccatgcaactccgtgcaagattgcagagttgctgtgatgagtactgagaatctagatgaagtgaattcaaccgtaagaaacttttttgaaaaatgtgaagaaatggaaattaatgtaagcagggaaaatgtggggatattgtgcggtagcaacttcctagtaagcagcttttcaggcataaaagaaagtaatatgtacaatctatggaaagcagatatagcttcttgctgctcgttgcctattcgtgcaaagtcaaaattttttaaggcggattatacgggcgcaatgaatcttcttgtaaattacttttattatcaagtgaatcattcattgccaaaaaataatgatgaattagaaagaagtggtcttttattgatagacaggaaggtcttaatatggaattgtctaaataaaattcctaactttgaagtagacctagatacatggatattccaggctaataatgtaatttctgaaacagcaggtttactaggaattgaaattaaatatcctttaattaaaaaaagattccgcaacggagaagagccatcaggagtcatgacatcgtggctagtggaaagaaacgagtcaacttataagattgcctcaaaaatgacggtcgaaactattcatcaagcgaagggtaaaagttatgatgctgttttagttccatttgttgctcggagtcagaaagtaaatattaataagctaattaacgccttatcttgcaaaaacttatttagggataatactagtgaggatgagcgctgtatatatgttgccttttcaagacctaaaaaacttttaatgatatctgttcctaaagatgaacatttatctttatttgacggctctgcacaggtaaagcctgaagaattagatactgtatcgacttctttctcaaaatcattagctttataa

SEQ ID NO: 75714 - DNA, 1836 bp, candidate division WWE3 bacterium GW2011_GWF1_42_14; identical to SEQ ID NO: 75712

SEQ ID NO: 75715 - DNA, 1761 bp, candidate division WWE3 bacterium GW2011_GWF1_42_14; identical to SEQ ID NO: 75713

SEQ ID NO: 75716 - DNA, 1770 bp, Parcubacteria group bacterium GW2011_GWF2_45_11
atgtggatttcaaaggttacaatcaaaaattttagaaaagttccttttgataaagaggtagtcatcaattttaaagaaggactaaatttaattattggtgagaataatatcggcaaaacaaccataatagatgcactttcgttatgtctaagttatggcagtgttgaacgaggagtctggttaaaaaaagaagattttaataatcctgattcgccgattgagatttcaatagaattcagcggcttaaaacttcagcatgaagcagcattcttgcaggcgcttgttattgatgacgaagaaaaaaataatcagctaagatttattttttcttttgaattgaaagatgaaaaagtccagccgcaaatcaaatgcggcgaactcgggttaacttctaatccatatgatttattgaaatatcttagggcgatacacttgcaggccttacgtgatgtgaatttggaatttcagcctggttataaaagtcgtattaccaaaatagtaaggaaggagtttcctgagtgtaaatcttttgaagaaatctttaaggatgcaaatataaaggctttgggacatcaaggtgagaagaatcccgtgagggttttagaaggtcaaacaaatcaaaatatcgcgaagctttctttaggcagtgataacaataaaataaaactggactttgtcgaacaggaatttacaaaaattttaacaaacatagtaatgaaaactgcggaaaaagggcttgatataaaaacaaacgggttaggatacaataatttaatttatatttcgacaatcttgactgagttgaaagttgaagaaaaatatgaatctcatatctttaattgtttgttaattgaagaaccagaggcgcatttacatccacaattgcaagccttactgctggattttctacaggccgaatacaaaacaatacaggttattctaacttcacattccccgacgcttgctgctgcggttaatttcaataatttaacgattttggctaaatcacatgaagttatgaagagcgtattaataaaaaatactgccctggaaaataagaataaagcctttttgcggagatttttagatgttacgaaatctcagatgttttttgcaagaaaaataatttttgttgagggtattaccgaggccatgttgatgaaagcattttggaattatatcttcaatgatattagaatgaaatttgatcggcaaggaatagaaattgttaatattcaaggtgtggcctttaaaccttatgtagatttaataaagaacgtttttgctgaaaccgacgtgaagagtgttttaattactgatgatgataggggatcgggtaaaagttgccctgtcgataagcgctttataatcgatgatcagattcgaccaacccatgagatagtaagcatctttaatggggcgcccatttcttcaagagccgtaacattaaagaatgaagtggaaaagttgaataaagaagggtttagggtgggtatattcttatcacagaaaacttttgaaattgaatttgccctagcaaacgaaaagattcggaaattatttaagaatattataccgatagccgagtcttctgcaatgcttaaacttaattttgctattgatatttggagaaagatcagtgaagaagatttgaaatccgagttcgctgatcgaatattgcgttttatcgggcgtgcttcgaataaaaaattaggtattcaaatacccgattatataattcgagcttttaattttctaaaagatgattaa

SEQ ID NO: 75717 - DNA, 1752 bp, Parcubacteria group bacterium GW2011_GWF2_45_11
atgattaaccctacgccggaacagaatatcgcggtagaccaaagaggtctgtgtgtactttctgcatgtcccggaagcggaaagacttttacggttgcccaccgcattaaaagaatagtcaatgaaaaacgattattaccctatcaaggcgttgttgctttgtcattcaccaatattgctaaagattccattattaaagaatactgggaaatatccggtaaacaaataggtagccctcattatgtcgggacgattgatagctttttaaacaatgcaatttttaggccgttttcgcataagttaatcggcaatggaaaaaaagaaataaggatccttgatgttcattcagattggctcaacatcgtttatcctaagtcagcgctattcaaaatcaacccacataacataacttttaatatgaatggagagattgtttatcaaacacgaaagttggtcgaaggaaaacagcaagaatatattgaatggctaaagaaagatttattaaaaaaatgtattgttacccaggccgatgttaactttttttgttacgaagttttaaaaaaatatgcgaatatatgcagggctttaatcgataaatatccctattttattattgatgaagctcaggattgctctgcggttcaaatgggaatagtagacttgctcgttgcgcgtggtcatgccgaagtcatgttagtcggcgatgcctatcaagctatttatgagtggcgagatgcaaacccacgtctatttgtaaaaaaagagacagaaaataattggcaaaagaaggaacttttgcacagtcaacgtagtggaaaggtgatatgtcaattcttgaataaattccataataatagagctattaaacaagatgttgctagggtagagctaaatgatgcagaggtaaaagttgttcattgtgttgatagacgaattctttgcgacaattttctagaagatgtcaaaagaaaaggtatccctatccgaaaagaaaaagttgcaattttgtatggcggtcatgcctcaaaaatcaatttcagaaaaacgaatattgatccgtttaatatttggaaaaattcagatgttggccttactaatacacgcaaggtctattcattgccacttttaagcaaaattgcttttattgaaaagaactataaaaaatcatattcctatcttgagaaatttttctattatttaattgaaaaaaaacatctggtttcatccgatgatgttcgagggcatttgttggatcgtatcgaaaatagggtagtcctgtggaatttatgtactaatttaccatctttagagacagagattgatgcttggatttgtaagactaatgcgttgattttcaaaacagcacagcaattgggaataagttcaagaattgaaattaagaagacaaaaaaggtcactaactttaatatttatcatgaattatttggaaccattgcgccatttaagtctataaataatgttaccttagagaacgttcatcaaatcaaggggagaacatttgacgcggtcatggtttttattgatagcggaagaggagattttaaactgtccattggaaaattagaaaaaatcttacaacataaaaatttattgagcggtgattatcatgaagatggaagatgcttttatgtggccgcgtcaagagctcgcaggcttctctggatagccagcgccgatagtaaaatagagaaaatattcaatgacgatttacgtaactgtctccggatttga

SEQ ID NO: 75718 - DNA, 1983 bp, Pantoea ananatis
atgataattaagagtttagatataaagggttttaaaagttttgactctgatggtcaatgtgtgagtcttgattcatttactagtttaatcggtggcaacgggactggtaagaccgcattgttactagcattggttagaacgtttggtatcaaaggctccgacagggtaattctggctgacgacttctatgtcccacctggagagaaaattgacgataaagatgagcgtaattttactatcaaagtaagatttgaattccctgaactcaaaaatggagaagataatagcgtatcggacttttttgcacacctgatctctgatgggattgatcaaacaccctattgtactgctaaattaaaagctaaatggataaaaactaatttagctgggggggatatagaaagtgaattagtttgggaagtaggaggtgatgagaggaaagtttcagcttacgaaaggtcaagaattcatgttcactacgtccctgcctatagagatccttcaatacaattaaaacagaccgcagggacaataatgcatagacttattagtgctgtagagtggtctaaagatatagctattaaaattaatgaaggtgcaaaatcaattgatgatcaattccaaaatgagactggtattaaaactatctcgacctcattaagtgaaaactggaataaattgtttacaggggggtatttcgaaaatcttaaggttcaccctgtaatgaatggggttgaagatatattaaagcatatcgatacggtctttttacccactcctgatacacaaccattatctaccgagagattaagtgatggaatgaagtcattattttatttatctcttgttaaatctgctttcgacatagagagtaatgtcatcgatggtgctgatgaagatttagcaatatcagtagatgcacttgagccgcctgacttaagcttaatattagttgaagagccagaaaaccatttatctcctcaatactttggtaggatcgtgagtctttgtaaggatatatcgtctaataaaagggcgcaggtattcttgtcgacccactctccagctttattaaacagggttgaaccagagaatatacgatattttcgattgagggaaaatcaaaacacaatagtcaaagaaatcctgttacctgaaaaagatgaagatggagaaaatatagatgagtttacatacattaaggaagcaataaagtcttatcctgaaatatattttgctaaattggttattttgggcgagggagatagcgaagagatagtgatacctaaactagcagaggcaaatggtattgcacttgataattcactaataacttttgctcctttggggggcagatatgttaaccatttctggaggttgttgagcgaattatctataccatacataacccttcttgattatgacagaaaaagaggcggaggaggttatggtagaatcaaatacgctttaaaacaacttatctcaactggtgttgaaaagagcgagcttttaaagctgaaagacgaaacaattctttctgatgatagactggaaggtatgcacaattgggttgaaaatgagaatacagaaagttcatggattgaatatttaaaaaaatataatattttcttttcttatccgtatgatttagattggattatgcttaaaagtttctttgaagaatataagtcatttgctccggctaatggtgggccgttgattccttctgaagatgatgctgaaaagtacaaattaagaacacaagcggcaatagcggctgtgttaaaaaaagaagttagtgaaattgacatagatatgtttactgaacatgataagtactattggtatagatatctgtttcttggaagaggtaaacccttatcacacaactatgtattaaagaaaatcaataatggcgatttgaaagaaagagcgccagaagtattgaatgagttgatttcagctatacaggagagtatctaa

SEQ ID NO: 75719 - DNA, 1839 bp, Pantoea ananatis
atgtcttggatagatgatgagaattgggcacttaaagatatacaagaagttgaacaggaagctatgcatgcaataaagaattttcgtgataatagtttggtagtagcaggtcctggtgcaggaaagacagagttattagctcaaaaagcatgttttctaattgaaacaggcaagtgcaaaaataaaaatatactttcgttatctttcaaaaaagatgctgcaaataaccttaaagaaagaatatgtgcgagaatagataaaattcattctaggaaatttgaatcgacaacatttgatgctttttgcaaaagtattctagacaggttttatacatcacttccagaccaaataaggcctactgttgattatgaaatagtattgaacttgaacacaagtgaatttataaaagagataaaaaataatggtgttggatttcagggtttaactgcaatcgagctaaataaaatccaacctaaacgatttgaggaaaactatcttcttaagaatataagtgatcatgatcatactgttgacgcaaggatcacaaaatttacgtggcagtatttattaaaaggaaaatcaaggttaacctttaaaatgataagtgtcttggctagatgtattctagaaaaaaataaaaccttatctaatgctattatctccacttataaacatgtatttattgatgaatttcaagatactacaaatttgcagtataatttattaaaaactatattcttaaacactgacataacaatcacggcggttggtgatgataaacaaaggataatgggttgggctggagccttgacaaccatttttgatgattataaaagagatttcaaaataaaaaattcgaatgtattattgagtaacaggcgttctaaaaataatttaattctcttccaaagaagaatggaaaaatttatggctggagaaatctcaggcgaaagatttaagccggtagttggcgagggtgatgcaagaatacttcaatttaataatagtctagaagaaagtgaatacttaaagaaagttattgagtattggcttgaagatgttaatcatagagatatttgtgttttaatcagatataatgctaaacaatatactgatgttatcataaattcgttagccgaaaataatatcaagtgtaggtttgagaatgaatatcaagatctacttaatgagccagttgttcaattagcattaaaactcttgatgcttgtttatggtaagaaatcaattggtgattggaataatgtcttagctttattttgtgatattaatggtgcaaacagaagaaacgaagtcgcaaaattagaaaggaagctatctacttttatcaagggtagtgtataccataaaggtgaagtggttgactatctgtatacactccttaatatttttggagtatccgaactaaaagctgtttttcctcaatattctcaaggtgattcgctagagtttcatattgttaaatttgcattattacttgaaaaattaaatgcgagattagattttaaatatgccttggaagtgtttttgggagaaaatgtgatacctataatgactattcacaaaagcaaaggtttagaatttaaaaaggtaattattcttggtgttgagccagacgcttactttggaaatgaagaagagcaaattgagaatcaaaagacaatatttgtcggtttttcacgagctattgaggaagtgattataacaaggtgtttttatagagaagataagtatacaagagtttgggagcaagactttaacagaattcctttgattacaaatatgctcaaagatgctggtataaatgtatgtaatgggtga

SEQ ID NO: 75720 - DNA, 1797 bp, Agrobacterium sp. LC34
atgaaaatctattctgtggccatcgagaactttcgtggcatccgcacggctacaatcgtgttgcccgatcatgcggtgctcatcggtgacaacaatactggaaagtcgtcggtgatcgaggccatcgacctcgttctgggaccggatcgcctcaaccgtcgcccacccgtggatgagcatgatttctggcagggtcgttatgtcgccgccctgccgaagggcgagaacgccatcgagggcgatgctcccaagatcaggattaacgtcactatcgttcacctatccatcgaacagcaggcgcggttcggcggacatattgagtggctgaacgtcgagaccggcgatctttatgcagaggctaacccagcaggtgtcgatgccgccgcaatcgtggcagcgttgcgcgtaacattcattggcgaatacaacgtcgatgaggatgatttcgacggcaacacctactacacgcgcagtctcacggaggacgatcccccagcgaccttctcaaagaaggacaagcagcattgcgggttcctctatctgcgctcgctcaggaccggatcacgcgctctcagcctcgaacatggcagcctgctcgacattatcctgcgcctaaaggaaatccggccgcagatgtgggaagcaaccatcgcgacgctcgcgggctttgacgtggcgagtgacccggagctggggatttccggcgtgttggaaagcatcaacacgtctttgaaaaaatatgtcccgcaagaatggggagcgaagccgcgcctcaaagtatccagcctcacccgtgagcatctgcgcaaggtcgtgaccgcgttcatagccacgggcaacggcgaccatgcggcaccgttctaccgacagggcacgggcaccatcaacatgctggtgctggcgatgctttcgcaaattgccgaggacaagcagaacgtgatcttcgccatggaggaggtcgagaccgcgatcccgccctatgcgcagaagcgcatcgtgcatgagctacgcaagctctccgcgcagtcgatcatcacctcccactctccctatgtgctggaggagttcgggctggagcaaaccgtaattttggcgcgttctgacggcggcgatctcagccaagcgaagatcgcgctgcctgacagcgtgaaacacaagcgctatcgtcaggagttccgcacacgtttctgcgaagggctgctcgcccggcgggtgctgatcgcagagggcgcgaccgaggcgaccgcctttccggcagcggcgcgccggctagcggagttgaacccggcaatctattcatctctggaagcgttggggctgtgcatcatcgacgccggtagcgaaagccagattgccgatctggcgttgctttaccgaggtcttggtaagcggaccttcgcggtttgcgataagcagaccgatgccgccaaaggagctatcgaggcgcaagttgagcatcttttcatgcacgaggaaaagggtatcgaggatctggtgctgaacaacacaacggcggccgcgcttgggcggttcgcagagatgctagattggccgccgcatctactcgcgcaatatcctgaccccaaagcccaagctgtcgccgctcttaaggcatattttggctggtccaagggaaattggggaattgcggagtttcttgcccaatgcacggaggcagagattccgcaatggatacgcgatgcctgcatcgaactgcgcaagcgatgcgatcctccgccggcgccgccggcggcgggcgctaatggtggcgacctgttcgctgacatttttggctag

SEQ ID NO: 75721 - DNA, 1824 bp, Agrobacterium sp. LC34
atggtcgagttgacgaaggcccaacagcatgtgcttgccacggacggctatcaactcgtcaccggcggccccggatcgggcaagaccacggtttctatcctcaaggcagcgaagatcgcgcgtgaggcattgcgaccggagcaacgtatcctttttctcagcttcgcccgtgcaaccgtatcccgcgtcttggaggccatggatgaggaaagccggatttcacgagacgagaagcgacgtattgaggtggacacctaccatgcgttcttctggcgcatcctcaagacgcacggctatctcgtaggctttccgcgccggctggcgattctgacaccacctaacgaggccatcgccctatcggcggtgcggagtggctacaaggccaactccaagctcagtgacgcggagaaggccgaaaagaaagcgcgcgaagaggctgaacggaaccgtctggcgaaagaggaaggccgggtctgtttcgatcttttcgccgaccgggttgcgacgttgctgcatggttcggcgaaggttcggacactgatctcaacgatgtatccatttatcatcctcgatgagtttcaggacactagctcggatcaatggcgcgtagtccaggcgcttggcgcgaacagcacactaatcgcactggctgatcccgagcagcggatattcgacttcatcggtgctgaccccgaacgcttagatcattttcgcgccgcgtttcacccctcagaacatgacctagccggagacaaccaccgcagcaaaggcaccgaaatcgcgctgttcggtaacgatgtgctgagcgggaaattccggcaaagcaactacagtggcatcgcttttcaggggtttaaatcgaaccagaaccaagcctttgctagcttggttggtcatgtgctccaagcacgcaagcggctgatagacagcggcaaacctgattggtcgctcgcgatccttgtgcctacgaagaagatgacccggttggtgtcggatgtgttgcgtgagccctttgggcaggtgccagcaatcggacatacggcggccgttgatatggatgggccgattctcgcggcggagatcgtagccttcctgcttcaacaggggcgtcatgccggccatttcgacgaattcttggacctgctctgtagttactaccatggccggggtggcgcagcgccgacagcgggcgatatgacggaagcggcgcgtctcaatgcagcgctcgggaaatggaatcagtgcttggcagtggggaaggcacctcccaaaaactccgtgctgaacgcgactgcggcggtttatgcgaccgccctagatgttggcctgaccggcgatcctgaccgcgattgggctgcgatccgcgcggcgttggaggccggcggttgtgcgagattgcgggcgatagctggagacgttcgcaacgtccgcctgcttgagcgcggcacccagcttcggcagggcttaacccaagattggcgagataccggcggctatctcaatgctcttgccatcacgcggcaatcctttgtgcaggagcattttgccacggcgcacaagccggaaaccggcgtggtggtgatgaatatgcacaaggccaaggggaagcaattcgatgaggtcatcatcttcgagggatggccaaggcgtgcaaaaggcaaggtcgtggccaacttcgaccggatcgtgcgtgagaatattgctgccgggccgatggtgcaggctcgacagaatttccgcgtcagcgttacacgcgcaaagctacgcaccacaatcctcacgccggaggatgatccttgtgtgttgctcacggcatctggatag

SEQ ID NO: 75722 - DNA, 1788 bp, Rhizobium sp. LC145
atgcgtctgagcaagttgagcataagaaatttcaggaactttcaatctatcgatattccactatctggcaatgtcgtgctgcttgggcagaatagagtcggaaaaagcaatctgctgttcgcaatccagctcatactcgatccaaccctgcctgactcggcccgacaactgaagctgaccgacttctgggatggtgggccggccgatttcagtggacccattgaggtccatttggagctctcggatttcgctaccgacatggccttgactgcgcttttgaccgattttcgcgccgctcacgatccgacggtcgcgcagctcagctacgtcttccgcaagaagtccgacatcacaggcgctccgcaatcaagtgccgattgtgagtttctcgttttcggtggcggcgacgaaacccgctcgcttcctagcagggtgcgtcgccgcatcgcgatcgagttattggacgccttgcgcgatgccgaagggcaattgggcagctggcgcaattcgccattgcgccctctgctcgaggatgccgtctccgggatcagccgcgcggacatcgacgcagtggctgccgaactcgacaaggcgaccaagacgctcgaaacgtttccgacgatcaagacgctggaagatgaattgcgggcgggtatcgtccatctttccggaaaggcacacgacatcgatgctcgcctgagattcgcgccgaacgacccgctgcgcctttttcgggcgattgcgatgttcatcgacaatggaaagcgtggcattggggatgccagtcttggctcggccaacgtggcgttgttggctttgaagctcgcagaattctcatggcgccggaagaagaacgaacgaaacttctcgctcctttgcatcgaggagccagaggcgcatcttcatccgcaactccagcgatccgtcttcaagaagctgcttggcaacgtcgacgcgtcgcagtcgatgatcgtcaccagtcattcgccgaccttggcagcagtcaccccgttgcgctcaatcgtccagttgaagaagcaggctggggcgacccaggcattctcgttggcgaacctgccggtaacgccggacgagatcgacgatcttgaaacgtatctcaatgcgacacgcgctgagctgctgttcgcccgaggcgccattttcattgagggagacgcggaggaagcgctcctgcccatcttcgcctcatcactcggtcattcgctggatgagcttgggataacggtctgcaatgtcggcggggtcaacttccgcccctatgtaaagctcgctgaagcattgaagcttccctatagcgtgatcaccgactgggatcctctcgatggcaccaagcctcctctgggaaagaagcggactctggatctctggcaggatatactcgcggttcgcggtctgccgctcctcacgcctgcgcaactggcaacatgggagccaatggaccatgccgcgttcagcgtgaacgcagcaaaatctggcatatttctcaacgatcaaacctttgaagtgtctgttgccaatacgcccgtcctgctgaaaccgcttctcgatatcctgggtgagcaggactttggctcggtgcgaacgggacgcatcgccgcctggcgagctggtgcggcggtcgatgccccacaattgcttgccatgatcgccgacattggcaaggggcggctcggcgcccgcctggcgaagaaatccgtaggcctcaagccgccggcctatatcgaaagcgcgatcaacgcgatcgttggattggttgctcatgtctag

SEQ ID NO: 75723 - DNA, 1782 bp, Rhizobium sp. LC145
atgtctagtgatcgctcgcttcttcaggccctagcggagctcaagtcgaacccggaacagtcggccgctgtcgttgaaaccgggcattgcatcgtgctggccggtcccggaagtgggaagaccaaaactctgaccacggctatggcgcgggttttggcccaagacgtcgccgaaccccgaggtgtcgcctgcatcacctacaataacgagtgcgctatcgaactcgaaacccgtctcgcccgccttggcgttgttcctggagatcgcgccttcatcggcaccgtgcacggctttgcggcgagccaggtgattggcccctatgcccgctgtgtgccaatcggccttcctgcgaacttcagggttgcgacgcgattggaagcgagagctgcggtggaggtcgcgtacaggaacgccatcaacggtaccgacaatccgcaccagcgttgggagttcgcgtccgagaagcgcaagcgcgacgttgatcgttcgcgtcctgaatggcgtgggcgcaatcccgaactggccgctttcatcgagacctatgaggcggaactgcggcgacagggtctgctcgatttcgatgacatgccgcttctggcctatcgcatgatcaaggaaaacgtctggatccgtgaggcacttcgcgcgcgtttcccggtgttgttcgtcgacgagtatcaggatctcggccatgcgctacatgaactcgttctgctcttgtgctttgagggcggaatccggcttttcgccgttggcgatgctgaccagtcgatctatgcctttgccggcgccaatcccgaactcctcgaaagccttacgcgccgcacggatgtgcggaccatcaaactgcggttcaactatcgttccggcggaaaaattattcgcgcgtctctgggtgcgctcggtgaagaacgcgactaccgtggcgtcgacggcgcgcccgaaggagatctgagcttctgggaggcgccctatggccttgactcgcaggcgcaagtcatcgccgatacgatcatcccaaagcttatcgagcaaggattcgagcttgggcagatcgcggtcctttaccgagccgcgtggctcggcgacaaggtcgccaccgtaatgaaagatgccaacattccctttgttcgaaccgacaccaacgccctggttaggagaaactcgcgccttgcgcgcttcattgaggagtgcgcgcgctgggcgaccggtggttggcgtgatgccgatccaccctatgcgcggcttttgtcgcaggcgatcacgcttgtgttcgggcggcatgccagcgaaggcgaggaacaggatttgtccgcgcagcttatggcgttcctgaatgcatcaatcgggactgcggagacgacgcatgcgtggctgcagcgtttctcgcgagagctcataacgccatggagtgacgttgcgcgaaattccgaacaagaatggcaactctgcgacgaaatgatcgccaatacggatccggcgcgtgacctcgatctctcgctggcgcacttcgctgggcgtatcgaaggagcagggcgcgttaacctcagtacactgcatagcgcgaagggcagggagtttgacgccgtcatcatgtacggggtcaacaacacagatttcccgagcgatcgggataaacgcacaccggccgggcttcgagaagcaaggcgcttgttctatgtcggcgtgactcggccgaaaaaacacctcagcctggtttttcaggagcagcacttttccccttgggtccttgaactgtttcaaagaagccagaaagaatag

SEQ ID NO: 75724 - DNA, 2139 bp, Achromobacter sp. LC458
atgcacatctccaagcttacgctggttaattttagaaatttcaagagcaccaagctggcgtttcagcgtggtgtcaatacggtcatcggagagaacggcgcgggcaagtccaacgtccttcgcgccattcggctgctcctggacgacaacatggtccgcgcagcttatcggctggacgaatccgatttcagccgcgcgctggattattggaagggccactggatcatcatcagtatggagttcgagaacctcagcccggatgaagcggtccaggctctgttcttgcacggcaccgcgggcattcacgccggaccgatctccaaggccacctacaacctgattttccgccccaagaaggaaatccgtttgaagctggcggctctcgactcctttgacttcgctgggttgaaggccgtccgtgacagcatcacgatcgctgattacgagaccatattcactggtcgcagcagcgcggatttcagcgacccggaggtgtaccagcggatcgtaggggatttcgacctgtgcgagtttcccgacgagaccgagttccctgaacttggcgcgaaggtgcccggcttcctgtcggtcaccaaggaggtgtcactcaccttcatccaggcgcttcgcgacgtcgtagcggagtttcacaacaaccgcaccaatccgctgcttactctgctgaagagcaagagcggcgagattgacgcggcggcacttgtccccatagtgggtaaggtacgagatctcaatggttccatcgaagggcttgaggatgtgcaggcggtgcgcatgcacattcgccagacgatcaaggacaccgccggcgagacctactccccgacgtcgttgtcgatccggtcggacctgccggaagacgcggagcagcttttccagtcgctgcggctgttcgtcggggaagcggaggatgggtatgaagggacgatcaacgagctcagcctcggcggtgccaacctaatctacctgaccctcaaactgttggagtttaagtaccagcgcgagaagatggctattgcgaacttcctgctcatcgaagagcctgaagcgcatatccacacgcatatccaaaagacgctgtttgatcgcatcgcctacgacgatgcccaggtgatctacacaacacattcgacccacgtctccgaagtgagcaatgtgagcaacgtaaacatcctagggcggcgcggcgcgttctgtgaggcttaccaaccggcgactggcctgaatcctgcccaggtgacgagcatccagagatatttggacgcagtgcggagcaacctgctgtttgccaagagcgtaattctggtggaaggggatgcggaagagatcctgatccctgcgctcatcaagctggttttgggcctgagcgttgatgaattggggctcagtgtcattaacatccgcagcaccgggttcaagaacgtcgcggtcctgttccacgacacccgtatccgcaagcggtgtgcaatcgtcacagatctagataggcccttcttcgacactgcgccgaatcctgcggataacgacgctttggccgccaggaagcgaaaggcaatcgggtcggaaacggccggagcgcggcgaaagatcgacctagacgcatttggcttaggcaatgcctgggtacgaagcttctacgccacgcacacgttcgaggtggatttggtgaaggcgggcaatcatgaagcgattgtgcgcagcgtagacaaggtctacacggcgccggcgacgattacacaggcaaaggctgaccttcgctcgggcctcatccgtcaaagtggctaccgaaccctgactatggctgagcaggaaggcaagggttggttcgccatcttgctcgcgcaaaccctggatcaccaagccgtggtacccggctatatccgagacgccgtgctgtttgcgcatggccccttctcgcgaccgctggtcatgcgaatcctccggcatcgcatgaaccgcctgtgggcaacagatcccgctgcgcgtccgcgcttggcggcctttaatgctgaggtggaatattttggccgctcagcgctcgatctaccgacccttcgcgctgcggccgcgaccgctttgccaggagacgtggcccatgcgttcctggacgggccgacctga

SEQ ID NO: 75725 - DNA, 1779 bp, Achromobacter sp. LC458
atgtttgtctgggacgccacggagctcaatgcagagcaagcggccgctgttgaagagccatcgagcgtattcctggtcgcctgtccgggcagcggaaaaacgcgcgcgctgacctacaagatcgcctacgaactgtcccgacgtacggacaagcgcatcgtcgtggccatcacctacacccatcgggccgctgatgagattcaggagcgagttgaaactcttggagtcgacaccaccgccctttggattgggactatccattcgttctgtctcgaatggatcatcaagccatacgcgatctatgttcctgagttggcgcgtgggtacgcggtcctggatctacacgaccgggagaagatcctcgagcggctctgcgcaccgtaccgcggcgtgaccgtgtatgactgcgactattacttcgaagaggaccattacctgctggggtgcgccgacatacgaaagcatgaaacgatccataaggtgctggcagcctactttcgagaattggcggacacgagacgaatcgatttcgaattgatcctctggtactcccaggtactaatgcggaatcagccacatatagcagcgctgctttcgcaagttttttcctatatcctcgtcgatgagtaccaggatacgaagcggatccaatacaacctggtgggggccatcctgcgggcgggtgccggcagcaccaagacgttcatcgtgggagatcccaatcaagcgatttacggctcgcttggcggctatgccatttcagtggaggactttcgagtgctcacggacatcccccttagggagatggcgctgcgcttgaactaccgctcaagcgcccggatcatcgggcacttttccaacttcaatgtccacgccaccgacatcgagggtgcaggggaaattgtcggctttccgagccaagtttcttacaaccgactcgtgtctcacgaacacctccacgatgaattggtcaggctcatccaaaagagtttggccgaaggacatgcacccgaagagatttgcgtgctggcgccgtggtgggtcttgctagcgtctaccacccgaaaacttgtggcgcagctccccgagcagcagttcgacggcccaggattggtgccgttcagcaatgatcccgacaacttctggttcaaactctccaagatcttgctaacggagtcgtcgccccaaatgttggtgcgacgcacgcgatgggcccgggacgtcattgccgacctgcgagatttcggcgtcgacacggccaagatcacgcagcgatcgctgctgcgggagtccaactccctcgccattaccgaaacagacggcttggcgtatctggatcaagcgttcgccgcgttgctcaatcgcctggggatcgaaatgcgtgcttttcccgcgctgatggagcatcgtgaggcattctttgcgagctcccaggcgcggctggagaggctgcagaactccggcgccggctacatcaccgatctctcgttcttcaagaaggtgttccgtgaacggaccgggatcaccgtgtcgacgattcacggggtcaagggcgcggagtttgacgtagtcattgcattcggtcttctccagggcatggtgccccacttcagcgattccgacggtgatgttgcagccagcaagctattgtacgtcctggcctcgcgcgctcgaaagcacttgcacctcatctcggaggccggtcgctcacgtggtagatatgggagctacgagcccacggagatcctggcccgctgtgatttcgattacaacggttaa

SEQ ID NO: 75726 - DNA, 1584 bp, Listeria monocytogenes; identical to SEQ ID NO: 73566

SEQ ID NO: 75727 - DNA, 2103 bp, Listeria monocytogenes
atggaagatgaagatgctaatatttttcatcatttagtaagtttaaatggaggtaacgaatttaacaaagagcaagtaaatgctattcgatttgatatgagaacacatcttaggattatcgctggtgctggaagtggaaaaacgcaaacaatttgtgcaaaggcagcttatttagttttgaaagaaaaaattcaagaacgaaatatagtgatgtgcacattctctaaaaaagcaagccaagaaatgaaggaacgtgtcaacgagtttcttggtggcaatagtcgaatagaagtattgactttccatggatggtttcaaaaagagtacaatgtacttattaaaaaatatccgtatctagaaaagtatgggatagcgggagaggtacccggaaaaggctctggaaaagatagccatgataggattttaatgaatttaattaagcagtatcatttatataattttgataaatatgaagaaaaaccaattaatgaacgacttagttattggcgaaatatgggatataatgatgaggaaattgttgcttttatagcaagatattttgatgacaaagaaatattaaaggatcaactacttagtgaagttttttcagagatgttaaaagaattggaacgaattaagagaagagagaaagtcattaattttgatgatatgttaattaatttaaagtgtgtattggagaacgactcaaatgctctttctttaatacaaactcgatatcaatatatatttattgatgagtttcaggatatcaatcccttgcaaaaacagataattgaacttatttgtccaccagattacgagaagagtgttatcaattctactaaattaattattgtaggagacgatgatcaaagtatttatttcttccgtggtgctgaaccacgttacattaaagaatttgatagacaatacaggcaaacgtcaatagagttaatgactaactatcgttctattgctcctgtggtacatataggaaatactctgatatcaaacaatcaacatgatagaataaagaagtctatgatacctcacaaactaaatgaaggtgattgttacgcaaaagtatttcaaaatgaacagctagaagctaattggattgcaatgcggatattaagcttgtcttcagaagagaaaccattccaagatcaaattggtaaaccgaattatacggaaacaatcgtattataccctaataaaaatcaattaaaatctatgattattgctttacaggaaaaaggaattccctttgtcacaaaatcggatgatgatttacttggtatatttggtattaatttttttaaacgatcattcaatctattaatggatattattgatgcagaaacgatagaaataaaaaagcatttatacaagcaactcataaaaaatatttgtttatattattatataccatttgcaaaaagtacagattttgtctcagatgagactaattatacttcggaaaagttaactgattttatatgcaaagaaaagaaagttagtaaaaaagagatggcacttattaaatccatattccgagatattaatgaatttataaaaaccgaagaattgaatattaaagtttttgttaattggcttgtagaaactccgaaagtaaagaaacaattaattgatgaagagaaagattggttgcttaaagaggttagcaatgttaaaacgctaaaagagttaatacttaaatataaagcagcgagaaccttaaaagaagagatggctgacaaattaagagaatatgataataataactataatgcagtgtatctattaacaattcattcaagtaagggattgggatataaaaatgtttttgtaaaaggtatttataaaaactcactaccagactatcgttcagtggataaagaaagtattgaacttcagccgttaattgaacaagcatctccaccaacaacaatggaagaacaaagaagattaatgtatgtagcgctaacccgagcaaaagaaaatctttatgtaacttaccctagagaaataaatgataagcctacacttgtgtcaccatttataaaagaatctaatattatgtttagtgaagaaaaaatatag

SEQ ID NO: 75728 - DNA, 1908 bp, Serratia fonticola
atgtatctgagtaccttagaaatcaacggctttaaatgcttcgataaaagtttctcaatcgaattcaatgatggtctaaatgttttggttggtgagaatggagctggtaaaacaggcattattagtgctatccgtcaactcttcactgattcagagtcgggaaaacgttctatccgggacagggatttctatcgcggcttttctcatggcgcaatgacgtctgaaagtattcatatcgaggcaacgttctccgaactgaatcagaatgaaactacagcctttattgactggtgcggacaggaacctgaggccaaacttacctttacagcaacgaatcgcgaatcacgtggacattaccggtaccagatttggggaggacgccagcgcattaaacccgtagacttcgaggtcctcgatcttatccattgcatctatctgcctccattacgagatgcggaaatcaagctccgtgagggaaggcaatctaggttggcacgccttctaaaggtattgtgccgtcaggagcttgaggagtgtaagaaggctgggacagctcatccactcgaacagcgcgtaggggaattcaatcaagaattgtccgagagtgaagattttgccatcaagcaggccaaccaacggatcggggacaatctcaaggaagcgcttggcatgcatttgtcccaaggtacactcatccaattttcagaggttaacttttctaagatcgttgaaggtctccggttattgtattaccccgatctttcaggtgctgatgcaacacaattccgttcattagaggagaatagcctcggttacaacaatatgttgtatattgcatctattttggctgaactgatcattgatgtggatgatgatacaggtgagaagacttaccttcgcctgttgctaatcgaagagccagaggctcatctgcacccacagttacaaatccgcttgctcaggcatctaaggacggttgcagagactaggggaattcaggtgattattaccactcattcgacagttatctcatcagcagtatctgttgacagtatcattcatctttcacgagttgatcagcctgtcgcagtccctttacatcaatgtggattacctgaagcaagccgccgttttattgaccgatggctggatgtgactaagtcgaatttgcttttctcgaggggagtcattctggttgaaggtattgctgaggcaattgttgttcctgaactggctcgcatcgtgctacaagcttgtggtaaagggcgtgattccctagatgattatggggtttcagtgatcaacttaaacgggatctactttaaccatttcatgcaacttttttgtaatgttgaagggggacagcaggggacgaatattccagtccgatgtgcagggctgactgacaatgatcctcctaaagccattgagaagattgtggatgaggtaggaaaggaaaaagcggtgccttaccttccgcatgctgatggctttcaagaggggaacaatcctgctctgagattgattccacttattgcgcagtcgcaacatggtcgactgtacgcagggaagtacaaaaccttcgaatacgacattgcacttgaaggtaataatctgagcaaaatgtttaaggttatagctaataattggcctacaaaagggggacaagtagaagcaaccttggaggctgctgcagagctggacttctccgaaatgccgaattttgataaagccaattatgcctggcaacttctccaacgtatagattctgatgagatgggcaagggactatatgcccaagttttggccgatgtcttaagggaggatctgggggactttgtagtacccgagtacatttgcgaggctatcctatgggcttgtaacatccaacctgagattgtcacatga

SEQ ID NO: 75729 - DNA, 1743 bp, Serratia fonticola
atgatgattctgaccgaggagcaacaggcctacattaacaccccactcaatgaaaatgtgtatctgagggcttgtcctggaagtggtaaaacggaggttgttgctgctcggataactcaggcaatacgaaattggaaacaattcccgtctggcattgctgtattaacattcagtaatagtgccacagatgagttgaaggaacggttggttgaatatcttggcgagccagtctcacaccctcactgcgtctcaacattcgacagtttcttgtttacgcatatagtagcaaagatcgccagccagataacaggttatcaaggaaaggatggggatttccgtattcggctattagatagagcagctgatatctttcgcactagaacaaaaatctgtgaaaggaaaatatccgcttgtaggtatgactacgatctggacagtaatagtttcgtgttctcaactggtgaactgacagatgctgtattcaacgcagctgtattgagcgatgagaacaaacaagatttaattgataccaaaaaaaggctttggagaagtggatttgcaacctacagagatatagacatgctcgccctaatggcgcttagagacgaggcgttcgtggagtactttgccaggatagtacgccggtttccagtggtggtcgtggatgaatgtcaggacctctccgccgaacagttagctattattagggggctagatcgttttggtatgcgatttcattttgttggcgatcttaatcaatccatttatggcttcagaaaggcagatccagcccgtgtgcagaaactattgaatgatttgaatttcagggagctatcgttgaccgccaactggcgcagtagtcagaccattgttaatctgtgcagtgatttattaaacattcgaagaggggacggtaacccagaaattgaaccgcttaagcctaagctcattcaatatcagaaatgtccttctgaactgatgcaacgaatcactgaacttaccaaaggctatgaaaatgttgtggttgtcgcccgtggtcaccgcactctccagcgtttaacacgcggtagggtattaaatccagttgaagagttagccatgtcgtgtgtgtcggtagaaagtaataatctagaggcagtgagaaatgccattaatacgttcgcccggtggcttgcgtcaaagttagcgctagaagttgtaccgatgagtcttcaccggcccatcgaaattgattcaacattggtttggcggcagttcattttcaattgcctgaagtttctcagtacttgtggtgcctcagatgttgaattgacttggaagcaatgggctgccttaaccaaacaaggcatacgtcagttgtcttgccaacccttcatgttggcagaaatcgcacagaagttggcggatttgaacgaagttaatttaatagcacccaaaggtctaggggctgaaaaattatccactcgcttaacatgtgtagaacaacagcccgtagtatcgcatcgttatgcaactatccaccaagtaaagggggaaacacatgatgcgacagtgctcatatcttccctcaaatcaggtaagcagtctcactggaaagattggcttaatgacccactcgaggaggcagcgcgtttcgcctatgtagcaagttctcgacctcgacatctgcttatatggggagttaaagcacttaaaccgaaggaacataaaagattgattgaacttgggtttgaaattttatga

SEQ ID NO: 75730 - DNA, 2232 bp, Serratia fonticola
gtgaagctgatcaaactacaaatcaaaaattttagatcactaaagagtttacaagttgatatcgaggaatacttgtcgatcattattggcaagaataattctggtaaaacgtcgcttctactggcacttgagcgttttctagtaagcgcgaatccacggtttgagctggacgatttcaatattagttttcaaaaataccttattaatttaatcaagaataaggaacaaccagtcgatcccttcccattctgtggtatctcgcttagactgttcatcgaatatggcagtgatgatgatctagccaacgtcggtaacaaagtcatcatggatcttgaccctgagaatcgctggatcgtattggattttctataccatctatcttcagagaatcttgacctgctgaaacgtgactataaggttcactgtgataagaaagggcttaaagccaaagatgcgctttcgttccttcaggaaaatcataaccactactttaggctcgcacgccgaagcgttcagttcgaccatttgacgaaaaaggtacaagaggatacgtacgtcgatcttatcaaagagggcgttcgggtcgaagagatcatttccttcaagcggatcaatgctcgcagatctgtttcaaacagagattcggatcgaagtttgtcaatgatgtctgcgaaaatatattcagcgatgtcagctgacgtgggtgaggaagaggtttttgacagttttaaggaagctttgagtaacaccgatgttcaactcgatggtatttatgccggccttttcaaagatgtaatttccgatgttcagaaattcggcggcctaaaggaaggggatgctcaaatccagatcaggtcgactttacagcatcgtgaactgctggaggaaaacaccactgtgatgtacgggcagggaatcgaagctcacgttttacctgaaaattacaatgggttaggttatctaaacctgatcagtattatcttcgatatcaaaatcattcttaatgagttcaagcggggaacgtcgccgaagcctgcagatataaacctgctgtttattgaagaacctgaggcccatacacatcctcagatgcaggcaatattcattaaaaatatcaaaagtctagtcggtagagctataactaatgccaatggtatcactagaccactgcagacaatattatcgacgcactcagcccatattgtagcggaatccgatttcgatgatataaaatacttcaagagaagtgatggcgaaactcaagctaaaaaccttagggacttagcggttctttataaagcagttgggcgtaacggacattataaattcttgaggcagtatttgacgcttcatagatcgcagcttttctttgcagataaagcgattttggttgagggggatactgagcgtattttgttatcagcaatgatgaggaaaaaagatcagcttgacgaagcgaaggcatgggaaacaggctctcaactcccgatcccattgctttcacaaaacatctcggtgatagaggttggtgcccattcgcatatttttgaaatatttttggactttatcggaataaagacgctcattatcacagatatagattcagcgattgaagtacctcgtcttaatgacaatgggcagccgaaacttaataaggatggtgagccaattaaagatccccattctcatgcggttacgaatgcgacacacacgacaaaccatgcgcttaagttttttttcggcgtagggtcagaactcgcctatttccttggtcttactattgggcaaaagactgttcgcaagaacgaagtatctcactcttgggaggtaaatcctgatggtcaggtaatgtgcgtataccaagtttcggagaacgatgctgatggcaacgagtatcatgcacgtagttttgaagatgcgttttttcacactaaccgttcatttatgcagaatgcttgtaacgatgacggtgaagttgaaacgataaaatttccgagcttggttgtgaaatatctcaagcagtatattaaaggtggatcttcttttgatatggccgagaaaggaatttcaaaaaagccgtcgttcgcgatcgaaatccttctcaatagtcagtcggagaagttgacgaagtcgaatatgactggtgagacgaaggagtttgtcgttgaatgcaacaattggtgcacgccgcaatatattgaggaggggctcacatggatcaaggcggactga

SEQ ID NO: 75731 - DNA, 1899 bp, Serratia fonticola
atggatcaaggcggactgaaattggaaccggaagttgttgacgtactcaagcacgtcagcgatgggaagagttttctgctcagcggaggggcgggaagtggtaaaacttattctttagtccagatcataggtgaactcctaaggactgatcctagcgctttcatcgcatgtatcacatatactaatgctgctgttagagagatcgaatcccgtatttccaacgagaggctttcagtcagcacaattcatgattttttgtggagcgcgatcagcccctatcaggccgctctacgtacagttttgatcgagttgatgggttgtgagccacccaagattaatcctggtagtactgttgtgtccgacgatatgttttctgggaaaaccattgaatataaagagtatagaattctagatcaggggattatttctcatgatgaaattattattctagctcgaggcatttttgaaaaatatccaaaaattcgagacataatgcgtgataagtttcgatacatattggttgatgaataccaagatactgctcccgatgttgtgactattttgctcgatcatctttctcaaagttcgcgcaaaggagtctgcggtttttttggcgatacaatgcaatctatttatgatgaaggagttggttcgatccaaagttacgtcgatagtaaaatggtggcagaggttaagaagagacagaaccgccgcaatccgcgcttagtttatgagttagcgaatcaacttcgaaccgatggtttgctacagcatgcgtcagaagatgaaaatgcccctaacatgaatgggtctactgccaaagaggggactattcatttctattactcttttggtgagaccgataaactgggtgaggttcgcaagattctgaaatggaacttcgatgaggtattggaaactaaggaacttaatctgacccacaatcttattgcgccccaagctggcttcagtaacctaatggaaatatatgacaaggatggagtcctggcttttagagaccgactagtgagtttcatcaaaaagtatgatgatttagagtgttacgacggctttacatttggagaggttgtaacagcccttcagaagaacaaagctgggaaagagctggcatctgtcagtcctacatcacaaatgcaaaagtttattgatacccatccaggtttacttgatgaagcaaaggagcatgatttcaatgtgttccgacgcatgtacgttgataaagacctgctcatcgatgacaagaagcaaagcgaggaagatattgcacggaaagggtctcaacgatgcgacttcatcaaacatgtattcaagatacagaccgtagttcatctttatgagcaacgacgatacaacgaattcttaagaagaacagaatttcagcttaatcgcgttgatgacaaagtgcggctgaagagatgcattgagacgattggtgcgatgagaaatagtccaatcatagatgttattgattttgcccatgagcacggcttatgcgtcaaagacgaccggttccacgaatttcgtcaacgaaagggttacctttttaacagactcgttggtgtggaatatttagcttataaaaatctttatgagtatctggaaggacgaacggcgtactcgactcagcataaaattaaaggtcgagaatttgaccgtgtactagttgttttagattcaggaggctggaataagtacaacttcaattaccttttcgaaagtaatggcacagatacggttcgtgaacggacacgaaaattattttatgtatgttgcacgcgtgcgaaagacactttagccgtttatttccgtaacccatcagttgcaacccttgtccaagcaagggcatggtttggtgctgacaatgtcattgaggtatga

SEQ ID NO: 75732 - DNA, 1857 bp, Afipia massiliensis
atgtatctcgacaagctaacgctgaacaattttcgatcctttgcggagtcggaaattccgctgtgcaaggatctcactctgcttgtcggagaaaacaatggcggcaagagcaacgcgatcgatgccattcgtctcctgactgctccgctgggtgggcgccgggagatatattgcgagccgaccgatatccggttcggtagtacagaacggaagttcgaactgaccgctaccttcgcggagttgagcccggctcagcaggggcggatgatatcggccgcgaccgacgcggcaatcagtggatgtgtcttcggtctacaatacgacgagacaacggggcgctttccgattcgaccggctttgtgggcggggcatcagcggggcaatcccgagcccgggtgccacgagatggttcgtcacgtctatttgccgccgcttcgcgatgcgaagcgcgcgctcgcctcgggtaatccgacacggatttatgcgttgctgaatcacttcctcgaaggcggtgatccggaggatctggccaaaagcctgcggcgcggcgtcgaggcggagatccttggcaaagtcggcgaagccgtcgaggtcggattgagtgccctgacggccggtgtccgtcgccaggcggcatcgctgggtttcgcgagcgacgagaagctgatcgatatcgcgcgtgacctccgcttcaagctcgccgatcatggtatcgagcccgaagacctccgttactcggggcacggttacgcgaatcttctctacatggccacgattgcggtcgaactcgagaaggttaacgacgccgatctgacactcttcctcgtcgaagagccggaggcgcatcttcaccctcagcttcaggcagcggttttgagtttcctagacgagcaggccgagaagtcgcgcaaaccccgcgaaggccaccaggggccagcgggagagttgcaggtgattgtggcgacccattcaccgaatctgtcggcgtgggttgaaagtaagaagctcgtctttttccgctccttccttccagtgccagtggagggatctaccggtgacgcaggagaggaaccgcagccgctcgccggcgtacctgcggagatgatgccggaaatcgagccgaacccggtcatgccggtcgatcgcccgaggcgggtaacgcgctgcatcccgctcgcagtgctggcgcttgatcctgtcgagcgccgcaaggttgatcgctatctcgacgtcaccaaatccgccttccttttcggaggtcgcgtactcctcgtggaaggtattgccgaagcgcttctgcttcccgtcatagccaagaagatcgtgctgaaggacgatgccgaaaagctacgcctgtttcgatcggccgtattcgtgccgatcgacggggttgatttccagccttacaccaagttgctgctttcgccgttcaacgaggttcggatcgcggaccgactcgtcgtgttgacggatggcgatggcggcgaagtagcggaaggcgcggtcaagccaggcgccgcgcgcaaacgcgacctcgaggcgctcgctgcgggacttggcgcgaccgaactccttgaagtcgtcatcaacgattattccctggaaaccgagctggtccgcgccgacaacgccgccgtcctcaagggggtctatctccagcttcacccacgttcgggtgacaagtggaacgcagcggttgcgcaggctggtgctgcccaggctgtggcgatccaaaagctcttcgagacgacacgcaagggcgacttcgcgcaactccttgcagaggagatcaacaagggcgcggccttcaccgtgccgggctatttgaagacggcgatcgaggccctggtgaaatga

SEQ ID NO: 75733 - DNA, 1722 bp, Afipia massiliensis
atcgcaaagccgttcgagccaaccgacgagcagcagcgggtgatcgagcatataggctcggcgttcatcgcggcgtgtccgggcgcggggaagacccgcgtcatggtcgagcgagcgcggaggcttcttagtagtgggccaccgggtcgcggcattgcctttctgtccttcaccatcgccgccgtttccgaactggaggatcggctacgccgggagggcctggtcgagacgccggcgtttccgcacttcatcggaaccttcgacgcgttcctctggcaattcctcatcgcgccgtttggtgtcgatggctgcgacgccaagccgaagctgattccggacaaggacgatcgatcgattcagccgtttcctgccgcgcaggccctgccgctggaatgtttcgaccgcgtgacgggagacgccatcccggccatgatccagcgccacggctttcgtggaaggatcaacgcgcacgagacggcggcgcgaaacacgcgcgcgcactttctggagcgcggcgaactcgacttcgccgacgcgcgttccgtagcgctcgcccgactgcgcgatccggtatgcggggcggtcttcggcccagcgtttgcggcgcgcttcctcgagctcattgttgatgaggcgcaggactgcaatccggtcgacctggagatcatcacctggtttcgcgcggtcggtgtgccggtgaaggtgatctgtgatccgaaccaggcgatctacggctttcggggcggcgtaacgcgggaacttggtcagttcgcagaaacgttcggagaggccgagcgactgcccatgaacggaaatttccggtctagcgggcatatcacgaaaggcgtggcggccttacgtgcgaccaacatgcgcgccgcaatcgacgaggcgctgggagagcatcgcgaagaaccaacggcggttcagatcctgtcctattcgggcaggggtgtcccatcgacgatcggggcgaaattccaggagctcacggcagcaatgggactcgcggcgcgagattgtcccgtcgtctcagcgacccgccgggccggcgcaaacgcccttggccatcctcaggattccggggtccgggacctcagctacagactggcggtcgccgtgagcgatttccacttttcgttcgagcttggcggccggaaggaggcgctcgtcgccattcaccggatcatgctcgaattgggcggccgcatgggcggaaagacctatcaccagcatctcatagacgctgacgtggcccccgatgcgtggcggccagaagcactcgctttggttcagacgctccgcttcagcccggagcggttcgcgaccgccgaggcatggcacgacgaggcacgccggctgctggcgccgttgcttccggccggcggccaatccatcaatcagcgtcttcgccgtaacggcgagctggcgagggcattggcggtcgcgcctgcgaccggccatccggcacggactatccatagcgtaaaggggatggagtttcctgcgatctgcgtggtgatgtcgccgagtaccgcgaagggcatcgtcgattttctggctagtgatgctgcggacgacaatgaggaagcccgcaaaatctatgtcggtgcatcgagggcgcagcgactgttggcgatcgcgttgccccgtacccaagcccctcgcttgagggatttgatgacggggatgggcggcgtggtcgagctcatcgcactgtag

SEQ ID NO: 75734 - DNA, 1953 bp, Pseudomonas amygdali pv. tabaci str. ATCC 11528; identical to SEQ ID NO: 71966

SEQ ID NO: 75735 - DNA, 1668 bp, Pseudomonas amygdali pv. tabaci str. ATCC 11528; identical to SEQ ID NO: 71967

SEQ ID NO: 75736 - DNA, 2139 bp, Enterobacter aerogenes; identical to SEQ ID NO: 74086

SEQ ID NO: 75737 - DNA, 1785 bp, Enterobacter aerogenes; identical to SEQ ID NO: 74087

SEQ ID NO: 75738 - DNA, 653 bp, Enterobacter cloacae
gcatcagtacagcctgggacgatatgggatatcggatgagtatcattccggcagaagccttttttgccagtgcggtacttttggttgaggggccttcagaagtcatcttttatactgagcttgctaaggcactagatctcgatctcgatctccttaacatcagcattctgtccgtcgatggcgtgcagtttgaggtttacataaaaatactgcaggccctacacattggctgggtggcacgcacggataatgatgtagcgaaggtaccacacaggcaggagtggagttataccggcgcaaaccgtgcgctgacgctatgcgggctgtcaaaaggcggacatgtttcccacgaaatcacgtcacgggaacggcataatgaatggggaagggttactcccctcattaacgcaaggggggtatttctttcaattactgatcttgaaggcgacctctcttgtgattttactgcgcaccttctggatttctcaggggcagcagatgctgatgccgcggctgatttcctccgggacaagaaggcgataaaaatgcgggcattactgaagcacaagcggcaattcttagctgagctggctgataaagatatcgcccgtccacttttagcagttcaaaaactggtgcggggtgagaaatga

SEQ ID NO: 75739 - DNA, 1620 bp, Enterobacter cloacae
atgaagctgactgctgaacaacaggatgctgtagagtttacggaaaacctcgtcatcacagcctgcccgggaagtggtaaaacaacaattcttacccataaaatttcccaggtgctgacagattgcagagcgcatcagggtgtggtgtctttatcttacacaaataaatccagcgatgaactcaaggcacggtgcataaatttaagcaaagacataaaggccagttttttcgggacaacagataagtttttactgagcgaaatagtgatgcctttcattaggcatatatggagctgtccatcagcggggccggaagtaattaaagccagcaacttggatgcagaggacagggaaatacttaccccgtattacatgcccgataatttgccagaaaataacacggagcagggtatggccgctctggaaagactatatgtacggggtatgattattcttgaaatggttcctctcatggctttatacatcatgagtgaatctatcgcgtgtcagcgatatttaaaagtcagatataaaggaatatttgttgatgaatatcaggacaccggcttctttgctcaccagattttcaggctaatcgcggggttgggcattaaacttactgtcgtcggggatgttgaccagtccatttatctctatgcgcatcgcagcgcagactctctcaaagattttatccgccaccctgatttcactcataaaaagatcaccttaaatcatcgatgccatccgtcaattattaattatgccaaccggttgaaagatcctgactgcatgctacttgatagcgacagtgttgtggtttatcacaaaagtgtgacaggagatcaggccagtatcgctgcctggattgacgcccgagtcgcagggttaaaaaaacatttttcgatcgaaagtaataaagatattgccgtattggttcgtagcaacctgtgtgctgagctgattgccgacaacctgagaacggcctccagaacatacctagacgataacttaagtaaggccggagataaggtatcaggactggttaaagcattgctgcattacagatacaataaaaaaacaacggttcagcttgtccttgatgattacctcagcgctgtttccaaacggagcgacgtagttctgacccgcaaactcatccggcaggtccgagtcacctctgatgccagactgccagaagctataagacgggctgttttttcatgtaccggctgtgacctcagtgagactcacataaccggaataaacgatgtggttacggtacctcgtattagaaacaactatttgcatatccgggatgatgaagtccaaatcatgacattgcataaatcaaaggggctggaatttgacgtcgtaatacatctggatctgtatgactgggtgttacctgcaagggaatatgtcaaaggcagttacgatgtgatttttcagaatgaacagcagtgtctcaaccttcactatgtgggcgtgacccgcgccagaaagggagtaatcttggtgcattcgacaaaacgatataatgctaatcgagagctaaaaacggggaatccttctcagttccttacaaggccgggactgaaaggtttatataaagagctataa

SEQ ID NO: 75740 - DNA, 1992 bp, Vibrio parahaemolyticus; identical to SEQ ID NO: 72330

SEQ ID NO: 75741 - DNA, 1752 bp, Vibrio parahaemolyticus; identical to SEQ ID NO: 72331

SEQ ID NO: 75742 - DNA, 1992 bp, Vibrio parahaemolyticus; identical to SEQ ID NO: 72330

SEQ ID NO: 75743 - DNA, 1752 bp, Vibrio parahaemolyticus; identical to SEQ ID NO: 72331

SEQ ID NO: 75744 - DNA, 1794 bp, Acinetobacter baumannii
atgcactttaaaaatttaaaaatcagaaattttaggaatttcgaatctatagatatccctttgagtgataatattgtattactcggggaaaatcggacaggaaaaagtaatttaatatttgctatgcgattagtgattgatcaaaatctttcagattccgctaggcaattaaaactctctgatttttgggatggttgtgatttatttacgaaaccacaaattgaagtacatttagattttactgattttgaaaatgatccagatttaactgcattacttacggattatagactggcctccgatcctcatacagtccgtttaagctatatatttagatgtaaagccgagtgtactggtttacctacaagtagtgaagatttcgaattcttgatttatgggggcgacgtagaagaaaagcctattaataatcaagttagaagaagaatttctctagatttattagacgctttacgagatgcagagaatcaacttggttcatggagaaactctccattaagacctcttatagaaaatgctatgagagcaatcgatagtacaactttaaccaccatttcagctgatttagaagcagcaaataaaaaaatagtagagcagcctcagataaaagttttagatagttcattaagtaaacaaattctgagtctttctggtaaaggacatgatttaaagccttctctccgtttttcaaatgcagatcctttaagactatttcgttcattgggaatgtacattgatgagggaaaacggagtattaatgaagctagtttaggctcagcaaatgttatcttgatggcattaaaacttgaggaattttcttggcgtaaagaaaaaaatgaaagaaattattctttattatgcatagaagagcctgaagcccatttacaccctcaacttcagcgaagtgttttcaaaaatatatttaacgaaaaggattcagctcaagctcttattattaccagccattctccaactttagcagcagtagtaccactacgttcaattgttactttaaggcagataaataatagtacgaaagcattttctctagctaatttaccaattgatgaagatgagaaagatgatattgaaaggtatttaatagcaactcgttctgaaattttattttccaaaggcgtaatttttgttgagggtgatgctgaagaagctttaattccaagctttgctgaattattagaatatgatcttgatgggttaggtattactatatgcaatgttggtggagttaattttaagccttatgtcaaacttgcaagtagtttaggcataccttttacgattattactgattgggatcctttagatggtactaaacagccgttaggtaaaaaacgcacagttgaaatttgggatgctattggtgaggtcaatttatctgctttcaggcttactcaagaacgtcgagattggtgtgaaagggcttcatatgataagttttcagctcgatgggcaaaatatgggatatttcttaatgatcaaacttttgaagttgctatagctcaaactccaaatttaagtgagatattattagatattttggatgaacagggttttgggccccaaagaactgagagaattaaagagtggagaggtgatcgtaaaaaaataaacagtgaacatttactttctatgattaaagatatcggaaaaggacgtttaagtggaaaaataaaaaagagaataactgcatctggaactgtacagcctcccacatatattactaatgcaattgagtatatggtgaaaaatgtctaa

SEQ ID NO: 75745 - DNA, 1782 bp, Acinetobacter baumannii
atgtctaattattcgagattaaaacaagcattattagagcttgaaaaaaataaagaacaatttgaagctgtaaattgtagaaatcattgtgttgttttagcaggtccaggtagtgggaaaacaaaaacgcttacaaccgctattgctcgtactcttcatgaagagattattaacccaagagcaattgcatgcataacttataataatgaatgcgcaattgaacttgaaggtcggttatctaaattaggaattgaaaataatagtcaaaattttattggaactgttcatagttttgctttaactcaaataatagtgccctatgcacgttgcttacaagggctccttcctaatgattttaaaatagcaaataaaaatgaatgtaatttagctgtcgaaaatgcctataaagctatatataaagatggtggagaccctcatgcacagtgggaatttgctaaagaaaaaagaaatagagaagtagacagaacccatcctgcttggaaaggccataataaagagctggctgaatttattgaagaatatgaatttgaattaagaaaaaaaggccttattgatttcgatgatatgcctctcatagcatttaaaatgattaaagaaaacctttggatccggcatgctttagaatgccgatttccaattttatttgtagatgaatatcaagatttaggtcatgtgcttcatgaactagtacatctactttgttttgatggggaaattcggctatttgctgtaggagatgcagatcaatcaatttatggatttactggagctaatccagagctattacaaagtttgactgagagagatgacgtacagataattcaattaaggtataactatcgttcaggaacaagaattgtcaaagcatctttagcagctctggatgaggaaagaaattatgaaactccagaaggtactccagagggagaaatcatttttaatccggtgaaagggacattagaggaacaagcaaattttatagcagataagcttttgggtgaattggcttcgaagggtttgaaaaatgaacaaatcgcaatcttatataaggctgcttggttaggtaataaaattgtagaagccttagaagcaaggaaaataccataccatcgaactgatagtaattcactaattaaaagaagttcaaaattagcttgttttatcgaagattgtgcaaaatggataacaggaggatggaaacgagctgaaccaccttttaataaattatcaaaacaggctttaaatatagtttatggaaataactataaacaagctgaaaaacaaatattagacctgcaacttattaattttctacagaagagtagatctatttctgaaactacaaatgaatggttaataagatttgaaaaggaacttatagctcattggtcaagtatttgtcgtaataatatacaagaatgggaggtatgtttagatcttataaaaaaaacttccccacaaatgaataaagatatgtctcttgagttattttccggaaaaactgaaggaactggaaggttgatcctaaccacttttcatagttcgaaaggtcgtgaatttgacgctgtgattatttatggtgcaaacaaggggatattgcctgataagagagatcttaaaacatctaaatctttaaaggaagtaaaaagactattctatgtggcagttacaagaccaaaaacgatattacatttagtctatgaatcaaaaaatcattctgaatttttagatgagttttatagacgtactcagcaaaattag

SEQ ID NO: 75746 - DNA, 1794 bp, Acinetobacter baumannii; identical to SEQ ID NO: 75744

SEQ ID NO: 75747 - DNA, 1782 bp, Acinetobacter baumannii; identical to SEQ ID NO: 75745

SEQ ID NO: 75748 - DNA, 2091 bp, Bacillus cereus
atgaaattaacaaaggttaaaatctgtaattttagatcctttcataaggaaagaacaattgatttagaagattttacagcaataattggctcgaatagtagtggtaaaacctcattttttcaagcattacttaaattatttggtgaaacgagtagagagagggaaatcttaaggtcagattttcacgttcctagccatatagatccaaacgctttaactgagaatcatttttttatagatgtgaccattgagtttcctgaagttataagtgaagatagtattgcaaaatcaactgtaccaccattttttggtaattttataattgaagagggaggtaaagcaccgtatataagaataagacaagaggctacatggcagaaaagtaatcagccagaaggaataatagaatcaaatgtgttctttgtaactattggtcatggtaatgagatacttgatgttcataagaaaatgataagtaaagcttacttatctcttattaagatgatttatatccctgctcttcgaaaccctaatgatcaattaaaaatggtctctggtacgttactttggcgccttataaacagaataaattttgaagatcagtttaaagaagacattagcgaccaaattggaagcatacatgagattattgataaacaaaaaggactttctaaactaaaagaaattatcagaaccgaatggaagaagtatcataatgaaagtagatatgtaaatgttgatttgaattttaatacaaataatattgaagatattttaaaaaagattgatgctaatttttcaccgactgaagtagggaaaaattatacggtggatgccttaggagacggactgcgctcattattttatttttcattagtaggctcactattgaaaacagaggaagttaccttgatggaaatttctgataatccatcgctagatattaatgaccgaacgtttagtaataccccaccattattaaccttaattgcggttgaggaaccagaaaatcatgtcgcaccacaccttctgggtaaaattgtaagtaatttaagagggatttcagaaggtggaaactctcaagttattttgtcttcacatagtgcatcaattataaaaagagtggatcctgttgaaattagacattttaggaattctaaagaagatttaggaactgtaataaataaaattctgttaccttctaaagaagctgatgagtataagtatgtaaaagaagcggttaaatcttatccggaaatatacttttcaagtctagttatcttaggggaaggtgacagtgaagaaataattattccaagaatattggaagattgtgatttggatatacatacacacgaaatatcaattgttcctttaggtggacgccatgttaatcatttttggaaattgcttacacaacttaaaattccatacataacgttgttggatcttgatatagaaagacatggtggtggttggggaagaattaagtatgttatagaccaaatgcttctcaatggaacgtcaacagaagaactttttcatttaaaggaagatcaaacatttgatttaaatacaattaaaggaatgtacaattgggatttaggtgaagaacatagaaaccttgatattttgagtaaatgggttaaattgctagaatcgcataatgttttttttagtgcaccgctagatattgatttcttaatgataaaggcttttaaggtgaattatttagaaacattaaatagtaatgaaggaccaagaattaaaattggtgaagttcaaaagaagatatcagaacttgaagaatcagatatgcaaactaaagaatacgaggacagaatatctcatgatgttgcatgtactttaaaagatatagctaaaattggaaagtattatgaagaaatcgataaagagttaatgatttggtacaattatttctttttaaatagaggaaaaccaacaacgcatattttagctttaaataatctagataagaaaacatttttggagaaattaccaacagtctttaatgaattaataaaagcaattaataaacagcttatagtagggggagaagaaagtgaataa

SEQ ID NO: 75749 - DNA, 1896 bp, Bacillus cereus; identical to SEQ ID NO: 72175

SEQ ID NO: 75750 - DNA, 1770 bp, Bacillus cereus
gtgttaattgaatggattagaataaagggatttagaaattttgatgatgagaaaataaattttgccaaccagacgttggttattggcgcaaatgatgtaggaaaaactaatttaatttatgctttaagaattctatttgatcgaagtttaagtgataaagatttagagttgtatgatagcgattataacgtttttacaaaatctgattcgattgagattactgtgaaaattaatgaggttgttgaagattgtttaattagcactttgaaaggggatttacaaaataatacagtttatattcaatacaggaacacgaaaagtggagaatatagtatttatgctggacattctgaagaaactttagaaatgaaatcatcacgtttttatattaagcgactcaatatggaatacgttaatacaaaccgtaatttaacaacttttatgaagcgagaaaaaaatcaaatccttgaagaagcgaagtcacaattagcagacgaacttaagaaatcggatgaagaagctgttgctgaaatgaaatcggatttgaatatattaaatgataaagtagacaatttaaattacataaagaaatctctggagagtgtaaacactgaactaggagagttagcaattcataatgagaatcagactttgagttttaaaaatgctaattctgatatagtacgaatgctcgataatctagaattaacttatgcaacagacggtgaaacacttacattaggtggtgatggccgcaataatcaaatatttttagctacttgggttgctaaacaaaaaaataaaaaaacacttgaaaaagtaactttctttgcaatagaagaaccagaggcgcatttacatccacatcaacaaagaaaactgtccaactatttattagaaaactttgaagaacaagtgtttattactacacattcccctcatattgcttcagagtttcgaccagataaaatcgtaaagttatattcgaaacataaaatgacaaaagtagcgaaaagcggttgtagtggagatttaaaattagactttgacgattttggttatagattagatgcgattacctcagatgtattttttgtaaatgcagtttttcttgtagaaggcccttcggaaaaactcttttatacagctttatcaaaaaagttgaatatcgatcttgatcgtctgaatgtctcaattatttcagttaatggtgtaggttttaaaccttatgtgaaaatatgtttagcccttgatattccttttgtattgagaactgataatgacacttttactaaaacaaagaaaaattcagaagaagagtcgatggaattattttatcaagcaggtgtgtcacgagtaatgggcatatatgaagaactgttaagtaaagaggaaaataaatcgcttatagagtattggcaagaaaataagaaaaataatgaatgggttgaaggcggagttccgaaagaggcaatagaaattttaacgcatattagtcaagaaattgaaaaagataatatatttttatctggaatagatctagaaaatgatttagtagaaagtaatctatatggttcactgaaacgtttttataatacacgacagaaaaaaagtacagtaaagaaaatgcaaaaagctaaggcagagaatatgcttagctttttaaaaaataactttgatgcattgagtgatttaaaggatgataaaattgcagagcctttaaagaaaattcaaaagttagctgaaaaggttgtgcgtgaaaatgggtaa

SEQ ID NO: 75751 - DNA, 1647 bp, Bacillus cereus
atgggtaagaccattcaacctagtccagaacaaaagaaaattatagaagatcaaggaaatacagttattactgcaaaacctggaagtggtaagacgtttactattgttgaaaaaataagttcaatttctggaggcttattagattatcaaggagttattgcaatttctttcactaggaaagctagtcaagaattagaattacgttgtaaaagaaaaggtatcgaaagaaaaaatcatttttttggaaccattgataaattttatatttcggaaataataattccttttacaaagatacttacaggtaaaattattgcattagaagtaagggattcaatagatgattatcctgaatatgaaaaactaaaagggattagggaggattttagaaatgaagaactattgctcttgttggagaagtcattattagatggacatatatttttagaattatgcggtgaaacagcactttacattttgaataaagttccagaatgtctattgtatctcaagtcaagatatacgcatgtttttattgatgaatatcaagactgtggtgaaattcaacacaatatttttttgaagttagttgataaaggtattgtaggaatagctgttggggatttaaatcaggcgatttatgcatttagccacagatattcaaaatttttattctcattaatgacaaataataaatttacacacttggaaattactcataatcatagatgtcataaggccatatcagattattctttagctcttatgggggttcctgatattgttttaacagatgatccgagagtatttaaggttaatgttgaaggaaatgatcgagctgttattaattcaatagaacacaatttaccgattttaaaacagaaatatggattattaaataataatgattttgctatattgtgcagaggaaatgcatctgcacaaagggcatccgattttttacaaacagataataaattatttatagatactgctctagacagaagtaactcatattgggggattttatttaatgatattttatcttcatttttctcttacaaagttggggaaactacgatattagattgtgtagaaagttattttaatgaagagtttgaaaaaaagagatttgaaaaagggttaataatattgaatgagattttctcagccgatgaagatcaactagttgatcaatttaatttgtttattaaatttgccgaacttgcttatccagaacatatagataaagaaataacccatgatttagagcgtattttagtaaatgaagaaaaacttaaaagctttaagccagcaactgaaaatgaagtgagtattatgactttacacaaatcaaagggattagagtttaaatgtgtatttcttttagatttgtataggtggattttaccaccagaagggaattgggttagccaagaagaatatacacaagcgctaaaccttcactatgtgggggttaccagagctattgaagcttgttatattatgcaaggtactgaaagatatagggctaggcaaaaagatttttggtcggctgaagaatcctctttcttataccttaacaatacacctaatttacgtacagatattacgtggggaactaatatattagtggggcaacattag

SEQ ID NO: 75752 - DNA, 2076 bp, Xanthomonas gardneri; identical to SEQ ID NO: 72314

SEQ ID NO: 75753 - DNA, 1755 bp, Xanthomonas gardneri
atggctgatggcgccgaaagtcccgccgacgctgccggtcgcgtcgcgcttgaacggatgttcgcatgcctcgacgaagcgaggagctttcgtttggaggcgggcgccggtgcgggcaaaacctattcgctcgacaaggcgcttcgccgattgattgaccatcgcggctcggagcttcttcgccagcgccagcagattggctgcatcacatacacgaacgtcgccaaggacgagatactttcgcgtatcggggcgcatccggcggtgcgatcagagaccgtccatggtttttgctggtcgatcctgcaggattttcagacgactctccgtgcccttgtgcccggattgcccgggtgggcggagaggttggagccaactggtggtatcggcgctcgacgggtgcactatgagcttggcgttccccgcgtggtggatgagcaagtcaccatccgccacgaggatgtgttggcgctgatgattcaggtgatggcatttcccaagttccgggcggtgctgacggcacgttatccggtgctgctgatcgacgagtaccaggacacggacgcagcgtttgttgacgcacttaaggcctggttcctcgatcacggcgaagggccactgattgggctgttcggtgatcattggcagaaaatctacggagacggatgcggctcggttgagcatgacgcgcttgaggtaatcgacaagaacgccaacttccgttcggtggccccgatcgtgcagatgctaaatcgtatgcgccccgatctgccgcagatggtgagcgaccctgacgcgccaggcgaagcgcgcgtcttccacaccaatgactggcccggagtcagacgcaccggacagggcggtggccactggacaggtgacaccagtgccgacgcggccagagcctatttcggtcacatcaaaagacggctcggcggcgagggctgggatttctcagtcgggaagaccaagatactgatgctcagccatagcgtgctggctcgcgaacagggatacgcgagcattccgccgatttatggtcagttcaatgagccctggctgaagaaggatgatccgcatatcaagtttctgacggaccagctcgaaccggcatgtgcggcgttcgaagcgcggcgttacggcgagatgttcgagagcttcggcgcgggcatgccgcgcattcgcaagcatgtggacaaggtcgcatggactgacaccatggagacgttgatcgcgctacgactttctggatcgattggtgaggtgatcgactttcttgctgcgcagccacacatgcggcttcccgaggcagtggaagaacgcgaaagaaggctggcggaaatagggcctgaacctgtggagggagagtcacggcgtgtcacccaactgcgcaagctgcgggctgtctcttactccgaggtcatagcgctagaccaattcattgatggccatacgccgtttgcaacgaaacatggtgtgaagggtgccgagtttgagaatgtgctcgtggtcgtcggcagaggctggaacaagtacgattttgcccagatgctcgcatggagcgaggccggcccaccggccgacaagttggagttctacgaaaacaatcgaaatctcttctacgtggcttgctctcggccgaaggttcgcctagcgctgctcttcacacagcttcttagcccagatgccatgagcaggctggcgacctggttcggtgccgaaaacgtcatagcgctgcccgcgcaacctgattag

SEQ ID NO: 75754 - DNA, 2076 bp, Xanthomonas gardneri; identical to SEQ ID NO: 72314

SEQ ID NO: 75755 - DNA, 1755 bp, Xanthomonas gardneri; identical to SEQ ID NO: 75753

SEQ ID NO: 75756 - DNA, 2076 bp, Xanthomonas gardneri
atgcgcatcaagcatgtagagattgaaaattttcggctcttgaggaaggtctcggtcgggctagaggagcgaacgacgctgatcgtcggccgcaacaacagcggcaagacctcaatagccgagctgttccgtcgtctgctttccgagcgaactctgacgttcaggttggaggatttctccctcggctgccacgaatgcttttggatggcattcgaggcgttccgcgccggcgcggttgctcccgatgtgctcggacatcttccatcaatcacaatcactcttgacatttcctatgatgtcgactcacccgatctagggccgctcagcgattgcattatcgatctgaatccagactgtgcggaggcgcggctggttctcacttttggaccgcgaacgattgcggccgacgcgctgttcgccgggatcgtcacggcaggcgaagatttggccgctgaccggagcgctctgtttcgcgcgctcggcagcaggttgccggcagcctatgcgtcgtcacttgaggcggtcgaccccaacgatccaacaaatcgtaaggctctggaaccgaagacgcttacagcactggtccacgggggattcatcaatgcacaacggggactggacgatgacaccaaccgcgagcgcgatgtgcttggcaaagtcgtcgaagttctctttcagtcggcattgactgatccgcttgacccggaaaagcgcaccactgccgaacagttaaagacggcggtggagcaaatccagggtgacctgcatgccggcttcaatgcgaagctgacttccctgctgcccacgttcgatctattcggctatccggggctagccgaccccggcctggttaccgaaactagcttcgatgtagataagctgctcaacgaccacaccaaggttcgctatttaggcgtgaatggcgtcacattgccggagacttacaacggcctcggggtgcgcaacctcgtttatatgctcctacagctgctgcgcttttttcgcgagtatcaggcaaaaccgtcggctgccggagttcacctggttttcattgaggagccggaggcccacctgcacccccaaatgcaagaggtcttcatccgccagctcgaccagatcacaagcgcgttcgtggcacagctcaacgagaaccgcccctggccggtgcagttcgttgtgaccacccattcaccacacatggcgaacgaagcgcgtttcgaatctatgcgctatttcttgtcagttccagacggcgaaggcctgcgccggtcggtcattaaagacctgcggcttggaatgggcgatgcgcctgtgcccgatcgggagttcttgcaccagtatctgaccctgactcggtgcgatctgttcttcgccgacaaggccgtcctcatcgagggtacctctgagcggctcctgcttccggccatgattcgcaagactgacgccgcggctgccggtgaaccacagctggcgagccagtatctaacagtgatggaggtcggaggcgcttatgcgcaccggtttttcgatcttctgaccttcctcgaactgcgcacactgatcatcaccgacatcgacgccgtgatatccaacgagaacgggaagcgcgtggccgtgcccgtcgcggagggcgaatttacgagcaacggctgcatcaaggcttggttcgagaatgatgtttcgccagccgcattgttggcaaagacggcagttcagaagatggtcggccttcgccggctcgcctaccagatccccgaggcagacggcgggccgtgcgcgcgtagctttgaagatgcattcattcttgcaaaccccgaccgctttccacttggtgacggggatgccgccaaactcgcctatgagcacgccgctgagcagaaaaagtcgacgttcgcactggagcatgcaatcgagcaaacggactggaacgtgccccgctacatttcggagggcttgcgctggttggcccacggcaaccttgtcgccctggagccaccacccgctgtcgctatcgagatcgttgcggaagtggccggtgtcgccgtgaatgtcgcagaggctggcgagcatggctga

SEQ ID NO: 75757 - DNA, 1755 bp, Xanthomonas gardneri; identical to SEQ ID NO: 75753

SEQ ID NO: 75758 - DNA, 2076 bp, Xanthomonas gardneri; identical to SEQ ID NO: 72314

SEQ ID NO: 75759 - DNA, 1755 bp, Xanthomonas gardneri; identical to SEQ ID NO: 75753

SEQ ID NO: 75760 - DNA, 2076 bp, Xanthomonas gardneri; identical to SEQ ID NO: 72314

SEQ ID NO: 75761 - DNA, 1755 bp, Xanthomonas gardneri; identical to SEQ ID NO: 75753

SEQ ID NO: 75762 - DNA, 2076 bp, Xanthomonas gardneri; identical to SEQ ID NO: 72314

SEQ ID NO: 75763 - DNA, 1755 bp, Xanthomonas gardneri; identical to SEQ ID NO: 75753

SEQ ID NO: 75764 - DNA, 2076 bp, Xanthomonas gardneri; identical to SEQ ID NO: 72314

SEQ ID NO: 75765 - DNA, 1755 bp, Xanthomonas gardneri; identical to SEQ ID NO: 75753

SEQ ID NO: 75766 - DNA, 2076 bp, Xanthomonas gardneri; identical to SEQ ID NO: 72314

SEQ ID NO: 75767 - DNA, 1755 bp, Xanthomonas gardneri; identical to SEQ ID NO: 75753

SEQ ID NO: 75768 - DNA, 2076 bp, Xanthomonas gardneri; identical to SEQ ID NO: 72314

SEQ ID NO: 75769 - DNA, 1755 bp, Xanthomonas gardneri; identical to SEQ ID NO: 75753

SEQ ID NO: 75770 - DNA, 2076 bp, Xanthomonas gardneri; identical to SEQ ID NO: 72314

SEQ ID NO: 75771 - DNA, 1755 bp, Xanthomonas gardneri; identical to SEQ ID NO: 75753

SEQ ID NO: 75772 - DNA, 2370 bp, Lactobacillus plantarum
atgtttatcaaaaagttagcagtacataactttcgtcagttaaaagatattgagcttgatttagaggaaaaaacaagtattttagcaggaccaaataatagtggtaaaacgtctttaattctattgttagaacggatcttagaggataattcatttgatttgaaacccaacgactataatatatatgatcagacgaggtggattgtagactttacgaaaatactaagaaagttcacctcttcagatgaagacaatagggcgatattaaagaaatatttgattgactcagcaactcctgttattttgccagagattgatgttaacttacagattgattatcaaatgcaggatgatcttactaattttgctaattatttattggacttagatatgtccaaatgttcgttttatttcaaatatcgaattgaattggatcgattgaaattcattgaaacgctgatagaccagtattcaacaatccatcatgcgattgaagctctagataaagaagatgagaatgaaacatccggaaaaaataatcaagcaggaacaatgaaagcgacgtctcaagttgacatggatactgcaagtaaaacagcgactaatgtcagccaaggagtaacagattccgaaggtaagcaacataataaacctaaaaaacagcatcgctcaatgttacttgctaagattttgatgaaactatattgccaatgctgtcagtcacgtacttattactgtgatagtaaatttgaacaacttgaaaaaattcagaatcaaaatgattttcatcgcttgttcaatttcaaatatattccggcggcacgtttgactgaggaacaatctagaagtaacagaagcttaagcaatcaattagtggcttttgctaatagtgatgatgactggaatagtatgatggatggtgttactgaaacgctatataatacagtttccgagaataattcaagtgttaatcgtgagtcaacagaagtgctgagtaatgttctaaaggcagtgggtaactctaatggacagcatttaggtgatgttcagttagaggtggatgttgataagacagaaattcaaagcttagttggcagaacgacacgagcccaatacttagtggagggaactggggtatcaagtagcttaaactatgtcctaaacgagacttcgcaaggattgggatatagtaatttggtgtatcttgacactgaaattgaagcttttattagagatcgtaaatcacccgagaatcagcaaaaagttaacttgttagttgttgaagagccagagtcacatatgcatccgcaaatgcaaaatgtattcgctaaagaattaattagtagatatgatgaggatggtcttcaaggactgattaccacacattcgacggaaattgtacgtgaagtaaaagtatcaagtttacgtgtattacgagaggaaactttatttaatagtaaactttgtgatttagataaaagcattagtgatactaataagttactagacgatgtcggtttaaatgcagaaggctttttcaagtttattggaattgcagatttaatttttgcagattacgcaattttatttgaaggagatactgagcgactttacctaaagcatctaattcaaacagactcgaaattcgaaaaactgaaaaatcagtatattgcgtatgttcaggtcggcggcgcatatgcttttaaatttgaaaagattttggaaacgctacaagttaagtcgttaatattgacggacgcagattacgctaaaagcgtgaagtcagaggcggatttaaaggtagaagagacaacgaatgaaacattgaaatacttttataaggaagatagtggcaatcacaataccgaacctagtataaatgatatattcgaatggtttgggactataaaccaacttgataagttaagtacaaaggggaaagtcgtagctaatgtggagaagcataaactaaatggtgaatgtaaaaatcgcgatttagtactacttacatgtcaatccaagtcagacaagtatacgcgaacattagaagcagcgatgttaacaaggctgtttgacttggagccgtttcatgagtttacaagagaagaactaaaagataagagagagaaatacggattggcgtttcctattcccacttttaagaaaaaaggtgatgaagagaaaacagatgattcaagtgatgagagccaaaatgatgcaaaccaacgcatgattacgttgatcgacatactgaattcatcggcaatgaaaaaaactgattttatgtattcggtcatcatgaaaaagcgtgcggccaaaatggtgccgcactatattgaggagggacttaagtggctaatgttggattag

SEQ ID NO: 75773 - DNA, 1941 bp, Lactobacillus plantarum
gtggctaatgttggattagcggtcgaccaaaatattcatatcatagatgcacctgccggaagtggcaagacgtataatatccgtacacagattactgattatcttttgcgtaatcctcacgaacgagtactggcgataacatatacgaaccgcgcagcagatgagattagaagcaatgttcagaataatcaagtgtatgtaagtacgattcatgcctttatcaatgatttaattggtccgttctttcgtaattcagaagtagtcaatttatacttggaaaaatatcgagataaaattcagcaaatgctgagggggaaggaaccgaaggataaaagacgaaatgaacgttatgaggagaaatacggtgaactttcctggaagacaattcaaacaaaccttcgtaagactggaattcggtatggcgaaagtagctttacggcctattattatggttatttaagccatgatgatttgctaatctttgcagcctttgttgcacataaattacctaagattaattttaaaattagtaagcaatttgggttgattattattgatgaatatcaagatacgatggaagatgtcttaagcttatttttctctgcagttaccgatactggatcggaactgtacttgtacggcgatccaatgcaacagatttatcagaaatatagtattcagatgataagacgaatggaacagttggacagacagagagttcaagcaactaattatcggtcatgtgcaacaattattgacttgttaaataagattgatgatgagccaagtcgagcacagttggtcccagatgaggtgaaaatcaaggatagcgattttaaaccacgtgctatttttttagatcagagtgctattgatagtcatgtacatgagattattgaatctgaggaggcaaataggtcagactcacaaacgttggctttatatgtattcaatagagaacggtttgaaactataggagctccaaaacttttgaaagcatacagcggtatctatggatatcttagtaagatacaaccaaaagacgtgctacttgagctagatccaggtgataatccggatgatatgatgcaaattttattaaggcttctggttggagcaacattactagaaaaagcagaatatggtcaattaattagattgaccaataagggtaatcagatttttaatgaacagttgatgttgcaaacaagtacagataaagccagagttaaagaattttggcagagtatagcgcggctaatatctgaacctcacttaacaattggcgattttcttggaagggcgtacgcaactggcgcattgaagccaatagtaaaagagacaatggaggatgagagatatgaacaactattgaaagtcgaattgaacgagcttgaaaacttacgtcataatatccaaaacttctccacgcaacatggtgtcaagggcgaaagccacgagtcagtcatatttgtggcagaagatagcgggcggtatgccccatatttaaatatgtatggctttctgaatctttggtcaaataagaaaatcaccctacattctttggaaagctttgctctgaaatatagaagcgaaatttcagtacttaatcgggagaataggaatgttcgcagtatcgagattgctgaactggaagtagatgcgaaacaaattatggacaagttcgcagatgatgagtattttaaagctttagtagaagatgattatcgtagctttattactagacctttgagaaaatcagttggcaatgtaatgaaacctgattttgttgaccgagtattgactgcatataaattgttttatgttggttgctctcgtgctagaagaaacttgaccttgattcttgataaagataaagtaagtgagtttgaaccgaaattacggaaaaaattgatagaagttggttttgatgttaaatag

SEQ ID NO: 75774 - DNA, 1476 bp, Lactobacillus plantarum
atgtttatcaaaaagttagcagtacataactttcgtcagttaaaagatattgagcttgatttagaggaaaaaacaagtattttagcaggaccaaataatagtggtaaaacgtctttaattctattgttagaacggatcttagaggataattcatttgatttgaaacccaacgactataatatatatgatcagacgaggtggattgtagactttacgaaaatactaagaaagttcacctcttcagatgaagacaatagggcgatattaaagaaatatttgattgactcagcaactcctgttattttgccagagattgatgttaacttacagattgattatcaaatgcaggatgatcttactaattttgctaattatttattggacttagatatgtccaaatgttcgttttatttcaaatatcgaattgaattggatcgattgaaattcattgaaacgctgatagaccagtattcaacaatccatcatgcgattgaagctctagataaagaagatgagaatgaaacatccggaaaaaataatcaagcaggaacaatgaaagcgacgtctcaagttgacatggatactgcaagtaaaacagcgactaatgtcagccaaggagtaacagattccgaaggtaagcaacataataaacctaaaaaacagcatcgctcaatgttacttgctaagattttgatgaaactatattgccaatgctgtcagtcacgtacttattactgtgatagtaaatttgaacaacttgaaaaaattcagaatcaaaatgattttcatcgcttgttcaatttcaaatatattccggcggcacgtttgactgaggaacaatctagaagtaacagaagcttaagcaatcaattagtggcttttgctaatagtgatgatgactggaatagtatgatggatggtgttactgaaacgctatataatacagtttccgagaataattcaagtgttaatcgtgagtcaacagaagtgctgagtaatgttctaaaggcagtgggtaactctaatggacagcatttaggtgatgttcagttagaggtggatgttgataagacagaaattcaaagcttagttggcagaacgacacgagcccaatacttagtggagggaactggggtatcaagtagcttaaactatgtcctaaacgagacttcgcaaggattgggatatagtaatttggtgtatcttgacactgaaattgaagcttttattagagatcgtaaatcacccgagaatcagcaaaaagttaacttgttagttgttgaagagccagagtcacatatgcatccgcaaatgcaaaatgtattcgctaaagaattaattagtagatatgatgaggatggtcttcaaggactgattaccacacattcgacggaaattgtacgtgaagtaaaagtatcaagtttacgtgtattacgagaggaaactttatttaatagtaaactttgtgattcgtaa

SEQ ID NO: 75775 - DNA, 1941 bp, Lactobacillus plantarum; identical to SEQ ID NO: 75773

SEQ ID NO: 75776 - DNA, 2355 bp, Comamonas sp. E6
atgatggggggggaaatgcacatcgaattcgttgagatcgcgaatttcaggaaactattgtccgctcgcgtagatctgtcgccgaagacgacgctgttcgttggcgcaaacaacagcggaaagacctcagccatgttgacgctgcggcgcttcctaacgccgcgtcgctgcccgttcgaaatccatgacttcacgttgtgtcacttaaaggcgcttgtagacatcggcgaagcatgggttcaagcgcaccaaacggatgccgcggcggatatctccttgactccctggattcaggtgcttcctactctggatctatggctacaggtcaaggaagacgaggttcaccgggttcgggatttgatccctctcatggaatggactggcggacggctgggagtccggctgcgctacgagcccaaagacctcaatgcactttttaaggaattcatcattgcggtcaccgaggccaacgccatgcgcgcagcagctgcagcggccgcagctgcaaagggcgctgaagccaagttgaccgtatggcctgaaacactggtcgacttcctcaccaagcgattgagctcgatgttcacgattcgggcgtatccgctggatcccgcactactggcatctcctgagaagctaagggccttgccgcaggtgcttcctgcttcggcgttgccgattgaaggcgatccgctcagcaacctcatcaaagtgcatgacattcccgctcagcgtggatttggtgagagcgcgagtaacgttgaaaacgaagagttgcaggtctctgccggtggaacacggctatcggaacagctcagaagctactacgccaagcatctggatccagccaaggggccggatcccatggacctggaggctctccaggccatggaggctgcagaaggcgcatttgacctgaagctgacggagagtttcagtgaatgtttcaacgaagtcgccggcctcggttacccaggagtcagcgacccgcggccacgcgtatccacgcgcctgcgtgcgattgatggactcaaccacagcgcggcggtcaatttcgaggtcgatgtggtttcggatgcgggcgcggtcatgcccctcttgttgctgccggagggtagtaacggactgggctaccagaatctcatctcgatgatctttcggctgatgagcttccgcgatgcctggatgcgtgtcggcaaagcatccaaaggcgctgaggctgcgagcattgaaccgcttcacctagtgcttgtggaggagcctgaagcccacttgcatgcgcaggtgcagcaagtattcatcaagaaggcatatgaggtgctgcgcaggcacccagagctgggagaaagcgacacactgcgcacgcagttgattgttagcacgcactcgagccacgttgtgcacgagacgcctttcgcgggcctgcgatatttccggaggttgcccgccggcatggttgccaaagtgccggtgtcaacggtggtcaacctatcgcaggttttcggggaaggcacagagaccgaacgcttcgtcacccgctatttacgtgcgcaacacgccgacctattcttcgccgacgcagcaatcctcgtcgaggggcccgctgaacgaatgctcgtccccaacttcatccgggctcactacaaggtgctgcatcagagctatgtcaccttactggagattggcggtagccacgcccatcgtctgcgcccgttgattgatcatcttggtctgttgacgctgattgttaccgacctggatagcctgacggggacgggtggttcatcagttcaacccgctttgggcgcaggccagaaaaccaacaacgccactctcaaaacctgggtgccagctctggacgatgtagacgatctcatggccgcgactcctgccgccaagacgttcatggataccagcgacacgctgttcgcagtgcgcgcggcgtaccagatacccgttgaggtcacaatgccaggtgccgcagccaaggaaaccgcctatccctacacgtttgaggacgcactcgtgttcgaaaacgtggacttcttcgcagcgtttgcaggaccgggattgagcgccaagtttcgagatgcaatcgccatgggcggcggagcgaccacaattggtgccagcatgtacaccgcgctcaaaaacggcaagaaggcagagttcgcgctcgacgtattgatggcggacaacttcaacgacttgaaggtgccacggtacattgccgagggtctggagtggctattggaacagatgaagaagaagcaggtagaaatcttaacgacgactccggccacggctgtttcaggaatcactgcagcaggcacaatgccggaggacacgccatga

SEQ ID NO: 75777 - DNA, 1917 bp, Comamonas sp. E6
atgacggacgtcgacgatcaatttgatgccgaggccgatgcaacgatcattgaatgtcttaacctggccgagccgagaagcttcttcctgtacgcaggtgcaggctccggaaagacgcggtcgttggtaaatgccgtccgaaagacgatagatggcgagcacggccggctactgaccctgaccggaaaaaaaattggcgtaatcacctacaccaacgcagcctgcgacgaaatcaagcaacgtctcgagttcgaccctcgagttgaggtcatgacgatccacgccttctcatggtcgctgatcgagggattcaacgcagacattcgtcagtgggtcgcgaggaaccttgaagaggagatcgttgagctcgaggagcagcacaggaacgggcgccccaacacgaaagcgggtattgaacggcttcgatccatggagagtaaacgtcgccgcttggcacgtctggattccattgtcaagttcatctacagtccgaccagcgacaaccgtacgcgagactctctgaaccactcggaggtcattctcatgaccgccgctttcctgactagcaaaccgggactgaggcggatgttggtcagccggtgtccggtgctgctcattgatgagagccaggacacgaacaagtcgctcatggacgcgttcctgcatttagaggaagagtttcagggcaggttcagcttgggactttttggcgacatgatgcaacggatctactctgacgggaaagagcagctggacaaggccatcccggccaggtgggccatgcctcgcaagcggatgaaccaccggtgcccgtcccgcgtcatcgaggtcattaacaacatccgccgcgatgtcgatggcgaggaacaagtgccacgcagcaacgctaaaaagggcgtggttcgggtcttcatcgcgacccaagcaagcgtcgatcccttcgccatcgaagcggcggtgcgccggcgcatggcgacgattgccgacgatcctgcttggcagaactcaagcacggtaaagacactcgccctcgagcatctgatgtctgcgcggcgatttggcttcgtgggtttcttcgagccactttggggcatcgaaaacctcaggacgagtctgctccagggcaccggtgcaggtcttggattcttcatccgggatgtgttgccgctggtcaaggcgcttcgcgccaacgaccggttcggggccacggctattatcaaagcgtcatcgccgcttctagatcgtgtcgcacttcaagaagccggatcgaatcaggtcgcgcaactcggcagagccaaggcagcgtgcgacggacttctggcgctgatccaggaacagccgaaggttagtgcgcaagcagtgcttgagtttgttgcgcatacgggactgttcaccatcccagacacgctggctccgttcgttcctggtagcgtggaagcagcgacccacgacaatgcagcacaggacaaccaagaggatcagcccgaggaccaagaagtcgaagacgctagccctcagttgagcgcatggagcaaggcacttgaagccccacttagccagatcgaactatacgatatgtacgtgcaaggacagtcccagttcgggacgcaccagggcgtcaaggggctggaattctctcgcgtgcttgtcgtgattaatgacgatgaggctcgcggcttcctttttgcatatgacaagtttttcggtgccaaggaaaagtcaaaagcggatcatgaaaacgaggccgctggtcgagatagcagcacggaccgtacacgccgtttgttctatgtgacctgcagccgagcagagcaaagcttggccatcgtctactactcgccgaatccggagctggcgcgcaacgccatcctccagtatggttggttcgaacaaggcgaggttgagctgatcaactga

SEQ ID NO: 75778 - DNA, 1752 bp, Xanthomonas hyacinthi DSM 19077
atgcatctggggaacttgacaatctcgcgtttccggtcgttcgacaatgtgaccatcagccttcgttccgatctgactgtcttggttggcgagaacaatggcgggaagtcgaacgttgtcgatgcaatccggctgctgacactgccgctgagcggacgtagggagcggtatccagaagacgaggatgtacgacgccatgccactgtccccaacttccaaatagaaggcacttttagggggcttggggatacgttgaaaggtttgctgatctcggctgtgccggaccccacccaggatgaggcggtctttggctatcgatacgaggcacgatccgagcgcgccccacgcggcaagaccacgatgtgggccgggcgcttcgacaccaacgagcctgaggctggctcctccgatctgatccggcacgtgtacctaccgccgctgcgtgacgcgcaccaagcgctcggtacgggcagcggaacgcgggtcatggcattgttacgccacttcctgccgaaggagcaagagcgggattttcttgcaggtgtccgccgggcagtcgccagacccgacatcctgaaaacgatgaatacggagatcggcaccgcgctggggatgttgacaaatggtgtccgccctcaggttgcagcgttggacttcggggaggaaacattactcgacgtcgcccgcgacttgcggttccgcttggccgacattggcctcgcacccgaagacattcgagcatctggcctcggctactctaacttgctctatatggccacggtcgttgtcgaactggcaaaagccaaggaggccgacctgacgatcttcctcgtcgaagagccggaagcgcatctgcatccgcaactccaggtgttggtcctcgaattccttctggagcaagcacgtcaatcggcggcacgcgccattgaggccggcaagccggagggccgcatccagatcgtggtcactacgcattcaccgaacttgacagcatgggtctctccatcgcatctggtggtcatgagatcgcggcggcgcgaagagaatggggtagcggtctctgaatcagtcagcgtgcctatcgccgaactcggactgaagccgaaaacgctcgacaagatcagccgctatctagatgtgacccgctcagcgctgctgttcggcaatagagccatcttggtggagggaatcgccgaggcattgctgttgccggtgctcgcgcagaagatcgttcttcccgcagacgctgacgggtggctgcgattcaagggaaccgtcatcgtggcgatcgagggcgtggacttccgcccgtatgtcgaagtgctgttgcggccgtatggcgacgcacgcattgcagaccggttgatcgtgatcaccgatgcagacccgaccgtgctggggaatcggaaactcgatctggagaatctcgcagtaacacaccgcgcgcggcaggccctgacggtgttgaccaatcagcacacgcttgagcacgagattttcagcgcgggcaacgaagcgttcctaaagagcgtgttccttcgacttcatcgcaattcacgtcgcgactggacggatcgaatagaaggtgtcgcagcgccagaacgtcccgatgcattcctcaaactgatagaggccaagaagacccgtaagggcgatttggctcaagcgattgcctcacacatcgcagcaggcgaggctttcgtggtgccggactatctcgccgaagcgatccgcggcgccgcgcacgcatga

SEQ ID NO: 75779 - DNA, 1779 bp, Xanthomonas hyacinthi DSM 19077
atgaccggcatccagggcctaaccggagagcaggaagcattttccgcgtatgccggaggcgtatttgtgcatgcctgccctggtgctggcaagacgcggacaatcatcgcgcgcttgatgaggatcgcagccgcattgccggcgcgacatggcgtggcggtgctgtctttcacaaactccgccgtcgacgaatttcgggaacgctgtcgtgcagcggcgctcgattccctattgagacaccccagcttcatgggcacgctcgatgcgttcgttcgtcacttcgttgtactgccaggctgtgccgtggcaagccgaacgcgtccgatcatcctcgacagctgggacagccttggcgtcggcattcggctgtcggggcaattcgccttccaaggtgagccggtgagcttggatctcttcgaccctgaaaccaatgtgattctgcccgacaagattggacacgccggacttcgaaaccatgttcaacagcatcaagccaggtatcaacaggctgcatcccttcggcgacgtggcttgcttcaggctggctatttgagcgctgccgatgctcgtgttcaaactctgcagttgatccgcgatccagtaaggggaagggcactagggcgtgcgctggcggcacggtttcatgaggtcatggtggacgaaggacaggattgcaatccgctcgacttgcaaatcctctcctggttgcggggacacggcgtgcgggtcaccttcgtgtgcgatcccgaccaggcaatctacgaattccgcaatggcaatctggctggtattcaggagttaaaggacacctatcccgcagaggcgcgtcatgagttcacagggaatttccgcagcagccctgccatctgcaggttggctgcaacgcttaaaagccaggcgcaggtagacgactccgttggtgagaccgcgaccgttgcacatcccgtactacttctgtcatacggtggccgcggtccgagcgcggcgatcggccaggccttccttggtcgggtggtcgaacttggtttggattcggccaatgcaattgtcttggcgcattcaggcaatgtcgcgcagcgtgccgccagcagtgtggccgcggttgactcgaatgggacctcgcggattgaatcgctcgcccgacgagtggccgagttctggtcacctgccgcgacggcgcggtccaaggaaacggtagtgcaagcggcggaagccctgctactggacttcatgggtttgcgtcaggaaggcgagcatcttcggcgggccttcgaacggacaggtatggaccggcgcgcacatcgtcgacgaactttgactctcctcatgaatctacccaaggtgtgcgggaataccgacgctgatcgcctcgcgtggatcgacaccgtgcatgcgcaggttcaactgcttggcctaccgctgcctccgggtgtgacgatgcgtacgttcttccgaaagccgcccaatgggcagtggtcaagtcatcttcagattccaaccgaaaccgggctgaggtgcgccaagattcatgaggcgaaagggcgtgagtacgatgctgtctgcgtcgtaattcctcccaatcgagccccgaggaaccgcagcgaggcgcttttcgaatcgtgggcagatcggatcgaagcggaggcaaagcgcgtggtctacgtcggtgtcactcgggcgaggcaccttagcgctctggctgttccaactgcttttgctgaccgttgtgccgccctgatgacggacggtgatgtcccctttgctaggaggaacatttga

SEQ ID NO: 75780 - DNA, 465 bp, Xanthomonas hyacinthi DSM 19077
atgccggagaaatttctcaccgaagcgcattccagtggattcggcttccgggtcgcctaccagcagcctgtcaagattgactttggcggaagtaagggtgccgaagccattgcaaacacgttcgaggacgcgctcgtatatcagaacattgagttcttcaaatcgttacagggcgggggcttggccaaaaagatccgggagtcgattatgagttcgaaagacgtcgcagaactctccagcagcatccaggcggacttgaagaccggggataaggcagagttctccatgaccctcttggagagcagcgatctggacgaagttgtcctcccagactacatcgacaagggtcttctatggctgattgctcagctcaagcgtaaagaagacgatgttgctggcaagctgctacttgccccaacctctcccgacgatgcggcaccggcaccgagtggggtgaagccgtga

SEQ ID NO: 75781 - DNA, 1132 bp, Xanthomonas hyacinthi DSM 19077
gtgaagcacgctcaacactctgacgagaacgatatcgatcagcctgccgacgctctgattgcccaatgtctcgatccggcgagtccaagaagcttcttccttttcgctggggctggatccggaaaaacgcgctcgctggtggctgcattggagcatgtccaagccaattggggtgagcagctgcgccgccaaggcaagcgagttggcgtgatcaccttcaccaatgcggcatccgatgagataaagaaaaggatacagtttgacgcacttttcgacgtccgcacaattcacagctttgcttggtcactgatcgaaggtcttaaccaagacatacgagaatggctaaaaataaagatctctgaagaccttgttgacctgcatgagaaagaagccaagggtcgcgctggaaaggcttcaaatgaccgcaagctgagaattgtaacgaacaccaagcgactagagtccctccccgggataaagcgctttatctacagcccgactgggaacaatcgaacacgtgatgcactgaaccatgccgaagtaatccgcattactgctcacttcctacagtccaagcctcgcatgcaaagcatctttgttggccgctaccccattcttcttgttgatgaaagccaagacacgaataagcatctggtcgacgcactctttgaagtggaagctcagcaggccggatcattctcgctgggcttgattggtgacacgatgcagcagatttacgctgatggtaaggagggactcggaagcaatcttccagccacttgggccacgcccggaaagcagatgaaccaccgctgcccaaagcgagtggtaactctcttgaataaggtccgagccccagtcgaccctcatcaacaacgagcgagaacggatgcaagcgagggcatgattcggctcttcattgttccttctaccgccgaagacaagcctgaggtagaagaacggattgcggaactgatggctgatttgacagaagatgcgaactggcggcgacgcgacgcggttaaaacgctgacccttgaacacagaatggcagccgctagactgggatgcttggaagtgttcgttgcgttgtatgaaattgactcaacgagcctgggcggtctcaagaatc

SEQ ID NO: 75782 - DNA, 2310 bp, Edwardsiella tarda
atgtcagcagcagacgccactacatcattatctggacagatatcccttcggtttgttgagctttgccagttccgccgacttggtaaggtccagcttgagattgatcctaagactactattctcgtcggtgctaataatagcggcaaaacatcaattctggcagcgctgcgccacttcctcgcagatggctcgtcatttggtgctttcgacatcagtgtttctcaatggccaaaattgcgggaacttggaagagtttgggacgcattagaagaagacccgtctacgtctggcgcatccgaaggtgaatgggaagagcaacttggaaccttaatttcggcgatgccaacgctagatctatggttcgatgctaaggccggcatgttccactatgtctccccattcttgtcaaaattcagttggaaggggggcggggtaggtgtccgattgcgtctggaacctgctacgaacattgaggatctgaagcagttggcttggaagtatcacctgacgagaatacctgtgaaggatatgggaaaggattcgcttgcgtggccgattgatcttcttgatttttggctgcgagaaccttctcaactcggccaagttcgggcctacaagttagatgccgataacaaccctttggacgggataaagacctacgttagccaggtactggatgctgactcaagcccaattgatcgtaagcatcttcagaaacttataaaagtagactttgtggctgcacagcgtggccttggtagtgaggaagctgattcccggtctgcttctggcacccatcgcataggtttattctccaatcagcttctcaaatttgctcgacagcatcttaatgtggcagcaacaggtcatgggcaccgagctgacctcataaaagctgttgctgatgcccagcaggaactagataaaaagattcatgaggctattggtccatcggtagaagaggttaaagagcttgggtaccccggcttgcatgacccccaagagattcgtttccgaacgcgcatacagacagccgaattactcgaccatgggacagctgttcaatacagcatgcagaaggattcactagaagagcttctcccggaatattccattggtctcggttatcagaatttacagtcccttagttaccaactagtttctttcaaagctgctcgcctaaatcctgaaaagggcgctcccgcacctgttcatctggttatgattgaggagcccgaggctcatttgcacgtacaggtacaacgtattttctcgggtaaggcacataagctcatcagtcctaacggtagcgatgagtcaggtcttaaaagccaactgattatcagtactcattctagccatttagctcatgctgagaattttgaccggctacgatatgttcgccgcgttgccaagagtgaagaacaaaacatgcctaccactgaggtggttaatcttgggcaagtttttggtgatgataaaacaacccgtcaattcgctgaacgttattttcgcgttcaacacacagatcttttatttgccaatgctgcaatctttgtcgagggggttgctgaacgaatgctgttacctctttttattgaaagagattttgcaacactcaacagtcgctatctgtccttccttgatattggtggcagccatgctcatcggctaagagctctcgttgaaagactccgtattccaactgtaattattactgatatcgatccagttgaagaaagaccaggtaagcctaaaaaaaatggggatccgactacaaccttagttgctgtggctaatacaggacaacccggactgcaatgtgggaacccgactcttcgcggatggcaccctaagttgcaacagcttgaggattacaagaacccgaaaaatgagcatcttgtctggaaagaaattgccgagtgttctgtacgttttgcatggcagttgcctgtagtcgaagctgatggtcaatggccaagtacttttgaagactctctaattctgagaaatatcccttggtttaagcaacttattgatgaaaaagtcgatggcgatgggaagcaaatcaaaccgccgaagggagcactgggctcagtagcaagacaggtcgctgaaaatgataatattccagaactgctcgcagctctgcataaattaatgcatggatcttttaataaaggagactttgccgcaagtatctttgaaatggttgctgcggatgagccgatagtctgtcctaaatatatcgaggatgcattggaatggctccagacacagcttgagccaagcaaggaggtgatgccatga

SEQ ID NO: 75783 - DNA, 1950 bp, Edwardsiella tarda
atgactaactcatcagcccttgacgacaatgatcgcgatgcaggggtagttgaagagatttgcggctaccttacagacataccaccccgtaactacttcctttttgcaggggctggttctggtaaaacacgaactttggtagaagttttgcgtcgccttactggtgtgactgagcatgagaaggggggacaattagcacggtccctgaagatgtatgggcgttcgattagagttgtgacctacaccaagaatgctgtctctgtaatcaacagacgtcttggggacaataatttagtcagtgtgtctaccatccattcgttttgctgggagttaattaatgggttcaacgatgacattcgggagtcccttatagcagtaaaagaagctcaactcgctaaagagactgcagaggcacaagcgaaaccgaggggtattactgcagcaaaacagcgtgaccttgacgaaatcacgaatgaaatcgaggctcttcggacaactgaagtattcaaataccatcccgatcgcaatacatatggacctggtgcactaccacacaattacgtactcgatgctacagcttggttgcttcaaaataagccaacactccaatccattctcaaagatcgacatccaatcatactgattgatgagtcgcaggacacgatgaaaggtgtactggactccttgatggagcttgccaaaaaaagtgagagagatttgactcttggtctgctgggagatcatcgacaacgaatttatatggatggtcatgccgatcttccaagcattgttccggaaagctgggcaacgcctgagttacaaatgaatcatcgcagtcaacgacggatagtcacactgattaataaaatctgggaaactgaatttgaaggcaggacacaaccaacaaaggggtcagcacaacatccccgaacggaaaaagctggtggaacggttcggctcttcttgggggatacatcacgaagtccagaagataaagtgcttagtgaacgctggtgcgctgagcgaatgtttgaaattagtggtttagcagattggaatcaagggcaatatcagttgcttgcgcttgagcataagcttgtcgccactcgtggctcgtttcttgatgtctatgaggcaatggttctgctagatcccaacgctgcagcaccatctggcagtggggacaataaggggccttcaacagtacaaattttgcttaatgagctggcgcatttagaagcctgcgtcagtgatgaaggaatcgttaatgagtttaaggccaccgaggtttttcgacgttatggcggtttaggcaatatgcctgaggactcagaagcaagagttgaacgtactgatgaaatgctcgaggcgatagcgatatttgcaatggcttgcgccaactctgagtcaacgatcgctgaggtgttagcgccagtcttgagtgcaaacttattcgaggttgatcatcgactcctagaggcttatgtcgacaagtcaccagccccgcaagctcctggacgtggtgaggatgagtcaaagcaaaccagaatgcgccgcggatggtgtgcactgtttgcttctccatggaaacaacttaagtgctatcggaattaccttgctgggatttcagagctcgcaacacatcaggtagttaaaggctctgagttcaatcacgtcatggttgtaatggatgatgctcttgctggtgggactctcatcaagtacgacaaaatttttggtggtacgcagttaagtccaacagataaaaagaatgcagaggctggtaaggagacaacaattgaccggactttacgtttgctgtacgtgacttgtagcagggcgcaagaatcgctcgccttagttctttggtcgtccgatccagctgcagcaatggctcgaatcaaggagagtcaatggtttgctgaagatgaaatacaaataatcacataa

SEQ ID NO: 75784 - DNA, 1599 bp, Lactobacillus salivarius str. Ren
gtgaatgattatatggatgaaaagataaaacataatattgagctaaaagaaagatatctaaagcaaagaatagttacgttatatgtcaattcaattgttccaacatgctatttttgcgatgaaaagtatgagaatagatgccaaatggatgatgtaaagcagtttaggaatctatttaacttttgctttattaaagcaagtagacctttagatgatgatttatcagaccattctcattcgatcagtaaacagatgattaaaatggctaaattagatggagaatggaatgaattgatagataaattacctgatgaaattttaaagcctattcaagacaaagatatcagtaagaaggttcaggaaacgtcgctaaattcattaaaagagacaattatggctattgaagaaaccaatggtgggagatcaggtgaattgatgttggatatgcttgttacagaagaagatattagtgatttacttcaaaggatcacaatggctacgtattgtgtcgatggttatttcctaggtgaagaatcacaaggattaggctatagcaatatgatatatatacatcttcagttaaatgaatatgaaaatagtaaagatagctgtaaggtaaatgttttctttgttgaagaaccagaatcacatatgcatcctcaaatgcagcaagtatttatcaaatatctcattgaacattataaaaatggtattcaaggattaattacaacacactcaaatgaaatggtgcgagttgctgggataaaacatttacgtgttattagaaaaacagatagttttttaagtgagctccatgatctttcgaaattaatcaatgaattacaagaatcaagtaattcagaggataagctattagccaatttctatgattggttttttgagattggttattctgaacttatatttgcagataaagctattttttatgaaggagatacagaacgattatatatcagaaagcttttaacattaaaaaaatatgaaaagctaaagcaacaatatattgcttatattcaggttggaggggcatatgcaaaaaattatcaaaaaatgatagagttgttaggtatcaaatcattagtcattactgatatagattattctaaagatgcagaagtaatagatgagatagaaagttctgaaataactaatgcgacaataaaggcgttctataggattgataaccctgagagcaatccaacagttaaagatctatatgaatggaaaaataagaataagaatattataagtaatgggttgatttatacttgctttcaaactaacaatgatgggtattctaggactcttgaagaagcgatgctttcgaagtatttctcgattgatgttactacaagtcttaccaaaagagaatggatagaaaaaaaagaaaattcaaaactaaaatttgttattccaactaaaggaatagaagaagaaaattctatcaagttgcgagatattttaaaatcgacatctagttcaaaaacaaattttatgtattctgtagtacttaatgaaaaggtagaaaaaactgaacctaattatattcaaggaggtttggaatggttgatgaagtag

SEQ ID NO: 75785 - DNA, 1947 bp, Lactobacillus salivarius str. Ren
atggttgatgaagtagagaatatttatcttgtgaatgcgcctgctggaagtggtaaaactacatggatccgtaaacaggttgaaaaacatttgcttgaaaatgatgacgataatattttatgtataacatatacaaatcgagctgcagaagaattgggaagggatataaagtctaatagagttttttttggaacaattcatagttttataagtaactatatgggaagtttttttggacataaagagataattgatctatattgggaactatacgaggagaaaatagcacaaagaattgctaatgttgaaaacaagaaacatgtttcaattagtaatgaaagatatatagaaaaatacggagtactggacatggaaacagtgcactcaaatttgaagaagataagttatggtgaaactcaattcacatcgttgtattatggattattaagccatgatgacttactatcgttcaccaagaaggcagttgaaagatatcctgttattcttaaaaaaattcgtgacaaatatcaacttgtttttatagatgagtaccaggatacaaatgcggatattcttaaattgttttattcatcgatggtgtcaggtaagggaaagttgtatttattaggtgacaaaatgcaacaaatatataagaactacgatgggagctttgaagatactttcaatatattgaataagtctacgagactagatgttaactatagaacgactccgtatattgtcaatattttgaatgctatatacaatgataaatcattacaacaatatccttatgataaaaatttagatagtcaaatgttgtttaagcctaaggttatttttacaaatgatagagataagacagttaatatatttacaaagaaaaataaaggtaccttggttctgtatttaacaaataaagaacgtttttatggtattggtgtaaaaaaactttatgagtcatttaataaaatacctaagtatcaatttacagggaagtatagtgttgttgatgtgcttacaaaggaagaggtttggaatcaagatattcttttgagtataatttttttactcattgatatttgtgattattatattaatggtaagataggaaacatttttaagataacgcggaacaatgaaaaaatttttaatagaaaagttttttcaatacgattccatgctgataaaaaagcattgcatgataaattagataatttaattgctatttaccaagaagaaggaactactataggttcattccttaagagttgttgtgataatagacttatagaagaagagtactatggagaaattattgaggatgatgactatgcttccgcattggaggttacgctatctgaaatattaattttaaggaattttttagaaaatccatatatttcgacgcaacatggtgttaagggagaaagtcatgatactgttctgtttgtggcggaaaataattctaaaatacctatagtgaatatgagcaaattctttgatctatggagtaaagtgaatgtagttctaagagattttgataatttttattatgcttatttaaaaatgattaagagtattgaaaagaaatgtggtatgaaaatatcaaagataaattcgaatgattatagaaaaaatgaaacatttatttcagaaaaaatatcaaaatttaacgagatatattatgataatgactattatattgtacttttaaaagataaatttgataagtattttgttaaaaagaataacaaaagtgcacaagaatgcttgaaagagaatgcagtttatggtgctttggttgcttatcgacttttttatgttggatgttctagagcacgtaaaaatcttgcaattgtaattaacaatgctgatgtagttgcttttgaagaacgattaaagaacaaatttaaagatattggttttgaaattgaggaaatttaa

SEQ ID NO: 75786 - DNA, 1752 bp, Enterobacter aerogenes; identical to SEQ ID NO: 73074

SEQ ID NO: 75787 - DNA, 1776 bp, Enterobacter aerogenes; identical to SEQ ID NO: 73075

SEQ ID NO: 75788 - DNA, 1752 bp, Enterobacter aerogenes; identical to SEQ ID NO: 73074

SEQ ID NO: 75789 - DNA, 1776 bp, Enterobacter aerogenes; identical to SEQ ID NO: 73075

SEQ ID NO: 75790 - DNA, 2313 bp, Enterobacter aerogenes; identical to SEQ ID NO: 74078

SEQ ID NO: 75791 - DNA, 1950 bp, Enterobacter aerogenes
atgactaactcaccaatccttgacggcaatgatcgcgatgcaggggtagtagaagagatttgcggctaccttacagacacaccacctcgtaactacttcctttttgcaggggctggttctggtaaaacacgaacattggtggaagttttacgtcgccttactggtgtgaccgagcatgagaaggggggacaattagcacggtccctgaagatgtatgggcgttcgattagagtggtaacgtacacaaagaatgctgtctctgtaatcaacggacgtcttggggacaatagcttagtcagtgtgtctaccatccattcattttgttgggagttaattaatgggttcaacgatgatattcgcgaatccctaatagcagtaaaagaagctcaactcgctaaagagactgcagaggcacaagcgaaacctaagggtattactgcagcaaaacagcgtgatcttgacgaaatcacgaatgaaatcgaggatcttcggacaactgaagtattcaaataccatcctgatcgtaatacatatgggcctggggcattaccgcacaattccgtactcgatgcgacagcttggttgcttcaaaataagccaacactccaatccattctcaaagatcgacatccaatcatactgattgatgagtcgcaggacacaatgaaaggtgtactggactccttgatgttcctagtcaaaaagcgggagggcgatttgactcttggtctgctgggagatcatcgacaacgaatttatatggatggtcatgccgatcttccaagcattgttcctgaaaattgggcaacgcctgagttacaaatgaatcatcgtagccaacgacgtattgtcactctgatcaataaaatctgggaaactgaactggaagggaggacgcaaccagcaaagggttcagcacaacatccccgaacagaaaaggctggcggaacggttcggctcttcttgggggatacattgcaaagtccagacgataaggtgctcagcgaacgctggtgtgctgaacagatgttcgaagttagtggctcagtagcctggaatcaagaacaatataagctgcttgcgttggagcataagctcgttgccactcgtggttcgtttcttgatgtgtatgaggcaatgtttctgttagatccccacaccgcagcgccatctggcagtggggacaacaaggggccttcaacagtacaaattttgcttaatgagcttgcgcatttagaagcctgcgtcagtaatgaaggaattgtgaatgagttcaaggcaaccgaggttttacgacgttatggtgctttagacaatatacctgaggattcagaagcaagagctgaacgtactgatgaaatgctcgaggcgatagctatatttgcaatggcttgcgccaaccctgagtcaacggtcgcggaagtattagcaccagttttaagtgcagaactctttgaagtagatcatcgccttcaggaggcttatgccgacaagtcaccagccccgcaagttcctggacgaggtgaggatgagtcgaagcaaacaagaatgcgccgtggatggtgtgcactgtttgctgctccatggaaacagcttaagtgctatcgaaattaccttgctgggatttcagagctcgctacacatcaagtagttaaaggctctgagttcaagcacgtcatggttgtaatggatgatgctcttgctggtgggactcgctttaagtacgacacgatttttggtggtacgcagttaagtccaaatgacaaaaagaatgcaaagtctggtaaggagacaaccatcgaccggactttacgtttgctgtacgtgacttgtagcagggcacaagaatcgctcgctttagtgctttggtcgtccgatcctgctgcagcaatggctcgaatcaaggagagtcaatggtttgctgaagatgaaatacaaataatcacataa

SEQ ID NO: 75792 - DNA, 2313 bp, Enterobacter aerogenes; identical to SEQ ID NO: 74078

SEQ ID NO: 75793 - DNA, 1950 bp, Enterobacter aerogenes; identical to SEQ ID NO: 74079

SEQ ID NO: 75794 - DNA, 2073 bp, Enterobacter aerogenes
atgcgcattcatcaggttcagataaagaatttccgacttttagctgacgtggagcttgtattagaggaacagacgacagtcattgttggtcgaaacaacagtgggaaaacatcgctctcagagataatacgcagatttttaacagacggcagtgcgacttttcaactcgaagacttttccagttcttgctatgaccgtttttgtgatgcactgaaagcgctaaacgaaggggaagaggatcatgttattcgtgatctcgtcccagctattgagcttcgattgaaattccagtacgactccacgcaaccacaattaggcccattgagccccttcgtgattgatttggatccggcgtgtaccgaagcgctcgtggtagtcaggtatgaattgaaagatggccaactggcacggtttctcgaaggacagcccacagaaccactaactcaggagactcggattgccttcttccgggcgttacgggaacgtattcccaacgaattttgcgtaaaaatatgggcagaagatcccaatgatccagaaaatcgtcgcgagttacaatctagcgcactgcgcggtctggtcaagtcgggctttatcaacgctcaacggggactcgatgatgtgacatccagagaatcagatgtactggctaaaacggtagaacatcttttcgcaacagcgtcctcggcctctgcggatacagcagataagcaaattgccgatgcgttgaaaggtgcagttcaagatattcagactcagattgacacaaactttggtagccaactcaaaagcctgattcctgcgctgaaaacgtttggatatcccggactgggagggcaagaattacacaccgaaacattgctcgacgtgcgcaagttactatcaaacttcactaaggttcggtattcgggttatagcggtgtcacactaccggagtcgtacaacggtcttggcactcgtaatttaatatttattctgctgcagttggctggtttctataaggcatttcgcgctgaagttactgagccgggtgtacatctgatctttattgaagagcctgaagcccatctgcacccgcaaatgcaggaggtctttattcgtcaacttgccaagattgtgcaacaactggttgacggcactgaggacaggagcccctggcccatccagtttgttgtctctacacactcatctcacattgccaacgcagctggtttcgagagcattcgctattttctcggtgctacagtgcagggaactcaggaaggagttcgtacaaccaaaatcaaagacttgcgtaaagggcttaggcatattccaacggaagatagaaatttccttcatcaatacatgacgctgacccgttgcgatctctttttcgcagataaagctattctcgtcgagggattgagcgagcgattattgcttcctgctatcatcaaaaaactagaatcagccgaaccagaaagaccgaagctgtcgaaccagtacgcaacggtgatggaagtcggtggtgcttacgctcatttgttcttcgagttattagcatttcttgaacttcagagcctgatcataactgatctggatgccgttctggctcctcggggtaaagcgtgcgccgttcatcttggcacatattccagcaatgcttgtttgaaagcatggttctctgaagatactcctttcacattagctggtttgattgccaggagtgacgatgataaagctcgtaatggaaatcgtattgcctatcaatgtgcagaagtgacagatggcccctgcggacgcacattcgaagatgcatttatccttgcaaactcggctctattcgggctggtagggagaaatactcaggaacttgaaatagaggcccgtgataaaggggctgagtggaaaaaatcagaatttgcattgaaatacgcgattactgagacagaatggaacgcccccaaatacatcgtcgatggaattcgctggttagctggcagcaatgagcctatgacacaagatccagtattggcgcaggttgtagaggccacaactaatattgaagaaggagccagcgctgatgtctga

SEQ ID NO: 75795 - DNA, 1734 bp, Enterobacter aerogenes
atgtctgagatccattcgcccgccgaagctgctagccagcgagctttggaatctatgtatgcttgcctcagtgaaggacgaagcttccggctggaagctggcgctggtgcgggtaaaacatattcccttattaaggcacttcgattcttgattgagcgaaataaggatttatttgaaaaacatagccagcaaattgcctgcattacctttactaacgtggcgaaggatgaaatcgtcgcgcgaacagatcgaagccccatcgttttttgtgataccaatcatgcgttctgttggtcgttaatcagtagctttcaaaaaccgttgagagaactgattgaagcaatgccagagtggagagaaaagctcgaagaggctggtggaagccttggtaatcgtagtgttgagtataatcttggacatcgctccatccgcgaccatcgtataacgattcatcatgacgatgtcctttctttaactatctcactcatggaacacgataagttccgcaaagtgattacagaacgcttcccgatcattctggtcgatgagtaccaggacacagacaaagaatggattgaggcaattaaaagacattttcttgggcaaactggagctcctctatttggttttttcggcgaccattggcaaaaaatctatggtggtggatgtggtaaactggaacatccagatgtggttgagataggtaaggaggccaattttcgttcggataagacaattgtcgatgccctcaatctcatgaggcctgagctaccgcagtgtgtcaaagaccccgaagctgaaggtcaggtacgggttttccatacaaacaattggcaaggggtacgtcaaaaaggtttgcactggggtggagatctccctttagcagaagggcaagctactctggaacgtgtcaaagaaacgttgcaacaagatggttgggatttctctcccgcacataccaaaattctcatgctgactcatcgacttttagccaatcagcaaggttactcaaatatagtagcaacgtttcgatataacgaatcttttacgaaaaaagaaaacgagcatatagccttctttatcgacaagcttgaacctgcctgcgacgcctttgaggctcgtaaatatggtgcgatgtttgaagtttttggtggcgctacaccacaattacgtagccattcagataaggaaagttggcacaatgcaatgatgcagttacttgctatacgcgaaacaggaactatcggtgaagtggttgaattcttgcgtactcatcgtaaacccagacttccagataatgttgaaaaacacgagcaggaattactcaattatgacaggactgctggtgcggaaataccccgaaggctaaaagaactggaaaaattgaaagatattccctattccgaagtaaagtcacttcgccgttatcttgatggtcattctccttttgagactaaacatggtgtgaaaggtgctgaatttgaaaatgtcttagtagttgttggacgagggtggaaccaatataactttggtgaaatgttgggctttgctggagagcaaatgctcccagcaggaaaagaagattcatttgagcgtaaccgaaatttgttttacgttgcctgctccagacctcaaaagcgccttgcaatcttgtttacacaagctttgtctcctgaggcacttgcaactcttgggaattggttcggagctgatactattgtgcctgcaccataa

SEQ ID NO: 75796 - DNA, 1980 bp, Enterobacter aerogenes
atgaaaattacacaaatggagatcaaaggttttaagagctttgataatgtagggcaaactataaatataaattcattcaccagcttaattggagggaacggaacagggaaaacggcagttttactcgcattaacaagaatgtttggcgtcaaaagctccgatagaattattcaagttgatgatttttatgttcctcctggggatgaaatcgatactcaagatgaaagagagctatcagttcgtgtaaaattcgaattcgcagatttggaagatggtgaggacaatacagttgcagatttctttaagcatttagtttcaagtgaagcggcagagatcccatactgtactgcaaaattaaaagcaaaatggacaaagactaaccttgcagaaggagatatagaaagcgacctagtgtgggaaatcggggagtatgaaaaaaatataacagcatatgaaagatcgaaaattcatgttcattatgtccctgcataccgagatcctgcccaacaactgaagcaaacagccggaaccatcatgcaccgtctgataaatgcagttgaatggtctgatcaaatggcgtcaacagttgatgaggttgctgtatcaatcggaaaccagttccaagaagaagttggggttcagacgataacatcgtcattaggtagaaattggaaaaccctcttcactgggggttactttgaaaagcttcaaattaagccagtagtgaatggaattgaagatgtattaaaacatatcgacactgtctttttacccagtccagatacacaaccattaccaactgaaagattgagtgatggtatgaaatcattattttatttatctttagtcaaatctgcgtttgacattgaagatgagataatcaattctgatgggaaacagttatcaatatcagtagaagcattagaccccccaaatctaactataatattaatagaagaacctgaaaaccacctttcacctcaatatttaggaaggatagttaaactgtgtgaagagatatcagagaatgatcgggcacaggtagttttgactacacatgcaccatctttacttaatagggtggagccagagaatataagatatttccgtcttcatgataataaaaatacaattgtcaaagaaatattattaccaagggaagataaagatgatgccgagaatgttgatacttttacatatgttaaggaagctgtaaaagcatatccggaaatttattttgcaaaagttgttatacttggtgaaggtgatagtgaagagatcgtcattcctaaaatagcacaagtaaatggaatagagcttgacacttcattaataacatttgcaccattgggtggtcgatatgttaatcatttttggaaacttctaaatgagctttcaattcctcatgtaactcttctcgattatgatttcaggagaggggggggaggttggggaaggattaaatacgcggtaaaacaacttatttcaattggagtagacaagaatatattgcttaaaatgagtgatggggttttgtctgacgaagatttagaagtaatgcattcatgggatgaagatagggatgaagaaattgcatggatagagtcgttaaaggaatatggtgtgtacttttccttcccttatgatttagattggctaatgctaaatgaattctttgaggattacaaaaaatttgtacctgaaaatggaggaccaagattgccaaaggatgatgatcctgaatataacaagaaagttaaagctgcaatagcttcagttttgaaaaaagaagaaaaagatattgatattagtaagtttgatgacttcgagaagtacttttggtaccgctacttatttttaggaagaggtaagccattatcgcataattatgttctatcaaaaatggaagacgataagttaagagataacagtcctgaagttctcaatgaacttatcgaaacagtaagaggtcttctgtga

SEQ ID NO: 75797 - DNA, 1848 bp, Enterobacter aerogenes
atgccaataataaaagatgatgattgggttctaaaagacatccaagaagtagaagacgaggctatgaaagtaatacggaatagcacagaacataatcttgttcttgctggtcccggtgcaggtaaaaccgagttattagctcagaaagcatgtttcttaattgagacaggaaagtgcagggataaaagaataattgcattgtcctttaaaaaagatgctgcgcaaaatcttcaagatcgagttaactcacgacttgacttgaaatatagacaaaagtttgagtcaacgacattcgatgcattttgtaaaagcattgtagatagatttaagagtacacttccagtggcgtatcggccttcagatgattatgaaatatattttcctgaaaataaaaaattcgtagaagaggttaaacgagatgccgttggttttgagggactaactgcggaggaacttaagaaattaaaacataacaatttcgaaaataattatattgttaggccttataaaaagggtgaagagcattcggtagatgctcgtattaaacgatttgtttggttccgtttattggagggaaaatccaaagtttcgtttaaaatgataaacttccttgcgaattatatcataagaaacaataagttcctttcaaatgctattaattcgacttacgaatatgctttcattgatgagtttcaagatactacttatcaacaatacgaaattttcaaaagtatttttttagataaaaaaataaaaataacagctgtaggtgatactaaacaaagaataatgggatgggcgggagcattgcatagtgcatttgagatttttaaaaatgactttgcgattgaacatcataatgaattattgagtaatagaagatcgctgaaaaatcttataagttatcaacgcatgatggaggcattcatgaatcatgctgataacaaacctgagatggagttaatcgagaatgaaggttcagcaaagttaatacaatttgatgaaagcaatatagaaggggcatacatagcattatgtatccaaaaatggattgaaaaaggggttgatgaaagagaaatatgtatcttattcagaaatccgtctaagcattacacggataaaatcatctcatctctacaagacttggatataaagtgccgcatcgagaatacctatcaggaactactcaatgaagcaatagttcagttaatcttaaaaatgctaatgtttacctgcgataaaaagtctattgaaggctggaattctacaatggaacttttatgcaacataagaggggtaaataaaagcagagatattactcgtttggaaaaagagcttagtcgttttataaaatcgaacaaggacatcaatggaaatgttgttgattatatatatggattaataagtatatttggtatcgatgagatcaagtcttacttcccacaatatataaatggaaatggcttggactatactattaattctctttcacaacatctggaaactttaggtatcaaagataataaattagcagctattgatatgttactcggaaataaaacgataccacttatgacgattcataaaagtaaaggtttggagtttaaaaaaatcatcgtcgtaggtcttgaacctggtgcgtattttggcgatgaagaagagcagatagaaaatcaaaaaacagtctttgtggcattttcacgagcgattgaagaggtcatattaactcgctgtgcaaaaagagctaactggtgggatgaagtatgttcacaaaatttttctgagatcccattgataacggatatgctaacctattgtggtcttgaagctgagatttataaagattaa

SEQ ID NO: 75798 - DNA, 1752 bp, Enterobacter aerogenes; identical to SEQ ID NO: 73074

SEQ ID NO: 75799 - DNA, 1776 bp, Enterobacter aerogenes; identical to SEQ ID NO: 73075

SEQ ID NO: 75800 - DNA, 2313 bp, Enterobacter aerogenes; identical to SEQ ID NO: 74078

SEQ ID NO: 75801 - DNA, 1950 bp, Enterobacter aerogenes; identical to SEQ ID NO: 74079

SEQ ID NO: 75802 - DNA, 2022 bp, Enterobacter aerogenes
atgcagcttaagaaggttttgatatctggttttaaaagtatttcaaatactcaccctcaaacaattgagttggagcatgagctaacttcattcatcgggcataatggaactggaaaaagtacggtgatggaggcacttaataaattattttcagtagaccattcattacgaggtctgtcggtaaatgatttccataatgttaatgaccgaagtgatggggattgtaaacaactatttattgaagcgtggtttagctttcctgagccagatgaaggaactgtaacaattccttctctaattgagcatcttactattgatcagtccgatgggggaattctctttagagtgcgattggaaggtaaactttcatttgagtcaaatctattaggtgatattgatgaagatgtctgggttataaacacaagcgatgatgtgtttgatgagtcaaataagcaaaagctatctgcagcagtcaggaattcgattcaggtaagctatgttcctgctaacagggatcctttattacagctaaaatattcatccagagctgtgttaggtcgtttgttgaaagctattgaatggtcaggtgagcatcagggtggttttgaggaacaggcggccaaattaaatagtttagcacagggtaatccggcattaagcgaaataacagaagcaataaataccagttgggggcacgtttataaagggcgttatttatccaaagcatcgctaaatttcccattggcaaatatagatgagattctcaaattaatacaattgcaatttaatccggatgaagcaggtaacacagttaatgttgataggttaagtgatggacaaaaatcattagtctatttttcacttatcaaagcaatgtttgatattgataagaaaacccgagaattgatttcttctggggttgcttctaattttaatcctgaaaaaatgaaattgcctatatttagtatgatttcattggaagagcctgaaaatcatctttctcctcactatctgggtaggataattaagttagttaaagattatggcagtaatgagttgtgtcaagtgattatatcatctcattcttcatccatattaagtagaatcgaaccagagcaaatacgccattttagattagacaaggattctaaaagtacaatcgttagtgctctgacgttgcctacgaaaaaggatgagctttctaagtttattaaggaggcagtaaaagcatatcctgaaatttatttttctaaattagtaatattcggtgagggggatagcgaagaggtaataataccgaaggtactggaactctattcgacagacattgacagtcattcaatatctgttgttcctcttggtgggcgtcatgtaaatcatttctggagattgctcaagtcgttacaaataccttatataactttgttagattttgatattgatcgtaatggtggtggctttggtcgaatgaaatatgctattgaacaattggctgtatttggtgtaagtggcagtcaatatatccataaagacatttcagcacacatcccagcgtgggatagtaaacaaaaccctaaagaatttacattgacgtttaattctggagatacagtcaatattactgaagcattagaggactgcaatatatacttctcatcacccttagatatcgattatgcaatgattgagtctttccctgaaatattctgtgtagtcgatgaaagtaatggggagcaaggtccagaagaaatcgaacaagggaaagaaattgacctaatcaaagctgtgttgaaaggtggaagctctggagtccgatatcctttttcaacagattatttgaattactttttatggtatcgctatcggtttttatcaaataagagtaagcccgcatcacatattagaatgtttgctaaacttgaacagcagtatactccggcacaaatcatagaaagattaccttctgagttgatcaaggttgctgaaaaaactgtcaaattattgtcggagattgttgaatga

SEQ ID NO: 75803 - DNA, 1674 bp, Enterobacter aerogenes
atgacggtgcaatggcaaccctctgagggaataaaaccaactgatgagttaatggctatcatcacttgcgataagtctgtttcagttcttgccggtgctggggcaggtaagacagaggtgcttgcacagaaagcaaattacttattgcagactggtaaatgcatttggccgaaaagaatactatgtctttcttataaaaaagaagctcaagaaaatattagagttcgggtagtgagtcgttgtggaaagaaatcggagcgttttgattcattcactttcgatgctttctgtaaaagtattcttgaccgtttcaaagacattttgccagaagaaaaacgtcctgataatggatatgatattgtttctaagcctaaagattgtaatggcaaggataaattatcctttgacttgataaggaagttgtctttagatattttgagcgaaaggggcgacatagcaaatcttttttcttttagttattcacatgtttttattgatgagtttcaggatacacgtgctgaccagtataatataattagattactttttaaggataagggtacacaattattggctgtgggggatattaatcaaagtataatgttatgggcaaatgctagtccaacagtattccaggattattgtaaagactttcattctgaaagtaagttgcttatgcaaaattttagggcgaatgaggaaattcaggatgtattaagatgttttgttcattttgtacaagatgaaattaatttcctcccaatgactcgagatgttgaaaattgttcggttttatattataaaaacgaaattactgaagctgatgatattacaaaaagaatagaacggtttatttcctcaggtgtaaaggaaaaagagatttgcattcttacgaaacagttatctgcacaatatacacaaaaacttagagataagttaaccgcaaggggtatcagaaatctagatatgacggagttgcaggactatttaaaggaaccattaggaaagattttttctgcactttttaaagtctattcttcgagatctccttcaggttatactgagctttgtgaattatatcttgcgttgcataacattgaacgagggaatgaaaaagaagagcttttgattcgtgatttgtctgaaaaaatatcaattaataggatgaaagtaggccgctcatcaagtccggatttaatactatcttgcattaaggatattattgatttttttggagtgaaaaaaatgacaggccgttggagccaatataaatctaaagctttttgggaaaagctatggatgaatcttgaacatcatttacgttatacaattagtgttactaatactgttgctgaagctgctgggatgttttcggcagaaaattctattcaagtgatgaatatccataaatctaaggggctagagtataaagtcgttattcttttggggttagaggatcaggctttctggaattaccaaaaagccaaatttgagaatgattgtgcaatatatgttgcattgtccagagctaaggaacatatacttgtgacttcttcaggatatagagaacatagattaaataatggttatgataatagaacttctacctatgcaatggttaagccagtgtatgcttttttacaaacgagctgcaaatttcagatgatcaaatga

SEQ ID NO: 75804 - DNA, 1701 bp, Enterobacter cloacae
ttggaaatatcatatctgaaacttaaaggttttagaaattttaaagatgcacatatcaattttaattcgaacactctgattatcggagctaatgatgttggcaaaagtaatatgctgcattcgctaagaatgctattagataaaagtgtatcagattcaggaattgaaccaaatgagcttgatttccatttagaaaatggaaattcatgtgaagagtttgagattattcttcattttaaagatatcaatgaagatgcggtcctttcaattttgaaaggtaatgtcagtgactctggtgaatcttttatcaagtatgttgcacaaaaatctgatctcagctacaaactttttataggtgactctttagagtctttacaagaaattaactctcgttattatcttaagttcgttaatctaaaatacattcagtcacaacgagatttagaaagatttatccgcaaagaaaaaagacaactcttaaaaattgcccaacaatcattgaactctgatgaaagaaaagaagatgaagatttattaggagagataagtacagatttgcagttgatcaatgataagatatctcagcttgtatatgtagaaagagctacaaaagaaatcaacgatgagttgaaaaaacttgcacatcattattcagagtattctgtgcaactagatactggggcaattggaataaatgattttattgataatctacaacttgaagctaatacaaatggttctaacgtaatgcttggaggagacggacggaacaatcaaatattattagcattatggaaagcgaaaagtattaaggaacatgatatcgataacgaagtcatcttctatgttatcgaagaacctgaagcacacctacaccctcaccaacaaagaaaattggctgattatttgatagctgaaatcccaggtcaaacgatcatttcatcacattctccccaaatagcggtaaactttgagccagactctataataagattgcttgaccgtgggggacacactgtagccgcaagtgaaggatgctcaaaaggtatttcagatggctgggaggatatgagctatcggatgagtatattaccagcagaatcatttttttcaaatggcgttttcttaatcgaagggccatccgaaattttgttttatcattccttagctaaaagtttgaatattgacctagattatttgaatatttcattgatttcagttgatggaatatcatttaaaatatacgcagcaattctagatgctttagaaattccatgggtaatgcgcactgataacgatgtatcaaagctaaaagataaagaaaagtggcactatgcaggtattaatcgatgtttagatatagctggtatagaaaagtttgagcatagcgacaaaaaaatatcttctcaagatactcttgctaacggtgattggcaaagagtttctgatgaagtgaatagatctggaatatatttatcaaaaattgatttggaaactgatcttgtagaagaattaggtgcttcaatattagatgcactagataaaaaaaataaccaaagcgcaatagaatatttacaaaagaaaaaagcaataagaatgcgcatacttcttaagaaaattaaaaatgaccttgataaacttagtatgggtgatttggttaaaccgttacaccatcttgtaaaaatagttaaaggtgaatga

SEQ ID NO: 75805 - DNA, 1626 bp, Enterobacter cloacae; identical to SEQ ID NO: 75205

SEQ ID NO: 75806 - DNA, 1926 bp, Enterobacter cloacae
atgaagcttgaggcaattcgattatctggtttccagtcatttggcaaagtaccaaccgaattgagcttggaagatgttacctatctcattggtcctaatggatcaggtaaaacagcagtacttcaggctttatgtcgactttttgcgtttgatccaacattgcgtcgtgtccaacgatcagatttccatgtcccttttgatgaaggtgaagttcctcctgagagacagttgtggattgaagctgacttcctgtttcacgagcttgctgaggatgaggataacagtaccgtggctcctcattttggtcatatgcgacttgatgagccagaaggtattccacgtgtgcgttttcgcctcactgcaactatgggaatggatggggatattgaggaaaacttagtatatgttttggatgtcaatcctgatagttcacctcaaaccacagctcaagtaacaagggcagaacgtaataatatccaaattcactatttgccagccagacgagatcctgcagaccatattgcttacggtgctaatgcattactcggacgtttacttcgtgcagtacgttgggatgatgagcgtacagcgattaaggaattaaccaagcagataagcgagagcctagcagctaacccctccatcaatgctttcagtgaaagtttgaaattaacttgggcaacactacacaaaggcaaatttttctctgatcctaaaattacatttgtggcttcggaaattgaagcattactacgacatttatcggtctcatttactcccggccatgatggctcgcttgtcgatttttctcggttgagcgatggtcaaaaatcgatgctttacctttctcttgttctgtcatctcaagcgatcggtagagctgtgctcgcagagaaagatgttacatttgatcccgacaagttacgccctccgatttttacgctggtcgcagtagaagaaccggagaatagcctttccccccattacttgggacgtattgtcagtgccttgaataccatggcaaagaatattgatgcgcaagccttaattgctactcatgcaccatcaatgttgcgaagagttgatcctaagtttatacgttacctaagacttactgaggaaagaaaaacacgagttgcgtgtatcaaattgccacctaaagcagatgaagcacataaatttgtgagagaggctgtacaagcattccctgagatttatttctcacgcttggttgttcttggcgaaggagatagtgaagaaatagtactgccgcgtttgctccaggttaaaggtactcctgttgatgaatcagctattacagtagcaccattaggtggtaggcacgtaaatcatttctggcggttgctttccgcactgcagattccttatctgactttgcttgatctggatgtagctcggtacggtgcaggatgggggcgaattaaatacgttaacgatcagcttgctgcatttgagccggagaaaatactcccttcagaatggaaaattacaagatggaatgatgaagctacaccagtaagaactcaccatttttttaataaaggcacacaagacatttttgaagaacttgaaaacagatctgtgtttttttcctttcccatggatttggacttttccatgttgctagcttatcccgaagcttatggagttgaagaagatgagccggacgagtcaacaataaaagcagtcctaggcaaaaactataacaatgtttctcaatatagtgcagatgaacagagcttgttcgctacttaccatcaacgttttaaattaggtagtaagccagccgcacacattgatgctttagcgaaactaagcgacagagaattaattgcgaatattccagaatcgctgaatagactagttgataccgttattgtcaaacttggagaattacctgaatga

SEQ ID NO: 75807 - DNA, 1668 bp, Enterobacter cloacae
atgattcctattgaagcatggcaacccgcagatggattaacgctggaaccaaatgcaaaacgagcagcaaaagcccgcaaacgttgcttagctcttaccgctggaccgggcgcaggtaaaactgaaatgcttgcgcagcgggcagatttcctgttacggacagggacatgtcggtatccgaagcggattctcgctatctccttcaaggttgatgctagtagaaatctaaaagagcgcgtcgaacggcgctgtggtgcagaccttgcctcccgtttcgatagttatactttccatgcatttgccaagcgaataattgatcgctttagaccagtactgaaaggaagagaggcattagattcagactatacgatcgttgataagaaaatcagtatttctcgttcccaaatcgaatttagtgatcttgttccgttggctattaaaatattgcaaaactcaaaaattgctcgtaattctattcgtcagacttacagcgatattttccttgatgaatttcaggattgtacaaatttgcaatatgaattggttaaacttgcttttctagggactaaaatccggcttactgcagtaggtgataccaagcaaaaaatcatgggttgggcgggagcgatggatggtatattccaaacatttactgatgatttcaatgcagttccacttaacatgtaccgtaatttccggtcaaagccacaattgctgcgagtacaaaacgaaataattcgtcggcttgatcttgcatctgtcatgccagatgaacaattgaatggtgacgaaggtgagattcatgtcgagagtttcagaaacagtcaagaagaagccatttatttggcaaatattattaatgactggattaataaagaaggattggcaccaatagaaattgccgtcttagtttctaagcagttagatctctatgctgaccacctaatgatggagctggaattacgaggaattccatatcgaaacgagcagcaaatgcaggatattactgttgagccagttgcacgtttaatcgtagattatctttcatgcctctatggaaagcgtgaacccaaggcttggatccgtctgatgaatcagctgattccttttgctgatgaagaagtacagtcctgtgcgcgaaaggaccttgatcgtttgttaaaaaaacagcgcaaagaagcaactagtgctgaacagcttgattcacctttttcttgttggtggaagtttgtaaaggagtttttaaaacatattggcactgatacaatcgtagccctatcacctgattacgaatcacacaagcgtctacaggaagtttttcgtgataccaaagcaaggattgaagagttgcttgaaattgaatcagatttgccacaagctcttagacggtttacggatgaccaagcagtcagaattttaaccattcacaaaagcaaagggcttgagttcgattctgtaattataatggcggtggaaaacgagattttctttggtaaccaagatgagaatcgatgtgcattcttcgttggtgtttcacggacgaagagacgattatttttaactcatgctgcacagcgtgaacggcctgctaatgccaaacgttgggaagtccatcgaactgttcaatccgaatatattggttatgttacaccatttattaaacggtaa

SEQ ID NO: 75808 - DNA, 2313 bp, Enterobacter aerogenes; identical to SEQ ID NO: 74078

SEQ ID NO: 75809 - DNA, 1950 bp, Enterobacter aerogenes; identical to SEQ ID NO: 74079

SEQ ID NO: 75810 - DNA, 2217 bp, Escherichia coli
atgtttataagaaaagtagctttagtgaactaccggaatttcaaaggggctaatttttactttgataaaggtattaacacaattattggtgaaaatgcatctggtaaaacaaatttattcagagcgataaggttgctacttgatagctcaatgccaagatatactttaaaattacaggaaggcgatttcaaccgttcaataggtgaatggcgagggcattggataataattagtgccgagtttgacgatatagcaaaagatgaagccagccaatcactatttcttcatggagccgggaatgctgaagctgagattgtcagtcgagctacatatagtttaatattcaggccaaagtcatttattagacaaagtttatcaaaaataacttctggcgatcgttctgcacttgaagaaataattaggtctataactattgatgattatgaaactatccttgttggtaaaagctcagttgatttaagcaccccttccgtttataaaaaaattgtaggcgattttgaaaatataatattcccggagaaattaaatcatccagagttaggagttaagctacctaacatattaaatattccaaatgaagtttgtttgacttatatcaaggccctaagagatgttgtatctgattttcataataataaaaccaatcctctattaacacttctaaaaagaaagtctggtgagataagcactactgattttcaaccaattgctgatttggtacggaatctaaataatgaaatagaaaacttacctgacatatgtgctgtaaataatgatattacaacaacgattaaagacgctgtaggagatacttattctcctaaaggtatgtcaattaaatcaagtttgagcgaagagtctaatgaattatttcaatcacttaagctatttgtagctgagtcctcagatggccatgaaggagcaattcatgagatgagtctcgggggagcaaatttactatatctaacgttaaaattattagaatttaaatatcagcacgcgaatcaatccattgccaattttctattaatcgaagaacctgaagcacacatccacacacatattcaaaaatcactattcgaaaatataaaatatcataatacacaaataatttattctacgcattcctcaaacatctctgagattagcaacataaaaaatatgaacataattggcttcgtaaataataattgcgaagttttccaaccatcgaaatcattgagtgatgaacaatgtgagtttattcaaaggtatttggatgcaattagaagcaatttattattcgctcgaagtgttattttagttgaaggggatgcagaggaattattgattccaacattaatcaaaaaggtcattggactaagcttggatgaaattggaataagcttaatcaatataagaagcactggatttgaaaacgtagcgttgttgtttaatgatgaaaggataaaaaagaaatgtagtattgttacagatcttgatgaggctttttttgatattactattcctgagaatgccgataatgacaatgatgaaataaaagttaaaaagaaggcagccgcatctcaaaaatcgggagctgaacgaaaagtaagattacaaaacttcagtaataacaacgattgggttgaagtgtttttcgcagaacacacatttgaagttgacttcatcaaatcaggcaacaaatattatttgggcaagatcgtcgacgatgtctataagcaagcagccacaattgaagtcgccaaaaatgaattaaactcatcggatataagcatctccggagtgagagctctgactatggcaaattaccaaggaaaaggatggttcgcacttacactagggaaagtaattgatttcaaaacagcaattccggactatatatttgatgctatcaaattctctcacggtgacttcaacagacagcttaaatataagattttagaacaccgttacaattcagttgttgaacatgtttcttttgcacaagaacagataagaaagctaaatgaaccagaagatatacagctaaaaaacgaatggagtggctatattaaagcctatgaagatggactaaatgcttttactccaaaatggaatatgtttgacatactaaaagatgatgtggatgctcttaaaattcagatgatgaatgatcttccaaatgaaaataaagacattttaaggagaatataa

SEQ ID NO: 75811 - DNA, 1788 bp, Escherichia coli
atgtttacatgggagaaaggagaattaaatgaagagcaggaagacgcaattaatatgcccggtagcgtattattaatcgcgtgccctggtagtggtaaaactagaacattgacttataaaatagcattagagctttcaaagcttagtgatgataaaaagtatgttcttgcaataacttatacccataaagctgctgacgaaattaaagagagaattgagctattaggtgttgatacatcacaattatggatcggaacaattcattctttctgctacgaatggctactaaaaccatattctatctatcatgaaaatctaaaggatggatttaagatacttaatagctatgactcagaagaattgattactaatatttgctcgaattacaagagcgtaaaaacaaaattttacgaatgtaatcattactatacttcggaaggaatgcagctatcaggaactatcaaaaaacacgaagccataagaaatatactgaaagaatatcatctccagcttagaagcaataatcaaattgacttcgagcaaatgttatatttctcatttcaattgataagcaaacaatctatatcaaaaatactgagtggtattttctcctacatatttatagatgaatttcaagacactaaagaaattcaatatgccattgttgctaaaataattaaatctagcaagggtgctattgatgcttttatagtcggagatcctaaccaagctatatacggatcattaggtggatatgcaatatcacaagaaaaactggaagaaatgacggattctcatttctcatgtctaactttagataagaattacagaagctcacaaaggatcatagatttctatagaaatttcaatgtattacatagtgcaacaagttcggaaagcgagctgaagagttacaagagccttataacgtataatcaaataattaataaggtaaatttagttgatcatataagcaagtatatcgagcacaatatcaaaacgctaggcattgagcagaaggaaatatgtatccttgcaccatggtggatgcacctcgctgctttaacaagaaatttagttacaagacttccaaactataattttgatgggcctggcttagtcccattctcaagagatatcgataatttctggtacaagatcactcaagtaattcttactgaaccttcacccaacatgtatgttaaacgaatgcgctgggttgatgacatcttatcagaaatgaatttttctcaggtcgatgtccacaaactaaatccgaggctatttttaaatataattaatgatataaaaattgatgttgtaaatggactggattatctaagagatttcttttctgaattatttaataggatagaagtaaatatatcctcataccctcttttacaggaacattatgattgtttttttaaaagttcacaggataggattgaacgtttgaaaaaagataatgatcattttgagactcatataaatgcgtttcgtaatgcattcaaacccaggactggaattaaagtgtcaacgatacatggagtaaaaggtggtgaatatgacactgttatatcattcggattattacaagatatggttccaaattttaatgattcatctgatgaaagcgcaaaaaaactattatatgtcattggttcgagagccagaaaaaacctacatcttatttctgaaagagggaggagagggacatataaagattatgagtcaacaaaggttctatctggaacaaaattcacctacgacctagatcctttttaa

SEQ ID NO: 75812 - DNA, 1884 bp, Brachyspira hyodysenteriae
atgtatataagagaattaactataacaaattataaaaatataaaaaatgtaaaaattgatttaaaacatgaatattctatgatttacctaacaggtgaaaatggaataggaaaatcaaatattatagacataatattcaaattatttacatacaaaaaaaatttatttgaaaaagaagacttctataaaaatgaagaaaaaattgaaatagaaataaaacttgaattatatactgatgaaatatttaaagattatctttatagagataataataagtattttatgaaagtagtgtataaacaatatagtagtaatgatgaatatgaatggttttataaaaatcttacagaagaatataagttacataataatatattaaccaattttatctgctataaatatagtccaagagaatttgataataatttcatgtttaataaatcaaatagaataggaaaatttatatcaaaaataatagaaaatcaaataaaaaaatatcaaaatgatgataacaaattacaaaaactattaaaagaaaattatgaaaattgtaaaaatgaattaaatgaaatatttaaacctatatttaataaaccaaatcaagaattaaaattaaatattgaaattgatgatgaaataaagtttttattaaaattatttgaattagtacattatcatagtgatgataataaattatatttaaatcaattaggaaggggaagaggatattatctatatccatttatagattttttggcatttttatacgataaaataaataatacaaaatctcaaggttttaatactaatattattattttatttgatgagccagaagtatttttatctccatttttacagcgtcaatttatggatcattggttatcaatatttaataataatcaggactataaaattataaataatattcttaatataataactgatgataatgatgaaatagagtataaaattactcctatattttttgtgtccacacattcagcacatataataccgcatttagaattaaatgaaaaaaagaatatattatctatacaaagactttattatgataaagaaaatactgttaaagttgcatctcttgataaatatcgagctaaattaaaacagtttatgatttttgatagaaatatattagagggactttttgctaaaaaaattatactggtagagggtgatacagaaattggatttttaccttcttgtttaaatgctaatggtattaacattcatcaagaacatatatatattattaaagcggcaccaaataattttccaagtctagcaaaaatattctcaaaattacaaataaaaacatatatacttacagatagagattgtaaaaataaagagataaaagagcaaagaaataataaaatatacaaaacatatgtaaatgaagaatacggatatattaataaaagagtttatgatttatacgaaagtataaaaaattgtaataatgtaaaaatatttgtgtcagattattgggattttgaggaaagtattttagtatgtctaaaaaatcattttcaaaaaatatatattagcattggtaaaagtaatagtaatgataaaggtaaacttattgaaaaagtacaagatgaaaatttagatgaagaatttactaaaaagttattatatatgagaaaaaaacataaaaatataaatgataattataaattaataaaaagaataataaaagaaaatttaaaactagaacaaaatgaatataaaaacggagaaaaaataaattttggtaatatgaacaatgaagctatcaaaaatgttgctgaggaaaattataaacttcctaaatatataattaatttaataaaagaattaaaaaatgatgaatag

SEQ ID NO: 75813 - DNA, 1596 bp, Brachyspira hyodysenteriae
atgatgaatagtgataaagttaataaaatattagaaaaacacaaaaatgataaagaacagttagactttataacatctacagaacaatctcttacaattgctcctgcaggatatggtaaaacagaaatgttaatctcaaaacttaactatatcatagaaagtaaacaaattaaatatccaaaaagaattttagttttaacattatctaatgtggcaaaacatactattgaaagcagattaaataataatcaaattgtagacatatataattttcataatttagcaagtagaattttaagacttcaaggtaaacaatatttaaagattgactataaatatgaatatgaacataataatcttgaaaatgaaattaaagatgaatataaaaaaatgatttataaaataaatatagaatttcctaatattcaattaaatcataaaaagatagaaaaatgcataaataatatcaataccaaaaaaaagatatattatgagaatgtaatatattttgcaatagttctattaaataatttcaatataaatgaaatatataaaaatttatacagttatattttggtagatgaatgtcaagatataaatttattacactttatcttattaagaagtattgctgataatgaatataataaaatattttttttaggagatacatttcaatctataatgaaatttgctgatgctttaggggaacaaattgaagatttattaaataaatattttaatataactaaaattatagaattacaaaaaaattatagattagaaggaagagaaaatatatctaatttccaaaaaaatattagaaattacgataaaaaatcacaaatagaaattgatgaaaattttcaaatacaaagttttaacaattttgaagatgaaatatcatttattaacaatcaaattaataaaattacttctgaaaataaaaaagctaaaatagctattttatgccccacaaaatattctttatatgataagaataataaactcatagaaaaaatggaatccatatttacaaatttaaaaataaataatattgaatatatcaatacattattatttagtgataacttggaaaatgaaatatatgataaaataaaagatataaaaagattaaattacaataatatcatacgtagtatagaaaatgatcatttttataatgatgatataaaaaaattaatagaaggttatagaaactattgtttaaaatttggaatggattttaatacaataatagaagttataaaagaaaaagatttaataaaatatgctccttattgttctgtaaatctaaatatattaaatatacataaagcaaaaggagcagaatgggactatgtttttattccatttgtcaataaagaaaaatttccagttttttataaatgttctgaatgtagattaaatacttgcaatgaaattatagatacaaaacaatacaaagaagaattttatcaagctttttatgtagcaattactagaacaaaatatgggttatatataacagcaacaaaaaataacgcttcttgtttattttatcactcattaaaattaattaacaattttaattaa

SEQ ID NO: 75814 - DNA, 2112 bp, Vibrio parahaemolyticus
atgcatatcaagagcttggaaattactaattttagaaaattcaaagataagtctaacacggtgacatttgttgagccgacaagcaaaacagatgatgagtcgatgatatcgtcatcaacgactcttgttgttggaaaaaacaactcaggtaaaactacagtcactcaggcgcttaatatggtagtttctgagcaaagtaaggtatggggacacgatttcaactactcatatatcgatgagttactaagctcttatgagtcgggaagctttgaaaaattccctaatatgaggttcaaattaacatttgtaacagatcctaagttggcttctttagtgaactctaaaaaggtcatatcattaggtcaagcgacaaaagaagatcacaatgatctaaaagagttttcactcgtagttgattttcaaatagaaaacaagattaagtttcaagaagatgttcgtattctgttagagaaatgctcttcgaaaacaagagattttaaatttagaaagctattagaactaattagtgaatttaaatttgataaagtagtaaaatcaccagaaggaatagtaaaagctataaacatttctagtttaatagaattaaaggtaatatccgcggctaacaacattcacgacagtagattattatcaaaggcatttaataaaattataaaatacaaatatcaaactaatgataaagatttcgatgaggtaaatgagttaattagtaataataatgatgagcttaccggtaacattagagaaactcatgaatcagtaattgagaaagttctccagggtattgtcggaacagagagccttggcatcgaactaagagctgacttgacctttgataaacttatggatggcttaattacgtacgagcataaagatgcaggatttctagtcccagagggacagtttgggttaggctacgcgaaccttattagtatcataagtgagataattgattatattgagagaactcctagcacagataagacaaccaaagttcgattgatttgcatagaagagcctgaaacattcatgcacccacaaatgcaagtgaacttcattagacatatagatagtgctttgagaaaaatcatcggagaaggggaagagattaaaagtcagctcctcataacaacgcactcagcacacattctcaatagtaaggttcattcaagtggaagtttagataatataaattacatctacccgcatcaaaaatattgtgagaatgtgccaattaaagatgaagatatcagccccgaatcagggagaaaagatgaattctattttgttaaaaaacatattaagcatcaagttcctgagttgttttttgcggatggtgtgattttcgtcgaaggtattactgaagagcggttacttaacttttacatagaaagagatgaagtgttatcgagaaagcttatttctgtctttagagttgatggcgctcatgccaaagtatatgacaaactaatgaggcagttaagaataccatctttgatagttacagatatcgattttaaaagaaataaaagtgagtcgactttatcagaagaaactaagtcaggtaaagaaattacatgggaaatctatcctcaaatgactagtatctcagatgatagattttcaacaaataaaaccctaaagtactactttaattcggataaggtaaaagactatactgattattatgaagacagtaatatcaaagtcgttttccaaaaagaccctttagaaataattttgagtgagtcagaacaagcaagatattatgcgtccagtctagaggaagccttggttctagagaactatgacaatgatatctttagaaatgtgttaagaagtactatacaaaaaaattatgatgagcttgtgcctgaggggacatgtgaatatgttaatttagctcataactcatttaagatacaaaaagagttgaacacgtctaaatctaaatttgcaaacaacataatttatgctctcgtggtcaatgaagaatcggcagctttaccaaagctacctaactatattgaaaatgggcttgaatggttagcttcaaagttatcaggagctgagggagaggcatcgatatga

SEQ ID NO: 75815 - DNA, 2073 bp, Vibrio parahaemolyticus
atgacaatacactcgttgcttgaagaagaaaaacaggtccaagctcagatctttaaaaacttggaagaaaatcggtcattttattttcttgcaggagcaggggcggggaaaacgtatgcacttgttgaaactcttaagtacagcttaaatcaaagcatgcagaagcttgatagaagtggtagccgaattgcgtgtattacatatacaaatgcagcaaaaaatgaaattattgagcgcttctatgatagtaattatttgtgtgttagtacaatacattcttttttatgggaaatcatagagccataccaaaaagaattattaggagtgcatagggaatatattgaacagttgatttctgatattaaatatgaaatttatacttgcgacgttaaaggcaaagcccctgcttttaagaagcttagggcattatctcaggatgaaagtctttttttaaatgaaaaagtaatagcaaatacgaaagaaatttacaattgctttaggtgtgaagacgcatcaagtttttgggcagagctagagtctattttaggtggcgatatttatactaaaattaagtcctctaaggcagatgtggaaaaaattcttagaagtattataaaaatatctaggttagagttctgtgcaaaaatgatcgattgcaaagactcgaaatactcaactgtttcttataatgaaaagggaggaagagaaattctccataagaatttgattggtcatgatacattgatcgattattcattgactatggtggagaaatatccattattaaggagggtgattcttgatacttttcctcaaatatatattgatgaataccaagatacccacactcaagtgataaaaattatggatatgcttataacctatagcaagtctcataatattgattttattgttggtttttttggtgatccagtacagtctatttattctaataacgagttggcgttgtcaattgataatgaattagacatggtgtataaaaatatcaatcggcgctcacgcggtggaattgttgatttaatcaatgtaattagaggtgatcaccagaaaatacatcaaaaggctttaaagaataatgatgaaagtgatatctttatttcatcttatggaaaggaaggtgtggatgaaatttgcttcattaacgataagatagaagaggttaagattaaatggaaaataacaagcaagaataaactaacatgcatggttttgaggaataagactattgcaaacctatgtggttttggaagtctttatgatatatataacaatatatattgtgataaatcatctttcttatcttacgcgtcaataaatgatgaggtattgagcaaggatattgtgaaattaggaatcttgccacttttgattttgaaaatttccactccaatatttaagattaaattcgaaagtgattctccgttgtcagatgtttttagtgatgagtcgttggacaaccatactttggaagagatatcgacatgcttagattatgtaagaaatggggggtattcatcattatctgaatattcttcagatttactcaagaaaagtacagaaagtgataggcttaaagcactatatagtgatttagctaaaggttgggccataaattcagaagacatcaattgcccagatgacattgttgattgtttatgttactcgatatctagtagcgcaagtgacaagcttagagataatgtaaaactcattctatctttagatttgaatgaaatatttaattggattcgttttgtttataagatcgatattgatgacgaagtgagttatatcacatgtcacggttcaaaaggtttggagtttgacaatgtgttagcaattattgacgacaaatttggaaaggattctaataataaaaatgttaaagataagtttactaagctctttgtttctggattccatgagaatcatgacactgatatggagaaaacaagaaacctcttctatgtgatttgctcaagagcgatccggaacttagaaatagcgctcctaaaggaagggagtgtaaatgaagaaataatttttaagtaa

SEQ ID NO: 75816 - DNA, 2241 bp, Streptococcus agalactiae; identical to SEQ ID NO: 72978

SEQ ID NO: 75817 - DNA, 2019 bp, Streptococcus agalactiae; identical to SEQ ID NO: 72979

SEQ ID NO: 75818 - DNA, 2241 bp, Streptococcus agalactiae; identical to SEQ ID NO: 72338

SEQ ID NO: 75819 - DNA, 2019 bp, Streptococcus agalactiae; identical to SEQ ID NO: 72339

SEQ ID NO: 75820 - DNA, 1965 bp, Microvirga vignae
atgtatcttgaacggcttcatttgacgaatttccggtgcttcgggccgcagactacgaccatcgacatggcgcggggtctgaccgcgttcgtcggcgtcaatggttcgggcaagacggcggtgatgcaggcgctgcttcggctgttcggggtcacgcccgagcatcggcgggtgcgccggcaggatttccatgtgctcagttccgaggcgggcaccccactcgaacgcgagttcgtggtcgaggccatcctgtcctttcccgagctcgaaggcgcggatggccacgccgccgtccccgaattcttccatcagatggcatgcgaggaggacggaagactgaaatgtcggctgaggcttgaaggccgctggaccgacgatggctcgctcgaaggcgtgatcgaacagaagtatcaggccattcgcgcgctcggagattttgaggacggggatcgctcggacctgcggccgaccgaccgtgcgcgcatccagatgatttacgtgcccacgagccgggacggctcctcgcaggtgagcgcgttcctccgcggccgcctgtggcgcgcgatcacttggtcacagggcatgaaggacgtgttcctggacgctggcgggcgcctcaacggcgccttcggcgacgaggcggccgtcgatctcgtctccacagcggtcgagcggcgctggcaacaggtgcacagcgccggcaccgacacaaagccggtgttccggccggtcgacctccgcttccaggagttcatccgcaaggtcgaggtcgtgtttcatcccgacgaggagggtcgcgatcgcgggctggaggacctgagcgacggtcagcgttcactgttccatctcgcgatgaccgccgcgaccctcgacgtcgagggtcggatcgccgacggctcggccggcgccgcattccaggctggcagcgtgcccttgccggtgctgacccttatcgcggtcgaagaacccgagaacaatctcgcgcccttttatctttcgcggatcgtgcggcagatagaagagctggccggcacggggcgggcgcaggccttcatctcgagccactcggcgagcatcctcgcacgcgtcgatcccgaccaggttcggcacttcaggctcgaaccagccgatcgcaccgcacgtgtcaatggcattcggctgcccgacaacgacgaagacgccgccaagtttgtgcgcgaagcggtccgcacttaccccgagctctacttcgcgcggttcgtaattctcggcgagggcgcgtcggaagaggtggtgctgccgcgcctagcggaggcgctcggcctcccgatcgaccgatcgttcgtcgcgatggtgccgctcggcggccggcatgtaaaccatctctggcgattgctgagcgatctcgctattccctacgcgacactcctcgatctcgattggggccgtgatggcggcggctggggccggattaagacgacctgcgagcagttgttggcggtcggccgaacctcgacggaggtgttcggcaccgagctctctgccgccgacatcgctgcgcatctgaccgagctcgcggcgcgcagtccgagcgacaccgacggcttgcgacagtccatcgttgcgcttcgccgtttcggcgtcttcttctcggcgccgcttgatctcgactattccatgctgacggccttcttcgcggcgtatcagcagctggagcccggcatgcgcgggccacgcgccggggacccgcggccggcggtgctcggcaacgaaggtctgccggcgctctacgacgcgagctatgacgctgcgctcgtctggtatcgatatctcttcctgggccgcggcaaacccagcactcatgtgcgtgttctggcgcggctcgatgcagaaaccctgaaagccggcattccggaagagctgaaggcccttctggactatgtcatcgccgcgctcagtttcacgccagcggaaggggcctgctga

SEQ ID NO: 75821 - DNA, 1884 bp, Microvirga vignae
atgccgctcgtcgtacccgatgcgtggcgaccgcgcggcatcgccgatctcgaaccgaacgcctggcatgtcttgcgccgtcaggggaacacctgcgtggtcgccggccccggcgccggcaagactgaatttctggcccagcgcgctgcctatctgctggagaccggcgcatgcccggagccacaccgcgtgctggccatctccttcaagactgacgccgctgaaaacctcgccgcccgggttcgcgagcgctgcgagcgcgctcaggccgatcgcttcgtgtcaatgaccttcgacgcgttcaccaagagcctggtcgaccgcttcctaccggcgcttgcagccgactggcgcccgacccgaccctatgggatcgacttctcgaggcggccgcaggtcgaggatttcctgacgcgcgcgcgcttggcggccccgcagccgtggcaggcggtcgtcgccggtcttggcccgtccgactttgaatccaagatcgtcggctcctttcggctgccgcttcaggccatggcgccggccactgcggtggagttcgtaatcgagcgctggtggagcgagctgctgcgccggcccggccgctcgcttgtgaccttcaccatgctcaatcgtctggcggagctgctcctgcgcgcgcgacctcagatcgcgcgcgccttgcacgcgacttatcccttcgtgttcgtcgacgagttccaggacacgacccacgcccagtatgattttctgctctccgcctttggagatccgcgcatcaccgtaacggcggtgggcgacgacaaacagcgcatcatggtctgggcaggcgcgcgcacggacgcgttcgaccgcttcgaagcggagttcgcggctgagcgtgtgccgctattggtcaattttcgatcgtcgccggatctggtgcgcatccagcatgtcgtggcacaggcgctggacgccggtgcgatcccgaccgtcgcccagtcgggccggcgcgtggacggcgacgtcgctcaggtctggacctgtccgaccgcggctggagaggcgcagcatctggcgggctggctggcccaggacatggcggctcgcggaacgcggccgcgcgattatgccattctcgtgcggcaaaccgccgatcggttcgaggagcagcttgcgccaacgttggctgcagtgaacctgcgtctgcgcaacgagagccgcgcgctcggccgaacgacgctgcaggatctcctggtcgacgcttatgccgagatcgcgcaggccttgctgcgcctcggcgtcgcccgtcgcgcgcctgcggcctggcagatcgcgtcggatgcggtgctccgactgcgcgacgccgacccggatgacgagctggcgtgtctgcgcgccgaggaaggtttgagcatgtttctccagggcttgcgggcgacgatggcagcaacgccgccctcgacggccgcggccgaagcgcttgccgacgtggtgctcaccttcgtcgacgcgcaagcgcttgcccggtctttttccgaatatgcgacgggtgatacgctcgccatcgcgctcgaagcctttcgactgcacctcgctgcatgtgcggacggcagccccgattgggcgacctgcctcgattgcttcactggggtcgatcaggtgccgctgatgaccgttcacaagagcaagggtctcgaatacgacaccatcctcttcgtcgggctcgacgacgcgatgtggtggagccacagcgcgggcaatccagaagggatcgccaccttcttcgtagcgctgtcgcgcgccaagcagcgggcgattttcaccttttgccgcgagcgcggccaacgcacccgtgtcgcggacctctatggcctgctcaccgcagctggtgtgccggaggtggcatgctga

SEQ ID NO: 75822 - DNA, 1755 bp, Streptococcus agalactiae
atggaatttaaaaagttagtaattgaaaactttcgtaattttagttctattgaaattgacttatcaaataaaaatgtgatattcgggatgaacgattcgggaaaaacaaatcttttatttgcaataagatatttgttagatagaagtatcagaaataaaggttttattaaatcagattatcataaacatgatattagtaaacctataaaaatacagcttgaaattgatttgtctgatagggaagaggatgatgaagagtcactaaagtcttcacattcacgtttattaatttcaacagttgctggagcaagaaaaaatgcaagtttagatacattcctcatttccttggaggcgatgtatgatgagaaagagttgtttggaaatccggtattaagttggggctctactttagatgatttagtggaagtacctcaatatggtacaaggagtgatattgataagattttccaaatagtctatgtaaatcctgcgatagagttggatgcattttttaagcgaaatagaaaattattgttctcagatgatactaaaactgatgaagatgtagcacttgagaaagagattgagagtagcattattgatttaaatacaaatatttctaatctaagtttaattactagtgttcagtcacaactgacagatgcctataaaagctatcgtaaagaagatttagagataaaaatccaatcagaaatttcaatttcgggttatttggataatcttactccgtatataaattggaatggagacactcaaaattatccaacatctggggatggacgaaaaaaacttttatcatatgctattaatcatctgatttcagaaaaacagtacagtagtaaagtgataatttatctaatagaggaaccagagaatagtctgcacagatcagtacaagtatcactttctaaacagcttttcattcagaatatatacgaatacttcttcttaacaactcattcagcagaagtgctttatgaaatgaataatactcagctcataaagataactaatcaacaggaagcaacaggacattcttcatactacaaggtcccaagtgagttttcaaatttaaagaaaaaattaaatatttcattagcgcagtctatcttctatgatagagttcttttggttgaaggtccgtcagaatactacttattttcttctatttttgaatatattagccctgattttgaagcagaaggaaaatacttgttacaagttaatggtataaattttaaaccttatgcaaagctgtatagagaattaggtatagaattttttgtgaagacagataatgatttaaaggctagcagaggtgataaacatgaattttctccgatagggttcaatcgatgtattgagattcttgatgacaatatcgttgctaaattaaataattatcgtatagatttctcttcaaaggaagaaagaaatcagaatataaaagctaaaaaggaagaactgtatactatggaatattctttagtatctcaattgaattcaaagagactatatatatcagagattgatttagaaaacgatttagctaaggtactgtccgaaagtgagagaaatggaatgaatgtatcagattttgtgaattggttacaaagtagtaagcagtataatatgttggaatatattgagggggaccttactccagaaattgcacacaaaattgtgaaatcagagtattttaaagttttagtggagtttttagactatgagtga

SEQ ID NO: 75823 - DNA, 1542 bp, Streptococcus agalactiae; identical to SEQ ID NO: 73941

SEQ ID NO: 75824 - DNA, 2190 bp, Staphylococcus aureus; identical to SEQ ID NO: 71904

SEQ ID NO: 75825 - DNA, 1794 bp, Staphylococcus aureus; identical to SEQ ID NO: 71697

SEQ ID NO: 75826 - DNA, 2190 bp, Staphylococcus aureus; identical to SEQ ID NO: 71982

SEQ ID NO: 75827 - DNA, 1794 bp, Staphylococcus aureus; identical to SEQ ID NO: 71697

SEQ ID NO: 75828 - DNA, 2190 bp, Staphylococcus aureus; identical to SEQ ID NO: 71696

SEQ ID NO: 75829 - DNA, 1794 bp, Staphylococcus aureus; identical to SEQ ID NO: 71697

SEQ ID NO: 75830 - DNA, 2190 bp, Staphylococcus aureus; identical to SEQ ID NO: 71982

SEQ ID NO: 75831 - DNA, 1794 bp, Staphylococcus aureus; identical to SEQ ID NO: 71697

SEQ ID NO: 75832 - DNA, 2190 bp, Staphylococcus aureus; identical to SEQ ID NO: 71696

SEQ ID NO: 75833 - DNA, 1794 bp, Staphylococcus aureus; identical to SEQ ID NO: 71697

SEQ ID NO: 75834 - DNA, 2190 bp, Staphylococcus aureus; identical to SEQ ID NO: 71982

SEQ ID NO: 75835 - DNA, 1794 bp, Staphylococcus aureus
atgacaaatatcttcgaaaaaatcgtaaatgatttaaatttagaacaaaaagatgttgtggaaagtgaagataacctttatgtaaatgcatgtcctgggagtgggaaaacaagggtacttacaaggaaaattgcttaccaagcaattaaacacgatggatcactaaaaagaataattgctatcacatacactaatagagctgctgaagaaattaaggaacgcctaagtttacttagtatagatgatgatattaatatttgggtggggacaatacatcagttttgtcttgaatttattatttatccttttaaaatgaatctctcaagagtatcaaaaggatttacaattattgatgattatactcaaagagcttacgtcagccaaattaataatatgctgaatttaaatctcaaaacgtatgaactgaacaaaattgatttgtcactttctcatgattttaaaattaatgaagttcagtatactcaagtttctgaaatgtatcacactatgttggaaaaaaataaagaaattgattttgatatgattttactagtagcgtataaaattttaactgtaaacagtaacgttgcacgtaatattgctagtaatataagggcgatttatgtggatgaatttcaagatactagagaattacaatacaatgtaatagctaaattacttcaaaacaaccctcaaattcagtcaatgtttgttggagatattgaccaagcaatttatggatcattagatggtatagctaaatcagttgaagaactagaaatgctaactagtcacacttttcaatcaaagacgctacatggctgttacaggtctaatcagagattagtagacttctactctaattttcagagttgtccttacgagattgaaagcagagggaataataaaaacgaccgtggttttataagttatgattgcaaagttactaaggaggatttacccaacataataaaaaatataataaaggaaaagattgaaagcggcattcatgaaaaagatatttgtgtacttgctcctcaacactatcctctgttttcactgggtgagtatttaaagaaagaattaccgtattgcaattttgatgctataaatatatcaccaattaaggtaaataatcatagtttatttttcaagttagcaattttgtactttactgaatcaggtgaaaaggttcgaagaagaaagctaattgcaaacgatattttaattatattaaaaaatgaatttggaatagaagttaaagattattttattgacttagattcattacagctaataaacagtgtgaaaagaatgtatagtggagacgacaacggtgttgatttatacaaatttgttaccaaacatatatttgttaatcttaatattgacgagaaaaattacccgtctatttttaagcactatctattttttattaacgaagtagaagatcggataaaaaataattcattatctagtagtgtatctagttttaagaagatgtttaaatctcgagatggtatcacacttactacagcacataaagttaaaggaaatgagtatgatactgttatcgctattaatcttctaaacgggaaaattcctcattggaatgaaatttttaatgtttctgataaaggaattagttcagcgagaaaactactatacgtaatttgttcaagagcaaaaaataatttatttcttttctcagaggtgggttattttacgagtaaaggagacttgctttatcccactcaattattagataaaatagaatttgattataatatttaa

SEQ ID NO: 75836 - DNA, 2100 bp, Enterococcus cecorum
atgaaattaacaaaagtaattattaataattttagatcattcggtgacagtcaagttattggatttaacaatcaaactgtattgattgggaataatagttcgggaaaaacaactgtattacaagcattgagcaagctgttttcggataaacaaaatgatagaataattcggaaaagtgattttcatttaccaaagggattaaaacctggtgaaaatagtaggaccctttttatagaaactatttttgagtttgatgaactagatggagctacttatggtccagcgattccatcatttttcgaacactttacactttctcaagatgatgcaaaaccttttctacgaatcagattagaatcttcttgggaagatgatggaacagttgaaggaagtgttgatactcaaatttattatatttcatctgctgaagatattattaaagatgaagataagcaccgtgctcctagaaaggatttggataaaattagggtactttatgtacctgcttcaagaacgcctgagaaggagttgggtaatgcttcaggtagtatgttaagtaggttagtaaatagtataaattggaccgaagatgaggtaaatgaaattacagataaaattgatgagttgaataacacctttttatctgaaaatggagcattaactcagatcaacaatgagattcagaaatcatgggaattatatcatgaagataaccgtttttctcaagcagagttgattattaattcttctgagatggcggcagcacttagacagattgccttaaaattttcaccaacaaccactgaagaagcatttacagtttcagatctaggagatggactgagatctattttttatttttcacttgttgattcgatacttgatattgagttagagattacaaaagatcgtgaagaaaatcctgataatccaagatttaagctgatacccccaatactaactatcttagcaatagaggaaccggaaaatcatattgctccacatcacattggtaaactgatgaaacggtttaaacagttgagtaataatgacaactctcaagtaattttaacttcacactctccagctattgtaaaaagaattgaaccagaagatttgagatatttaagaattgaaaataatgatagagtgcttcaaactattgtttctgatatacagctacctcaagccattgatgaatcttataaatacattaagggagcaattcaagcttatccggaactatattttgcgaagttagtagttctaggtgagggtgatagtgaggaaatgttactaccaaagttttttgatttacttggacgggaaattgatagttctcagatttcagtagttcctttaggaggtaggcatgttaattatttttggaaattattgaacgatctcaggattcctcatattaccttattagatttcgataatgaaagatatggaggtggctggggaagaattcaatatgtaataaaacaattgatactaaatggggttgctaaagaaaaacttatcactgtaacaaccgaatctcaaaaattacgagttctaaatgatgatgagattgataaaataaaggactggaagatttatagacctgataaccagttgcttgaggggtggattaaaatgttagaaaagttcaatgtgttcttttctgcgccacttgatattgatttcttaatgttacagtattataaggattattatctaaagattttatcaaaaaatgaaggaccaattatttcatataataattcagatggaaatagtaaaaaagtgaagttgtcagacttgaataaatctgatcaactacaattagaaggcttcgaaaagcgtatcggggaagctatacaagctactttaaaagataagagtggcccaggggatagttttactagagaagaaaaagaattaatgatttggtatcaatatttctttttaggtagaggaaagccaacaactcatatgcaatttttattatcaatttgtgatgatgaattaaaaggaaacttacctcctgtatttaaaaaaatggttagacgtgcggaagaaatacttggagatattaaatatggtgaagagtaa

SEQ ID NO: 75837 - DNA, 1818 bp, Enterococcus cecorum
atggtgaagagtaacgattggtttcctaaaggagtcattaaattagaagatgctgctttagaagtagttaaagatgttaccaactgtctagtcattgctggaccaggtgctggaaaaactgaattactagctcaaaagttagactatctattctctacaaataaatgcgtttctcctaaaaaaattctagcattaagtttcaaaacggatgctgcatcaaatttgaaagaaagagttaagaaacgttatggtgatgaatatgcttctcgttttacctcattaacctattcggcttttgaaaagagaattttagaccaatttagagatgttctacctgagaacatacgaccatcaagagattatttgattgaagattggggtattataaaagaactactctctatagatggaattaatgttaatggatggagaatgttagatataagagattttgtcgaaaatattatacttaatgacgggaatactcacaaattaaaaaaggatttactaaaaggaacacaagataataagccggtcctcttgtatagacaaataacaaagttgagtactcaaataatagatactaacgaatacatccgaaaagcacttcaaatgacatacgattttgtatttttagatgaatttcaggatactacatatgaccagtataatttattaaaaacttgttttttaggttcgtcttgtaaattaacagcagttggagataataagcaagccattatgagatgggcaggtgcaaatcctgatatttttccagactatattcgagactttaattcaaatgaatatcaattgttgatgaatcaccgctctgtacctaaacttgtagaatttcaaaaagaggttcatcagatattaaatagtaatcacagttctattcagacaaataattatccagaatttcaagagggtgaaataacattatttgaatttgaaaatgaaagtttagaagctgagtcaattgcaaataatatagactcaaaaattaaaggaggtatacgaccatcagaaatttgtatcctagcaaaacagaaggttaatgattatagttcaaaattgataactacattaagcagtaaagggattaaagcaagaattgaaaatgaatatcaagatcttttaaaagaccctacttgtaacctcttattagatttaatatcatgcagtcaaggaaaacgagatcctttaatttgggaaaatattagtagtttttatggaaatatcaatggagtagatgagtttactgatgaattaattttagcaaaatcctataaggagattgacaatatagttagtgatattgcttacctaatttcaacttttattcccaatgaagaaagtatgctaaatataattgattgtattattgaaaaaatagatgaaaaaagaattatttcgaacttttcaacatacaatggaaaaagtgacctagatatcattgtcaagaacttttcaaagttattatacaaagaatattctcaaacacaaggtgaatggttagatatagtatctagtttcaagggtgaaaactcaattccaattatgactatccataagagtaaaggattagaatatgaggcagtctattttctaggcttggaggattctgcattctggaattttaataatcaacctgaagaagataagagtgccttctttgtcgcactttcaagagcaaaaagttacctaatctttacatattgtaaattgagaaataataggtcgcaaaacaatagaaatattaatgaaatctattcattactgattcaatctagtttagttgacgttgttaattaa

SEQ ID NO: 75838 - DNA, 2100 bp, Enterococcus cecorum; identical to SEQ ID NO: 75836

SEQ ID NO: 75839 - DNA, 1818 bp, Enterococcus cecorum; identical to SEQ ID NO: 75837

SEQ ID NO: 75840 - DNA, 1995 bp, Delftia tsuruhatensis
atgcatgtcgagagcttgacgctgactaactttcgctgtttcggagctgcaccgacgaaggtggcgcttcatgttgaactgacgaccatcgtcgggccgaatggcgccggcaagaccgcgctgttgcaggccctgatgcgcctgttcggtgtgacgcgagctcagcgcaccatcatgttggctgacttccatgttccgccttcaggcagcgcatcagaagccgaggctgctgctgaaagcacccggacgctgtctcttgacgtcgtgattcggctccctgagctggcggacggttcggccactgccgcaacagtcgctccggtttttcggcgcatccacatcagtgcccctggcgccgtgccagcctgccgtctgcgccttgaagcccgatgggacgatgacggcactgcagagggggcagtcacccaggacctgttctgggtgaacagcctggcagacgactttgagcagagtcataagagtggcgtcgcggcggccgagcgcggcctgatccagctctactacacgccagctacccgggacgcccagtcgcagatcaaggcgaccactggcaccctcgcagcccgcctgcttaaagcgatcgagtggtcgaaaggcaccgaggatgccgtcgaaacggcaagcaagacgttgacctcagccttcggcggcgaagacgccatcaaggccatcggcaacgccttaagcaagcgctggagctacctgcacgacggagatatcgatacgaagccaggactcagcctcatgagccgccgattcgaagaggtcgtcgctcgaatcggagtcgttttcaagcaagggccggccggcgaggaccgaggtctggaggcgctgagcgacggtcagcaatcgctcttctacttcgcactggctgccgcagtattcgatctggagcgcgacgtgatcgcaggggaagtcgacgggtttcatgacgatgccctgagcattcccgcgctcacgctgttcgccattgaggagccagagaaccacctgtcgccgtactacctcgcgcgcatcatccagcagatccaaagcatggtgaaaggcggatctgggcaggccctgatttcgagccattccccttcagtgctcagccgcgtgccgccggagaacgtgcgctactgccgacgtgacaccgacagcgcgacttcctcggtcctggcgatcccgatgccgaaagacgggactgaggccgtcaagttcgtgcgcagcgccatgttggcctatcccgagctctacttcgctcgcttcgtgctcctggtcgagggtgactcggaacggatcgtcctgcccaagctcgccgagtcgaaagggctcatgctcgatccgtcgttcgtcgccatagcaccgctgggcggccggcacgtccagcacttctggcggttgctgaacggactgggcatcccgttcgccactctccttgacctggacctcggtcgcgagggcggcggctacggccgggtcaaaacgtcgatccagcaactgctcgcaaatggggccagcaagcggccactgctcgaaataaaagacggcctgctcagcgacaaaagcttggaaggcatgcatgactggaaaaccaagattcctgccttgcgcctgtggctcgatgacctggaaaagtacaacgtgttcttttcttggccactcgacctggatctcgccatgctgaaggcgtttccggacgcctacaaagcgaccatcgaaggcagcggaccccgaatgaagaacgaggatgctgcagccgtcgtcctcggttccgacggaaagggcctcgaagtctacacagacgacgcggagacgttcacgaaacacatggctgcctaccgctaccactttctcacccacagcaagcccgccacccacctccgcgcactgactcacgtttcgcccgctactctgaggaaagacatgcccgagtgcctgctcaaggtcctgcagcacatcaaggatcgtctgccggcgcagacgctatga

SEQ ID NO: 75841 - DNA, 1905 bp, Delftia tsuruhatensis
atgagtctgccgccccgccgtgtagacgtagaggcctgggcgccggtgggcgtgagcaggctggagagcaatgcgctgaaggtcgtccgctccaccggtcatcggtcggtgctggccggtccgggtgcaggcaagaccgaactgctcgcccagcgcgccgcttacctgttgcagacgggcgcgtgccctgctccccagcgcattcttgccattgcgttcaagcgcgacgcggcacaaaacctcgcgctgcgcgtcgcccagcgctgccagcgcgagcatgccagccgccttgattcggtgaccttcgacgccttcgctaaaaacctgctcgatcgattcgggcaagccctgccgccgcgctggcgaccgacgcccgactacgagatcctgttccccaaggccgacctgttccgagagttcctgcgctcagccagcgagtcccgtgaccgtgtgggcaccgctgcgcagatcaatgccctcgtgccgggcaccttcgagcgccggttcgtcgtggctgctcgtctgccggaagccggctggctgtcaccctcgccagcacagtgggcggccgacgccttctggcaacacatgctccacgacggcaagcgcagcacgcttacgtttccgatgattgggcgcctggccgaattgctgttgcgcgtgaacgaaacggcgcggcatgcgcacgcgctgacttattctcatgtcttcatggacgagtttcaggacacgacgcaggttcagtacgacctgatccacaccttgtttcttggcaccgacaccgtcgtcacagccgttggcgacaacaagcagcaaatcatgcgttgggccatggcgatggaggcaccgttcaatgtcttcgaggcggatttcggcgccaggcgcatcccgctccttaacaattaccggtcctccccggaactcgtgcgcatccagcatgtgctggctcaggccttggacgcgggtgcgccgcacccagtgtctaagacggaagggaccgtctccggcgactgctgcgccgtgtgggatttcgcatcacctcgcgccgaggctcgtcatctggcgacatatatagcccaggagatgaagtcgcgcgccttgctgccacgcgactttgtgctactgctgcggcaaaaggccgatgattacgcgcaagaactggcgccgcatttcgcgacagccgggctacgtctgcgcaacgaggacgcgagcgtgggcgcgcttaagctgcaggagttgctgaccgaaaatctgtcgatcgactgcctgttgctgctgcgcgttgcaatgacccgcaacgccggcgcagcctgggccgcggcactgcggacgctggagggtttgatgccagctggctttgatcccagtgatgcgaatcaccggcggctgtcgaaatcactcgacaaatttgcctcagagctgatagaccgctacccggatccgccgaattcgcaagaacaggctgcagaactggtgcgcgcactggtcgacttcctgggaagagaccggctgaaggcggtgcatcctgcctatgatcagggcgattggtttgcgaaagttgaacacagcttgacccaacacctgctgtcgagcgccgcttcggcgtccgattgggactccaccctggacatatatgaaggcctggatgccgttgctatgatgaccatccacaagagtaagggtttggagtaccacaccgttgtctttgttggcttagacgatgcagcttggtggagctatgcgagagaaactacggaatcgacggcaggattctttgtcgccttcacgcgcgctaagcaaagggtgatcttcacttattgtccaacaaggggcaaccgcaacgccatccagccgctatatgcgctgctgcagcaggccggtgtatcaaccatctcgcagccttga

SEQ ID NO: 75842 - DNA, 2340 bp, Delftia tsuruhatensis
atgcacatcgaacacgtagagatcggtaatttccggaagctccatagcgtccgcgtggactttgataagaagaccaccgttttcgttggtgccaacaacagcggcaagacctcggccatggtggcgttgaggcacttcctcgtagaccgtgccgacttctccgtcaatgacctcacgctgtccaactgggcattgcttgatggactaggttcggggtgggaagcaacagttaccggagacgcggaagatccttttgactggaattctgtccttccccacctggacctgtggctcaacgttcccatgcatgagcttcatcatgtccaaaaaatccttccaacgctggactgggctgggggtcttatcggcgtccggcttcgctacgagccaaaggacctaggtgacttccggcaggagtacttggcggccaggcaagccgcagccaaggtgatgagcgctgcggtgtccgccggcgaaggatctctccccctgaaacttgttgaagggttctccctatggcctcggaccatgatggacttcttggcattgaaacttaggacccattttgaggtccgcgcatacctgcttgacccagcaaagctcgtagcaccagaaaatggaatcgccgcacgtcagtcgctacccgacggtagtgagccgcttgaaggtgatccgctgaagaagatcatccgcattgacgagatcaatgcgcagcgtgggtttggcttttcaagcacttcgtaccaccaagaggattcagcagatgacggaaggcccaaaggcgggaagcggctctcgacgcaacttcgaagctactacacccagcatcttgatccgtttgacaagccggagccgaaagatctcgaagctttgcaggctatgcacgaggcccagacggcgtttggaaagcgccttgagtcgtgttttgcggcagccctgaaggagcttgaggatatcggttacccaggggtaaccgatcccaagctcacaatcaccaccaacgtcaaacctattgacggactaaaccactcgtcagcggtccagtactcagtgccaacgcactcaagtgctccaggaggattcgctcatcgccttcctgaagactccaatgggcttggctaccagaacctcgtctcgattgttttcgccctaatgggattccgcgacaagtggatgaaggtaggcaaggcaggcaagtcgtcagacgtcgatgatgcattgattccgccgctgcatctagtgctcgtggaagaacccgaggcacacctacacgcgcaggtccaacaggttttcatcacccaggcatacggcgtactgcgcaagcatgacaagctaaaagattccaaggatctctgtacacagctcgttgtcagtacgcactctagccacgtcgctcacgaagcggagttttcgtcattgcgctacttccggcgcttgccggtgaagccggttcctggggctgttcccatctcctgcgttgtcaacctgtctgagatatttggcaaggaagacgagactgctcgcttcgcacggcgctacctaaaagcaactcactgcgatcttttttttgcagatggtgctgttctcgtcgaagggccagcagagcgaattcttgttcctcactttgtgaggacccgagacaagcacgagtacctgaggcgttgctacatctcatggcttgagatcggtggaagccatgcccaccgactgaggccgttgattgaccacctaggtttgaacacactagtcatcaccgacatagacgccaaagatggctcagggaaatcagtcgtaccaatccggaaagcaggcctcaaagcacgcaatgagacgttgaagaaatgggtgccagaaaaggaagatctggatgccttgttggacttgaagcctggtgacctcgcccgactcgatacaacgggcttcgccgtccgagtggcctatcagcagcccatcaaaaccgaatggactgagggcaggcccgaggaggccattgccaacacgttcgaggatgcgttggtgtacgagaacataaagctgttcaagggaatggatggcaatgctttattggggcgcatccgcaaatcgctagacaccgccagcgaccttcccagcttagcgacgcgattggccgatgacttggcaaaaggcggtaaggctgaattcgcaatggaactgttgtatagcgaagagattgacaagatgattgttcccgcctacatcgaccaaggcctcatctggattgccgatcagctgaagcgcaaagaggctggtatcgcaggcaagtcggacttgcctgtggatggcgccacatctgaaacttccaaggacctagcagcatga

SEQ ID NO: 75843 - DNA, 1839 bp, Delftia tsuruhatensis
atggacaagcacgtcgatgctgagatagctgcttgcttggaccttgacgcgcctaggagcttcttcctttttgccggcgcaggctccggaaagaccagttcgcttgtcacagcgctgaagcacgttcaaagcagcttaggcgataggctcagattcagaggtcagcgcgtagcggtaatcacatacacaaatgccgcaagcgacgagataaagagacggatgtcgtttgatccactcattgacgtaagaaccattcatagctttgcatggtcactcgtcgaaggcttcaaccatgacattcgagagtggctgcgtatcgagcttgcgcaagatatcgagaaaattgaagccgaagaggacaagggccgcaaggggaccaaggcatctgcgacgcgactgagccagatcgagtcgaagactcgtcgtctccgaaacctctcaagcatcacatcgtttacctacagtcccagtggcgacaaccgcggacgcgatgcgctgaatcacgctgaagttctcaagatcgctgcgagcttccttcgattcaagcccgccatgcaaagcatcctttgcggtcggcacccaattctcttgattgacgagagtcaagacaccaacaagcacctcgttgacgccttctttgaggtcgaagaaaagcttaaaggaaagttctctctggggctgctgggcgacatgatgcagcgtatctacacggatggaaaagagggccttggtgttaacctcccaacacactgggcgacaccgacaaagaggctcaactatcgatgtcctaaacgaatcatcgccctcatcaataaagtccgagattcgaccgacaagcaggttcaacagccaattagttctgcgaaggatggagttcttcgactgttcattctgccagctgaactcgccgcgaagtcggctgcggagaaggcaattgcgctatacatggcaaagcttaccggcgacgaaaagtggggtgacccgaaggcggtgaagactctgaccctcgagcaccgcatggcagcttcccgcatgggatttgcggaggcctttggtccgttgtatgactacccaggctggaggaccagctttctggacggatcgctttccgtctcacggtttttcgctgatcaggtgcttgcgctggtgaacgcgaagcgtgcgggcaaccggtttttggtcgcacgaatcgcgaaggcgaactcaccacgcctttccccagcggcgctgcgtgaagcccccgacgccaagcagcatcttgatggcgtcagcgcatcaatcgatgccttcatgaagctctgggaccacggagcagacccctcgctattcgacgtcctgaagagcattgcagatcatcaactatttgagattcctgagtccctgaaggctcatgcgtcaggggcaattgaggaggcggaggcctcatcgtcgaaggaggacgaaagcgaggacccgctaagcgagcgagagcttgctattcagggatttcttgaggcgccgttctctcagattgagccaatgacggagtatctgtccggacacgcccacttcgatactcatcaaggcgtgaagggtcttgagttcgaccgtgtgatggtcatcatggatgattccgaagcacggggattcatgttcaagtacgaagacttgttcggcggcaaagccgccggagacaggactgtcgagaccacgcgacgactgttctacgtgaccgcgagccgggctcagagcagcctagccttggtggcgtattcctcgtcgccggacagagtgcgcagctatgtgcagcagcagggctggtttgacgaggcagaggtgattgtcggcgtgccctcgtaa

SEQ ID NO: 75844 - DNA, 1758 bp, Chryseobacterium gallinarum
atgcacattaaacacataactatacaaaactttagaaacttcaaaaattttgaaattgacttttctgaaggatttcagactataataggtgaaaataatataggtaaaagcaatctatattgggcaataagattagttctagacaaaaacttatcctataactcaagaaatttggaactgaaagactttcatggatttagaaataaattaaatatcgatgattatattcttgttagtatagaaatgtttagtaaaaagctttctgaatttccaactttccatgcattaaaaacatcagatgatacagcaagagtcacatttttgtttgctcacaaattaaaattcaattcagaatttgagattggggaaactattgaaatgtctgattttagatggcaacttttcggaggtggtaatagcttaaaaatagatgatattttgcaattaacatcaataagaatgtcagatttagaaggaattaatttatactatttaaatgctttcagaaatactagtactgatttgcatggctcaactaaatcccttttaagtaaattttgtatctctagagaaaattcagatggagaacttcaagaagtaaaagacatattgagaaaatcatctgatagtctaaataaattatcttttattcctaaaatcgcttccaatattgaagaaaaagggaaaaatatcgcaggggactatttttcatttcctatatctttaagttttatctcaaattatgacatagatgcatggagccaacttaatgtttattacaaccctacagatggagtaaatattcccatccaaactcttggattagggcagaagaatatactttacttgagcttatttattgcggaactagaaaactcaagtagtgattttgaaatcaatattttattaatagaagaaccggaagcacatttgcatccacaattacaaaaagttctattttctaatcttaatcaattaaaaactacacaagtctttctctcatcacattcaactcacatagctagtgattgtgaatataaaaatttgaatattttgtatttaaatttattaaaagaggttaaatctttttctcctttcaaggaaaacctattattagatagagaaagattattattaaaaagatatttggatgctacaagaagtgaaattttcttctcatcagctattatatatgtggaaggagtttcagaacaattcatcattcctattattgcaaaggaaaaatacaatattgatcttactgagcataatatttctattgttccaattcatagcagattttttgacccatatttaaaactagtaaatgataataatttagagataccagctgccgccataatagatggagatttgcacttaactgatgaagaatcaagtttcatagctactgcaaaaaaattagaagttgaaaacagagtaattgtttgtgaaggaacaaatactctagaaatagatattttcccaaattctgatactaattcaaaatatttagagcagtgttttatcaacttgggacatcctatatcctatcagaatttattagaaattacaaaatccaacaaagatttgtggcaaacagaattacttaagaggattgatggtacaataaaaaaaggaagatttgcccaagaattgagtctgttaattgataaagattttatagttcctccatatattgaaagagctataaaacacataatatcatgtaaaaaactacaatatggattatcttaa

SEQ ID NO: 75845 - DNA, 1680 bp, Chryseobacterium gallinarum
atggattatcttaatgagattcaaaagcaagcagtctatgagtataataatggcttaattgtaagtgcttcaccaggaacaggcaaaacaaaaacattagtagccagagcaaataaaaaacttacaaatctgcctaaacataaaaaattagcattaataacatatacaaatgcagcagctgatgaaattgcatcaaggttagactatacagaaaatgatgtatttattggaactattcatagattttgtttagaatatattttaagacctttttcatggatatataaatgggacaaacccaggattgcatcctatagtgattttaaagaatttttagaaatcaataaattatctacaattcaacttgaagacctaaacaaaataaaaaaaaatcttgatggctctttaataatcccaactgaatggctccacaaaattacatttgaagaattatcaagaatatattatgattttcttaaacaaagaaagcttattgatttcaatgaaatactatttcgttcctatattattatttcaaagaacttatttactgctaaatcagtatctaatattttcatggaaatttctgtagatgaatttcaggatacaaatattttccaatatgaaattttaaaaaaaataaaaaataatggggatacatcgttttttattgtaggagatgaaaaacaaaaaatttatagttttgcaggggctttaaatgaaacattcactattgctaaaaaggattttggttatgaaatccttgatttaaactatacttatagatcaactaaaaagattgtaacagggtattcaaaattgttttcagatcatccaactttaataaactcatcaaaatataaagatattcccttcgatatcagatttcatcaaactaaaaaggatgacaataatctttatattaaacaaattattgatagtctgataaaagccaaagcacaagttggtaatattgcaatcttaacaacatcttggtttgacgcctataatattggaagctacttaagagagtatttcaacattattggattaggtgcattaccacattctaatatatctaacactgtatttgctatcttaaaaactttaagtagatattcagtagattcctcgattaggaacttaaaaattataaaaagaaatattgaacttttaatcttagaaaagaacattgatttcaatgaaaaagaaattgtgtttgcaacaaataaattaataagtcaatttcaaaaaattaatataaatacaggattaaaagaatcattattacaatatcaaaatataatatctctgatttttaagattgatgttcctgaagtagatgagatcttgacaatagtaaatgatgacgaagctttaaattggaactttaaaaagtatatagaaacattatctggcattaatggtataactataaacactatacaccaggctaaagggcttgaatatgattttgtaatattaaatggcataaatgaaaatagaataccataccaaagatgtatagatcatgtaaaatatatttatgaggaattaacagatgaatctattcaaaatggaagaactctattatacgttggtatgagtagagcaaaaattggtttatttattctacacaattggaagccttcaatgtttattagtcagattaaattgtaa

SEQ ID NO: 75846 - DNA, 2112 bp, Enterobacter cloacae; identical to SEQ ID NO: 74660

SEQ ID NO: 75847 - DNA, 1752 bp, Enterobacter cloacae; identical to SEQ ID NO: 74091

SEQ ID NO: 75848 - DNA, 2112 bp, Enterobacter cloacae; identical to SEQ ID NO: 74660

SEQ ID NO: 75849 - DNA, 1752 bp, Enterobacter cloacae; identical to SEQ ID NO: 74091

SEQ ID NO: 75850 - DNA, 2112 bp, Enterobacter cloacae; identical to SEQ ID NO: 74660

SEQ ID NO: 75851 - DNA, 1752 bp, Enterobacter cloacae; identical to SEQ ID NO: 74091

SEQ ID NO: 75852 - DNA, 1905 bp, Enterobacter asburiae
atgaagcttgaagtaattcggatatctggtttccaatcttttggcccagaaccgacagaggtaagccttgaaaatatcacttacttaatcggtcctaatggctcgggtaaaaccgcggcacttcaggctttatgcaaactatttgcctttgatcctgcattgcgtcggattcatcgttctgatttccatgtcccttatgatgaagaagaagttccggaagagcgccaattgtggatagaagctgactttttatttcctgaacttgatgaggaagatgataacagtaccgtagcacctcattttagtcatatgcgacttgatgatccgggaggcctcccacgtgtgcgttttcgcctcacggctactatgggactggatggtgatatcgacgaaaacttagtgtatgtactggatgtcaatgctgatggttcacctcaaaacacagctcaagtaccacgagcagagcgtaatcacatccaggttcattatttaccagccagacgtgaccctgctgatcacattacttacggtgcgaatgcattactaggccgtttgctccgtgccgtacgttgggatgctgagcgcgatacgatcaaaggtctgaccgatcaaataagcgacagccttgcagccaacccttcagtgaaagcatttagtaagagtttgaaaacaacctgggccactctacacaagggcaaatttttcgctgatccaaaaatcacatttgtggcttcggagattgaagcactgttgcgacatttgtcggtttcttttacccccgggcacgacggttcacttgtcgatttctcgcggttgagtgatggccaaaagtcaatgctttatctttccctagtattatcatctcaagcgattgggagagctgtgctcgccgaggaagatgtatcttttgatcccgataagttacgtccaccggtctttacgctggtcgccttggaggagccagaaaatagtctttctccacattacctgggacgtatcgtcagtgctttgtataccatgacgaaaaatgtggatgcacaagctctcattgctactcatgcccctacaatgttacgtcgcgttgctcctgagttaatacgttatctacggttaactgaggctcgaaaaacacgggtcacctgtatcaaattgccagagaaagctgatgatgcacacaagtttgtccgtgaagccgtccaagcatttcctgagatttatttctcacgtctcgtcgtgctaggtgaaggtgatagtgaagagattgtgttgccacgtctacttcaggccaaaggcgcgccagttgatgagtcagcaatcacgattgcgccgttaggcggtaggcatgtcaatcatttttggcggttgctttcagcgttgcaaattccctatctgacattgcttgatcttgatgtagctcgctatgcggcaggatggggacgaatcaagtatgttaatgatcagttttctgcatatgagccgtataagaaactccccaaagatcacggaattccaagttggaaagataaagctcaaaaagttcgggactttgataattatttcgaacttctcgaagaacgtggcgtttttttttcttccccaatggatttggacttttcaatgttactggcttatcccgaagcttatgatgttgataaagaaaaacctgatgagtcaactatcaaggctgtcctcgggaaaagccatcacgattcatctcaatacagtgaagacgaattaatgttgttcagcacctatcatcagcgctttaagcttggcagcaaaccagcagcacacattgaggcgttaactcagctaagggatactgaattacttgacaacatgcctgagtcgctaaacaggctggcagatgcaattattgccaaactcgaagagctgccagaatga

SEQ ID NO: 75853 - DNA, 1680 bp, Enterobacter asburiae
atgattgctgctgaagcatggcaacccgccgatggactgactttggaaccaaatgcaaaacgagcagcaaaagcgcgtaagcgctgcttggcactcaccgccggaccaggtgcgggtaaaacggaaatgcttgcgcaacgagcagacttccttttgcgtacaggaacatgtcggtaccctaagcggattctagcgatctccttcaaggttgatgccagccgaaacctaaaagagcgtgtcgaacggcggtgcgggaccgatcttgcctcgcgttttgatagctatacattccatgcatttgccaaacgtatcatcgatcgtttcaggccggtgctcacggggaaagatgccctggatgcgggttatacaattgtagacaagaaaaatggcccctctcgtactcaaattgaattcggcgatctggtccctttggcaatccagatattgaaaacctcaaaaattgcccgtcatgcaattcggcaaacttacagcgatattttcttggatgagttccaggattgcacgaatttacaatatgacttagttaagcttgctttccaagggactagtcttcgccttacggcagtaggtgatactaaacaaaaaattatggcttgggctggagcgctggacggtattttccaaacctttgccaatgattttaatgccgtaccacttaacatgtatcgcaatttccgttctaaaccacaattgctgcgggttcagaacgaaattattcgtacgcttgatcctgactctgtcatgccagatgaacaattgggtggcgatggaggtgaggtttatgcctggcgttttgaagacagttgtaaagaagccgtctatttggctgatctaataaatggttggataaatacagaacaattaccacctgcagaaattgcagtcttggtttctaaacagttggaactttatgctgaccaccttatgaccgagttggaagcacgcggtattccatatcgtaacgaacaacaattgcaggatatcactatagaacctgcagcacgtttgatcgtagattatttatcatgtctctacggtaagcgtgaacctaaggcttggattagattgatgaatcaattgattccttttgccgatgaagaaatacagtcaagtgcgagaaaggatcttgatcaattaattaaaaaacaacgtaaaaaagtatctgatgctaggcatacagactcacctttttcggattgggtacaattagcaatagagtttctgaagtatatcggctccaaaattttggttgctttatcacctgactatgaaactcgttcgcgtttaaatgatgttatccgtgaaacttttgcccggattaaagaattgcataaatcagaaccagatttgccaaaagcgttgggacgttttgcggatgatcaggctgtacgcattctgaccattcataaaagtaaagggttggaattcgactctgtcattatcatggcagtagaaaacgagattttctttggcgatcaggatgagaatcgttgcgcttttttcgtcggtgtttcacgagcgaaaagacggttgattctcacacatgccgatcagcgagaacgtcctgctaacgccagacgttggaatatcaatcgaactgctcaatctgagtattttagttatgttactccatttgtagcgggtaacaagtttaagtga

SEQ ID NO: 75854 - DNA, 2139 bp, Klebsiella oxytoca; identical to SEQ ID NO: 72908

SEQ ID NO: 75855 - DNA, 1800 bp, Klebsiella oxytoca; identical to SEQ ID NO: 72909

SEQ ID NO: 75856 - DNA, 2112 bp, Enterobacter cloacae; identical to SEQ ID NO: 74660

SEQ ID NO: 75857 - DNA, 1752 bp, Enterobacter cloacae; identical to SEQ ID NO: 74091

SEQ ID NO: 75858 - DNA, 1905 bp, Enterobacter sp. GN02366
atgaagcttgaaacaattcggttatcaggttttcagtcttttgggcaggaaccaacagagctgagcttagaagatattacctatctaattggtcctaatggttcaggtaagaccgcggtacttcaggctttatgccggctctttgcattcgatccgtcattgcgacgtatccagcgttcagatttccatgtccattttgaagaggaggaggttcctcctgaacgtgagctgtggatagaagctgattttttatttcctgaacttgcaggggacgaagataacagtaccgtagcacctcattttggccatatgcgactagatgagccggaaggtatcccacgactgcgttttcgccttacagcaactatgggactggatggggatatcgaggaaaatttcgtatatgttttagatatcaatgcagatggctctcctcaaaataccgcacaggttccacgggcagagcgtaatcatatccaggtacactatctgcccgccagacgtgatccagcggaccatattgcctacggtgcaaacgccttactgggtcgtttgcttcgtgccgtacgttgggatgccgagcgcgatacgattaaggaattgaccgatcaaataagcgacagccttgcagcaaacccttcagtgaacgcatttagtgagagtttgaaaacaacctgggccactctacataaaggcaaatttttcgctgatccaaaaatcacatttgtggcttcagagattgaagcgctgttgagacatttgtcggtttcttttaccccagggcacgatggttcacttgtcgatttctcgcggttgagtgatggtcaaaagtcaatgctttacctttcccttgtattatcgtctcaagcgattggaagagctgtactcgccgaggaagatgtatcttttgatcccgataagttacgtccacctgtctttacactggttgccttggaggaaccagaaaatagtctttctccacattacttagggcgtatcgtcagtgctttgaataccatgacaaaaaatgtggatgcacaagctctcattgctacgcatgctcccaccatgttgcgtcgcgttgcccctgagttaatacgttatctacggttaactgaggctcgaaacacacgggtcacctgtattaaattacctgagaaatctgatgacgcgcacaaatttgttcgggaagcagtccaggcatttcctgagatctatttctcgcgtctggtcgtgcttggtgagggcgatagtgaagagattgtattgccacgtttgcttcaggccaaaggtgcccctgttgatgagtcagcagtcacgatagcacctctgggggggaggcatgtcaatcatttttggcgtttgctttcagcgttgcagattccatatttgacacttcttgatctcgatgtagctcgttatgcagcggggtggggccgaattaaatacgtcaatgatcaacttattgttcatgagccggaaaataaactacccgaagatcaaggtatccccatttggaatagtggtacctataaggttcgaaactaccctcactactttaatcttctcgaagaacgcggtgtcttcttttcgtacccaatggatttggatttcgccatgcttctttcataccccgaggcctataaagttgttgaggaagaacctgatacatctacgctcaaagcagtacttgggaaaagtcattacgattcatctcaatacagtgaaaatgagttgaagttgttcagtacttatcatcagcgtttcaaacttggcagtaaaccagcatcccatattgatgcgctggccaggctaagtgacgaggaattacttgttaaaatgccggaatcattgaataggttagctgatgccgttattactaagctaatggagttaccggaatga

SEQ ID NO: 75859 - DNA, 1671 bp, Enterobacter sp. GN02366
atgattgccgttgaagaatggcaacccgccgatgggctgacactggaaccaaatgcaaaacgagcagcaaaagcgcgtaagcgctgcttggcactcactgccggacctggtgcgggtaaaacggaaatgcttgcgcaacgagcagacttccttttgcgtacaggaacatgtcggtaccctaagcggatcttggcaatctccttcaaagttgatgccagccgaaatctaaaagatcgtgtcgaacggcgatgtggctacgatcttgcctcgcgttttgatagctataccttccatgcatttgctaagcgtatcatcgatcgtttcagacctgtgctcaccgggaaagatgccttggatgcgggttatacaattgttgataagaaaaatggcccctctcgaactcaaatagaattcggcgatctggttccgttggcaatccagatcttgcaaagctcaaaaattgcccgcaatgcaattcggcaaacttatagcgatatttttttggatgagttccaggattgcacgaatttacaatatgacttagttaagcttgctttccaagggaccagtattcgcctcactgccgtaggtgatactaaacaaaaaattatggcttgggctggagcactggacggcatttttcaaacctttgccaatgactttaatgctgtatcacttaacatgtatcgcaatttccgttctaaaccacaattgctgcgggttcagaatgaaattattcgtaagcttgatcctgactctgtcatgccagatgaacaattggatggtgatgaaggtgaagtttatgcctggcgttttgaagacagctgtaaagaggccgtttatttggctgatctaatcaatggttggataaatacagaacaattaccacctgcagaaattgcagttttggtttctaaacaattggatctttatgttgatcacctcatgaccgagttggaagcacgcggtattccatatcgtaacgagcagcaattgcaggatatcactatagaacctgcagcacgtttgatcgtagattatttatcatgtctctacggcaagcgtgaacctaaggcttggattcgattgatgaatcagttgattccttttgccgatgaagaaatacagtcgagtgcgagaaaggatcttgatcaattaattaaaaaacaacgtaaaagagtatctgatgctaagcatacagattcgcctttttcggattgggcacaattggctatcgagtttctgaagtatattggctccaaaatgttggttgctttatcacctgactatgaaactcgtgagcgtttaaatgatgttatccgtgaaacttttgcacgcattaaagaattgctgaagtcagaaccagatttgccaaaagcgttgggacgttttgcggatgatcaggctgtgcgcattttgaccattcataaaagtaaagggctggaattcgactctgtgattatcatggcggttgaaaacgaaattttctttggcaatcaggatgaaaatcgttgcgcgttttttgttggtgtttcacgagcgaaaagacgattgattcttacacatgccgatcagcgagaacgtcctgctagcgccaagcgttggaatgtcagtcgaacagctcaaactgagtatattagttatgttacgccgtttgtaaggcctcaataa

SEQ ID NO: 75860 - DNA, 1701 bp, Enterobacter sp. GN02457; identical to SEQ ID NO: 75204

SEQ ID NO: 75861 - DNA, 1626 bp, Enterobacter sp. GN02457; identical to SEQ ID NO: 75205

SEQ ID NO: 75862 - DNA, 2121 bp, Enterobacter cloacae
atgtatatcaataaattagctattagaaattataaaaactttcgaagctcaaatttctgctttgttaaaaactcagtgaatacaattatcggtgagaatgcttcaggtaaaacaaatttgtttaatgctatgcgattgattcttgatgactcacttccaatgaattcaagagttctatcaggtgaagatttttatcgtggcttaaatgaccccttcgggcactggattattatcacaatgtattttgatgatttaagtgaatctgaagaagaacaggttattgcgaactatacaataaataatggtaacgaagaggcattaaaagaaggaaattatacatttatatatcgcccaagatttcatattaggcaaaagctatacgagttaactgtagataataaagatttagaatcaagattagaggcttttacagagttgaaatcaacttgtataatatccaaagagacttacgaggctgtcgcttttgttagaacaaaagttgattttaataatgacgaagtttataagcaagtagttggggattttgaaaattacattttttcaaatcccaatgaagatgatgctacagtcattggtgtaaaaaaaccgccatacttcgccttaggtagtgaagttgcttgtacttatgtcaaggctcttcgcaacgtggtagctgatttaaagtattataaaactaatccactgtataaattgctcactttaaaaagcaaacaaattgatgatagaaaagatatttctgagaatgttaagaacattaatgaacaaatttcagcaattcctgaaattgctcgactaagtaataaaatatcaacatctttacttaatacggttggctcaacatattcgccaaaaatattggtttcatcacaactacccgaagattttactgaattaatccaatcacttggattagtagtcgaggattctttagattatgacggttcaggaagaattgatgatttaagtcttgggggggcaaatttaatatatttggctttaaaattatatgagtatgaagaaattagagatgctgaagagcatataactcatttcctattgattgaagaaccagaggctcatatacataatcatattcagaaaactttatttgacaattttaattttcaaaatactcaagtcttcgtttcgactcattcaacccaaataagctctgtttgtaaaatctcgtcgatgaatattttggctcggcaacgaggatatacagatatctatcagccttccaacggactacagccaaaagaaatttcgtcaattgaaagatatcttgatgcaatccgtagtgatgtgttgtttgctaaaagtgtaattctcgtagagggtgatgctgaattaataataatcccagaacttataaaggtcactttaggtattagcttggatgaattaggtattagcttaataaaattggatgggactgtatttaagcatatttcaaacctttttcatagtaatagattaaaacgctattgcgcaattttaactgataaagatttggcatatgtgcaagaaccggatgaactatttgatgctgatttcgttgaatctttgaaaaacgctgagactgacggtttacgcagagaacgagagttggcagagtatgtagaaggcaatcaatttgtctccgttttttatgcagagaatacgtttgaaacagagcttgttcggtatgatgaaaattccgatcttttcaacagtgtcattaggacaacatataaaagatcaggtgatattgagcgagttgttgcaggtattaattccgatgatttacgagtaagatttagaactgctctttttttcgccaataaaataggtaaagggtggttagctactgaaatggtagagtatctccataatgagaatcgtgttcctgactatatattaaaagcgattcattttgcacttaaagatagagaactgaatgctgtgcttactaaaatgcttgcctataatatgtctttaatgggaactcactgggatgatgtatgcaacaagattaattctgaacctgattttgataaaaagatgcaagagtataggaaacatttcaatgatagcttttctagattttgggagttgtaa

SEQ ID NO: 75863 - DNA, 1752 bp, Enterobacter cloacae
atgccatatagaaatttgacatctgaacaactagatgctgtaaaatttgatggcaatctattacttaccgcttgtccaggttcaggaaaaacaaaaacattggtttccaaactttgttttatccttgaaaataaggagttgtttgatataggtaagaaaaaaattgtagcattgacatacactaatgttgcagcagatactattctcgaaagaattatttcatatggtataaatagcgattcattgtggattggcacaatacatagtttttgtttaaattggattataaagcctaacattgatagaattccaaggctcagcaaaggttttaatgtaattgatgagtatgaaaaagaatttatattaaatgatctgagagaacgttataacttatctccttacgataaaatagatacgcttttagacttaagttttactccggtatattctcgaaatactgctgaatattcagtggtaaaagcctatcactcctatttgtatgagaatcgattaatcgattttgatttgattttgaatttaacgtgcaatttattattgaagaatgatgtgctatgtgaaagactatctttaattatgcgatatattttagtcgatgaatatcaagatacctctcatattcaatatgaaatactaaggctgatagtaagtaaaagaaattccttggttacttttattggtgataaagaacaagcaatatatactggattgggagcggttgttaaaaatagagaagagttgttcgattacttcaaccttgaagaattagaagaaatgaggttaaccggttgtttccgtagtagtcaatcgatcatagatttttatagcaaatataaagatgatgcctattatattaattcattgtcagaactgaagacatttccttctgtgatactcaaggaaaatagtgttgatatcacccagttgtctgtttatgtttcaggaataataagaactcacttagaacaaggtatttctcctggtgaaattgctgttctatgcccaagttggtttgatgtaataaaattatccaatgaaattatatcactaaattctgatctggatatcgatggtatcatggtttctcccatacctaaaaataatgaaaacttttggctcaatcttgtaaagcttgctttaattgaaaagaatccatctaattatcttgttaggcagaaacttttgcgagatttactcaaagaattaaatgatttagagtcatatacaaaattcttatctccaaagcaaatcataaaagaaataaataaaatagaatttgcattggattataattgtgaaatagatatttggataaaaaatcttataactaaattctgtagttcattaggattggatgttaataatcaaagctatgcttataaagaaatgatctgcttgatagatgctactaaaaaacgaatggctaaatatagtatgaactatagggcaaatgatcttcattctttttttaattttaaaagcggagttaaaattacgacttgtcattcgacaaaaggagatgagtacgatgtcattatttgcaccgggctattaaatggaaaaataccaaattggaatgacattatagattgtagccctgcacatcaaaattatgtggctcgcaggctcttatatgtcatagggtctcgtgcaaaaaaacatttatatttgatatctgaaagcggtcataagacacaaaaaggttatccatatcaggtcactccacagctttaa

SEQ ID NO: 75864 - DNA, 2031 bp, Enterobacter sp. GN02534
atgcaacttaagaaaatttttatctccggctttaaaagcatttccaatcaaaatccccaaaccattgaccttgagcatgaattaaccacgtttattggccataatggaactggaaagagtacagctatggaggcgcttaataagcttttttcggtggataattcccttcgaagcttatcaataaatgacttccataatgcggatgaagggaaagatgaaaaaaccagaagcttaattatagaaacttggtttagctttcctaaacccaaagaaggcaaaatttccatccctccgttaattgaacatcttaccattgataaatctgatgggaatattctttttagggtgcgattagaggggaaactttcttttgaagcaaatcccatgggggatattgacgaagatatctgggtagtaagtaccagcgacgaggttgttgaagagagcagtaagcagaagctttccgccgcagtaagaaacgccattcaagtgagttatgttccagccaaccgagatcctttattgcaattaaaatattcatcgaaagcggtgcttggacgcttattgaaagcgattgaatgggttggagggagccaggaagtattagaggagcaagcagctaagttaaacgcattaacgaagagtaatcctgcattaaatgagattgcggcggcgattaacgccagttgggggaatatctacaaggggcgttatttatctcaggcgtcgctgaattttccactcgctaatatcgatgaaatactaaaattaatacaacttcaatttaaccctgatgaaaccggcaacacgattaatgtagaccgactaagcgatgggcaaaaatcattggtctatttttctcttatcaaggcaatgtttgatattgataagaagactagggagttgatttcctcaggcgcggcttctaattttaatcctgaaaaaatgagattgcctatttttagtatgatctctctggaagagcctgaaaaccatctttctcctcattacttaggtagaataattaagttagtgaaagattatggtcgtaatgagctgtgccaagttattatttcttcccattcatcttccattttaagccgaatcgagcccgagcaaatacgtcactttagattggatcagatatcaaaaagcacggtagtaagcgcattaacgctaccggaaaaagaagacgagctttctaagtttattaaagaggcagttaaatcataccctgaaatctatttttctaaactggtgatatttggcgaaggggatagtgaggaaattataattccaaaggtgcttgagctgtattcgacggagattgatagccattctatctctgttgttcctcttggtggacgtcatgtgaatcatttttggcgtctgttgaagtcattacagattccctttatcactttactggattttgatatcgatagaaatggcggtgggttcggccgacttagatatgctattgagcaactgtctattttctgtggtggaaaatatggcaagacaaaagaaaaaatacctgcatgggatgacgaacgagatccaacaacatttaaacttccgcgtactgacggtgattcatataatgttgtggctgcgttggagaatcataatatttatttttcatcgcctctagatatcgattacgcaatgattgaagcattccctgatattttctgtgaaaaagatgtagtctatggggaaagagggcctaaaaatattgaacaggaaaaacaggaagaacaggaagaacaaaaaaaagagctgataaatgcagtattgaaaaaaggtaactccggcgtccgttacgaattttctgttgattatctaaaatatttcctgtggtatcgctatcgctttttatccaataaaagtaagccagcctctcatgtcagaatgttttctaaaattgaagaaaaatatacgccggatgaaatcagagaaaaattgcctccagtgttaattcgggtagctgacaagactgtatcgttattggcggaggttattgaatga

SEQ ID NO: 75865 - DNA, 1674 bp, Enterobacter sp. GN02534
atgaccagtcaatggctaccttctgagggcattgagccgacacaggagttaatggatattatattctgtgatcaatccgtttctgtacttgctggcgcgggggcgggtaaaacggagcttttagctcagaaatctaattacttgttgcagacaggaaagtgcatgtggcctaaacgcatattatgcctttcatataaaaaagaggcgcaagagaatatcaaaacacgtgtgatgaaaagatgtggacaaagaggtgagcgctttgattcgtatactttcgatgctttttgcaagagtattgttgaccgttttaaagatgttttgcctgagaataaaagacccttaaacaattatgatttagtgtttaatcagaaagccaataatggcaaggataagatatcatttgatctaataaggagtttggcattagatattttaacaattagaacggatattgttgatcttttttcgttgacgtattcacatgtttttatcgatgagtttcaagatacccgctctgatcagtatgaaatgattaagcttctttttaaagacaaaggaacgcaattgctagcggtgggcgatatcaaccaaagcattatgttgtgggctggtgccaagaaaacagtgtttgaagattgtgaaaaagagtttaatacaaccaaaaaactattggtgcataattttagagctagtgaggaaattcaagaggtcttaagatgctttattcattttgtacaaaatgatgctaactttacgccaataatcaaaagtatcgataattgcactattcactattatgatgatgagctttctgaagcggatgatattgctgataaaatcgcaagattcatcacttctggcattgaagaaaaagagatttgtgtactggttaaacagcagtcagagcaatatacggaaaaacttcgagataagttaacgactaaagggattagaaatcttgatttatcggaattgcaagatgtgttaaaagaaccattaggacaaatatttgctgcgctcttcaaggtttatacatcacgctcatcatcaagctataccgagctttgtgatttatatcttgagttgcatcgagtctcccgcggcgatgaaaaagaagatgcattaattaaagtattgtcggataacatagcgaaaaataagaaaaatttaggcgatgagcctagccccgattcattgataacctgcattaaggatattataactctatttggtgtgaaaagaatggtggggcgatggaatcagtataagtccgctgattattgggataagatctggcgtaatcttgagcaacatttgcgctacacaatagacgcaacacactctcttaacgaggcggcgttgatgtttcaggcggaaaattccgttcaggtgatgaacgtgcataaatgcaagggactggaatataaagtggttatttttcttggcttagaggaccaagctttttgggcttataaaaacgcaaaatttgaaaatgattgcgctctctatgttgctttatccagggctaaagaaagtataataataacttctacaaaatgtagagagcatagaatcactaattggcgagatgatagaacctctacctataaaaatattggtcctatatattcgttcttaacgaaacattgcaagttcagggaggtgagataa

SEQ ID NO: 75866 - DNA, 1785 bp, Enterobacter sp. GN02730
atgtatctgtctaatttaaggatagccaacttccgaaatttcgagacggtagatattcccctggatggtaacattgttttgctgggtgaaaacagagttggtaagagcaacctgctgttcgctatccgccttgtgattgatccaacattacctgattcagccagacagctaaaactatcagatttctgggatggttgcgatttatccacttcccctcaaattgaaatacatcttgagttcgctgatttcgacagcgacgcttcactctcagcgctgctaaccgattttcgcatagcagaaaacccagccttggcgagactcagctacgtctttcgaaagaaggaagatattgcaggagaacccaagtcaagtgaggattgtgaatttatcgtgtttggcggtggtcaggaatcacgcaccatccccagtcgcgttcgtcgccggatagccatcgatatgctagatgccttacgagacgctgaagcgcaactcgcatcatggcgtaactctccgttacgtcctttacttgaagatgcgttcggttcgctaagtcgagcagatctggacagggttgccagcgcccttgaatcagcaacgggtacgatggaggcattcactcctattaagaatcttgaggaatctctgcgtggtggcatccttaatcttgcaggtactgctcacgatcttaatgcgcgtcttcgttttgcaccaactgacccgctcagattgatgcgctcaatatcaatgttcatcgatgacggaaaaagaggaatcactgaagcaagcctcggctctgctaatgtggcattaatttctcttaaactggctgagtttgcctggcgccgcgccaagaacgaacgaaatttctcacttctctgtattgaagaacctgaagcacacctgcaccctcaacttcaacgggctgtttttgataagctctttaataatgccgataaggcgcagtcactgattgtaacgagccattccccaactctggcaagcattgctccacttcgttcagttgtacgcctttgtagagatgataatgggcgcactcacgctttttccctggctgaacttcctgtaacaactgatgaactcgatgatattgagcggtacctcactgcaaccagagcggaattactttttgccaaaggagttatatttgttgaaggtgatgctgaagaggttttaattccgggatttgcagaagccatgggactcaaccttgacgagcttggtatcactgtatgtagtgttgcaggagtgaattttgaaccttacgttaagcttgcaggcagtttgggtattcgcatagctgttataactgattgggacccacttgatggaagcaaacaacctttgggaaaagcacgagccattagtatctgggatgctttgtgtgctgtccgtccagaaaagcacaagcttagtgctgaagagaaggcttggtttgtggataaaggttttgaggagtgtagcgacctatggaaaaaagccggtatattccttagtccgcaaacatttgaagtttctgtagcaaataccccaatcctgaaagacgcgctacttaatattctcgatgcgcaaggttttggatcacttagatcctccagaattgcctcctggcgagccggtcaggatccagagcctgcgcaactcctcgcgatgatatctgatattggaaaaggtcggctggcggcgaaactcaagaaaaaagcctccggcttagcaccaccggaatacatcgcagcagcgattcagtatgtggtgtccaatgtctga

SEQ ID NO: 75867 - DNA, 1794 bp, Enterobacter sp. GN02730
atgtggtgtccaatgtctgaccggcacgcactgtcaatggcgttaagtgagctctcatcgaataaagagcagtatggcgctgccaccgagcaaggacactgcgttgtcattgccggacccggcagtggtaagacaaaaacgctcacgaccgccatggcgcgagccctgatggatgatattactgaccctcgaggcgttgcctgcattaccttcaataatgagtgtgcagttgaacttgaagaacgtctggcttgctttagcgttgcctgcagcgaacgaaactttattggtactgtgcacagctttgcattaaaccaagttttaataccctattcgcgctgtatacctggtttgctacctaatgactttcgagtggcaacacgagacgagtgccgtgccgcagttgaagctgcttatctggcaaaatttggcgcaatcggggatcctcatacccggtggaagtttgcagaagaaaagcggcgtcgggacgttaaccgactgttaccatcgtggcggagtaacaacccggagcttgcagatttcatcgaattatatgaagcacatcttaggcgttttggtcttattgactttgatgatatgccgctcatcgccttccgtatgatcagagagcatgattggattcgtaatgctattcggtctcgctatcccgtcttattcgtagacgaatatcaggatctgggacatgcccttcatgagctagtgttgctgctgtgttttgatggcggaatacggctttttgcggtaggtgatgctgatcaatccatttatggattcaatggtgcaaatccacgattgttggatagcctcgtttcacgtgctgaggtgaaaacgttccgtcttcgcttcaactatcggtctggcgctaaaatcattagggcatcaatgggggcgctgggagaagagcgtaattatcgtggaccagacggaacggtagaaggtgaaataggatttcacggagtagaaggcgattatgaaaaacaggcacgttatatcgctcaggatttaatcccctccctgagagcacggggatttaaacctgagcgtatcggagtactttaccgggcagcttggctcggagataaagttgcggatgcgcttaaagcagagggcatcgcactcatgcgtactgacaccaatgcattaataaaacgcaattcacgccttgcccgcttcatcgaggcctgcagccagtgggtaacagggggatggaaagaagcgtcccctgcctttaatttgctgctgggtcaggcactttctttagtttatggccgccgtgcaagccgtactgaagaacaactgctcaccatacaactcatcacatttttacgaagtggaattgatcaggctgaaactgctcatcagtggcttttgcgattcgacaaagaacttatttccggctggcagataatcacggagaatccccaggttgagtgggaggttgttaatgagctactgaaacgaaccgatcctgcattaaagcaagatatggccctgatcgtatttgccggaaaggaagaaagtaccagacgtgttacactgagcactctacatagtgcaaaaggccgagaatttgatgtcgccattatgtttggcgtcaacaagtatgattttccgggtaaacgcgaccttgtttcagacaatgcattacgcgaggcacgacggttgttttatgtaggcgttacacgtccacgcaaagagttacacatggtttatagaaaaggtgaacattccccttggattgtggaactctatcatcgcagccagcagacttag

SEQ ID NO: 75868 - DNA, 1926 bp, Enterobacter cloacae
atgaagcttgaagcaattcggttatctggtttccagtcttttggcaaagaaccaactgaactaggcttggaagatgtgacctatctcattggtcctaatggatcaggtaaaacagcagcacttcaggctttatgccgactttttgcgtttgatccaacattgcgtcgtgtccagcgaacagatttccatgtcccttttgatgaggatgaagttcctcctgagagacagttgtggattgaagctgactttctgtttcacgaacttgcggaggacgaggataacagcactgtggctccttattttggtcacatgcgacttgatgagccagaaggtattccacgtgtgcgttttcgcctcactgctactatgggaatagatggggatatagaagaaaacttagcatatgttttggatgtcagtcctgatagctcacctcaaaccacagctcaagtaaccagggcagagcgtaataatattcaagttcactacttaccagccagacgggaccctgcagaccatattgcttacggtgctaacgctttactcggacgtttgctccgtgctgttcgttgggatgatgaacgtaatacgattagaggattaaccaaccagataagcgacagcctagcagctaatccctccatcaatgctttcagtgaaagtttgaaattaacttgggcaaccctacacaaaggtaaatttttctcggatcctaaaattacatttgtggcttcggagattgaagcattgctacgccatttatcggtttcatttactcccggccatgatggctctcttgtcgatttttctcggttgagcgatggtcaaaaatcgatgctttacctttctcttgttctatcatctcaagcgatcggtagagctgttctcgcagaggaagatgttacatttgatcccgacaagttgcgccctccgatttttacgctggtcgcagtggaagaaccagagaatagcctttctccccattacctgggacgtatcgtcagtgccttgaataccatggcaaaaaatattgatgctcaagccttaattgctactcatgcaccatcaatgttacgaagagttgatcctaaatttatacgttatctacgacttactgaggaaagaaaaacacgaattacgtgtatcaaattgccccctaaaacagatgaagcacataaatttgtgagagaggctgtacaagcattccctgagatctatttctcacgcttggttgtgcttggtgaaggagatagtgaaggaatcgtactgcctcgtttgctccaagttaagggcactcctgtggatgaatcagctattacggtagcaccgttaggtggcaggcatgtaaatcatttctggcggttgctttcagcactgcagattccctatctgactttgcttgacctggatgtagctcggtatggcgctggatgggggcgaattaaatacgttaacgttcagcttgcagcatttgagccggagaaagtacttcctacagaatggaaaattacaaaatggaatgatgaaactacgccaataagaactcaccatttttttaataaaggcactcaagacattttcgaagaacttgaaaaccgatctgtgtttttttcctttcctatggatttggacttttctatgttgctagcttatcccgaagcttatggagttgaaaaagaggagccggatgagtcaacaataaaagcagtgcttggcaaaagctataacaatatttctcaatatagcgtagatgaacagagttttttcgctacatatcatctacgttttaaattaggtagtaagcccgccgcacacattgatgctctagcgaaactaagcgacaaaaaattaattgcgaatatgccagagtcgcttaatagactagttgatgccgttattgccaaacttggagaattacctgaatga

SEQ ID NO: 75869 - DNA, 1668 bp, Enterobacter cloacae
atgattcctattgaagcatggcaacccgcagatggattaacgctggaaccaaatgcaaaacgagcagcaaaagcccgtaaacgttgcttagctcttaccgctggaccgggcgcaggtaaaactgaaatgcttgcgcagcgggcagatttcctgttacggacagggacatgtcggtatccgaagcggattctcgctatctccttcaaggttgatgctagtagaaatctaaaagagcgcgtcgaacggcgctgtggtgcagaccttgcctcccgtttcgatagttatactttccatgcatttgccaagcgaataattgatcgctttagaccagtactgaaaggaagagaggcattagattcagactatacgatcgttgataagaaaatcagtatttctcgttcccaaatcgaatttagtgatcttgttccgttggctattaaaatattgcaaaactcaaaaattgctcgtaattctattcgtcagacttacagcgatattttccttgatgaatttcaggattgtacaaatttgcaatatgaattggttaaacttgcttttctagggactaaaatccggcttactgcagtaggtgataccaagcaaaaaatcatgggttgggcgggagcgatggatggtatattccaaacatttactgatgatttcaatgcagttccacttaacatgtaccgtaatttccggtcaaagccacaattgctgcgagtacaaaacgaaataatccgtcggcttgatcttgcatctgtcatgccagatgaacaattgaatggtgacgaaggtgagattcatgtcgagagtttcagaaacagtcaagaagaagccatttatttggcaaatattattaatgactggattaataaagaaggattggcaccaacagaaattgccgtcttagtttctaagcagttagatctctatgctgaccacctaatgatggagctggaattacgaggaattccatatcgaaacgagcagcaaatgcaggatattactgttgagccagttgcacgtttaatcgtagattatctttcatgcctctatggaaagcgtgaacccaaggcttggatccgtctgatgaatcagctgattccttttgctgatgaagaagtacagtcctgtgcgcgaaaggaccttgatcgtttgttaaaaaaacagcgcaaagaagcaactagtgctgaacagcttgattcacctttttcttgttggtggaagtttgtaaaggagtttttaaaacatattggctctgatacaatcgtagccctatcacctgattacgaatcacacaagcgtctacaggaagtttttcgtgataccaaagcaaggattgaagagttgcttgaaattgaatcagatttgccacaagctcttggacggtttacggatgaccaagcagtcagaattttaaccattcacaaaagcaaagggcttgagttcgattctgtaattataatggcggtggaaaacgagattttctttggtaaccaagatgagaatcgatgtgcattcttcgttggtgtttcacggacgaagagacgattatttttaactcatgctgcacagcgtgaacgacctgctaatgccaaacgttgggaagtccatcgaactgttcaatccgaatatattggttatgttacaccatttattaaacggtaa

SEQ ID NO: 75870 - DNA, 2031 bp, Enterobacter cloacae
atgcaactgaccaaagtttacatctctggatttaagagcatatcaaacgatgttcctcaagttatatgttttaatgaaaatctcacaacatttattggatcaaatgggacaggcaaaagcactgttatggaggcattgtgcaagctttttagtgttgaccaatcgcttagaataatatcacataatgatttttatcataacgatgaagaaagtgaagttgataaaacacttataatagaagcatggttccattttcctgaaccttgtgagggacaattaagcataccaccattaatagaacatttaacttttgatgatgaggctgatgagcttatttttagggttcgattagaagcgacactaagctatgagctaaatcctttaggagacatagaggaaaatgtatggatcttgaattgctgcgataaagaccctgacgaaagtgatatgactaaatgctcatcggcagttagaaactcgatacagttgaattatgttccagccaatcgagacccgttaattcagttaaaatattcctcaaaagcagttttaggtagattgcttaaagcaatagaatggtcaggtgattataaaaaattgcttgaggagcaggctaatgctcttaatctattgacggataccaatcctgctctttcagaaatagccgatgcaattaataaaagttggagaagtgtgtataaggggcgatacttatctcaagcacaacttaaattcccaatttctaatgttgatgagatattgaaattattgcaattacagtttaatccgaatgagttaggtaacagggttagtgttgacaggcttagcgatggtcaaaaatcattggtttatttttctctcataaaagcgatgtttgatatagatagaaataccagaaaacttttatccgaaggaaaagaatgtaactttaatcacgaaaaaatacgtttgccgatattcagcatgatttgtcttgaagaaccagaaaatcatttgtcacctcattatttaggtaggataatatctttagtgaaagaatacggcaattatgatttttgccaggttattatatcatctcactctgcatctattttaagtaggattgagcctgagcagatccgacattttagattagataatgaaagtaaatgtactattgtatgtgaactttcacttccagatgataaagatgaacattcaaagtttgttaaagaagcagttaaagcctatcctgaaatatatttttccaaacttgttatatttggtgagggagatagcgaagaaattatccttcctgaattgattgaaatgtactcaaaaaatattgatgcgaattgcatatctgttgttccattaggtggtagacacgttaatcatttttggcgattattaaactctcttaaaataccttatataacattacttgatttagatatagatagaaatggtggcggctttgggagaatgaagtatgctgtcgaacaaattatcacacatggtagcagtgacagtatttatgtaaataattcaattattaaattcattccagagtgggactcgccaaacaatccattaagcttttcaattaattataatgctggaaaagctaatgaaacctcaagggtgctgttgagtgagcttgaagagtgtaatgtattttattcttctcctctagatatagactattccatgattaatgcattccctgatatctattgttctaaggataatgcttatagtgaacaggggcccaatctagttccgttaggaaaagagaaaactttgatagatgctgttttaaaaagtggtaatacaggtattcgttacaactttggcgatgggtatttaaacaaattcctttggtacagatacagatttttatccaacaaaagtaaacctgcgtcacatttgagaatgttgtcattaattaaagaccaatattctgaaggcgaaataattaagaaattaccaccagagttaactcgcttgttggataaagttgttaagattgcagagggaataatagaatga

SEQ ID NO: 75871 - DNA, 1683 bp, Enterobacter cloacae
atgactagtggctgggcattatctgaaggtattgaacctactgacgaattattagatttgattaaagaggttagttctgtttctatattggctggagctggggcaggtaaaacagagtttcttgctcaaaaagctaattatctactgcaaactggcatttgtccgtggcctaaaagaatattatgtctttcgacaaaaaaagaagcacaggttaatattaaagagcgaatcatgaagcgatgtggggctactggtaatcgctttgattcttatacttttgacgcattttgtaaaagtattgtagatagatttaaaaacgttttacctgttaaagatcgacctgataaaggttatgatatagagtttgaacaaaaaaattctaacgggaaagataaagtcagtttcaatgacattagaactcttgcaattagaattattaagacaagaccagatattgcaaaaattttttcagttagttatagccatgtttttgtcgatgagtttcaagatacaagatttgatcagtacgaattattaaagctcttattccaagaaaataatactgtaatgaatgccgtaggggatataaatcaaagtataatgctttgggcagatgcttctccaacagtatttaacgattttcggagggatttctctgcaaaagataagtttttgttaaaaaactaccgttcgagtaatgaaattcaagatgttttaacctgttttgtaaatttcatacaatcatctaatagttcgataacagttaacaaaaaaccaaagaactgttctatacatgtttataataatgaatatgaagaggctgataatttagtacaaaaattgaatggcatgatagattcaggtatcaatgaaaaagaaatatgtgtgttaactaaacagcagtcatctttgtacacatcagttttaagagataaattaacacaggtaggaataaataatttagacatgacggagcttcaggatgctctaaaagaacctttaggtaaattctttgcatgtctatttagaatttatactgataaatctcattcaagttataatgaatttagtgaactgtatttagagttaaataatgttgataggggagacgaacaagagtcaaaacttattaataaaatatccgatctgatctccatgtataagttagaaattgatgaagatccgagtgctgattgcatactaagtaaaatcaataagacattaaaatttatagggtggagtaaatttatttctaaatgggggcagtataaatcaaaattattcagagataaactttggaataaattagagagtcatcttaggtatactattaatattacaaattcattaccagaagcatccaaaatgtttgttgcggaaaattgtatacatataatgaatatacacaagtcaaaggggttggaatacaaagttgttgtttttcttggggttgaggatcaagctttttggaaatattcttctgaaaatttcgaagataaatgtgccatctatgtggcgttatcaagggctaagcaggaaataataatttccacatcaaggcatagaggttttcgatgtaatgcacgcagggatgacagcatttcaaattataaaaaggtcaaggaaatatacgattttcttttgaagaattgtctatttactttaactaaatatgaaaaatga

SEQ ID NO: 75872 - DNA, 2397 bp, Enterobacter asburiae
atgaaaattgaatatattgatatccagaactacagaaagcttaaaacttgcagaattcgtctgactgacgaagaaacactgctcgttggggcaaataacagcggcaagacgtcagcaatggatgcgcttattttctttctggatcaacgaggaagaacggctgcgagcatcgcatcgggtaaatctccatcttcacgaaaattaggcgcagccgatttcaccctatcaaattggcatcagcttaatcaatttggtcaagcatgggcgaacgccgaagaggttggcgaaaaaatcagtgactggcagcccttatgcccaacgctggatgtctggttaaaagtcgagaaaaatgaagtccatcgggtacggcacctaataccgacattaaaatgggatggcggactgttaggcattcggatgatttatcaacccaaagatcttgatgccctaaaagcagactttattgcccacttcaaggccgctgagcagcttaaaatctcggcagaaaaaaatgccgaaaaagctcaaggtggttcagcatctgagctcagtgatttcaaattttcagtctggccgggatcgttgcgtgaataccttgaaagagaggtgtctaaagcttttgagataaaatcttacatcctagatcccgcaaaacttatcacggaccaaggaagcaaattcctccctcaggttcttgtcgaggggcaacttccgctagatttttatcctttcaatggactgttcaaagtagatatcattgatgctactcgtgggttttcagatccctatgtggcaacaggttctcagcatggtgcctctaatctggctagccagattaaccagtactacaatcggcatttaaatcctaccgatcttccttgtgacgaagatttggatgccctcgaagccatcgcctatgctcaacactcctttgatggaagacttaacaaggtgtttaacaaacccttgaaagagatagagacgctggggtatccggggttcagcgatccccatatcagattatctagcagggttaatccgatcgataatttggaccacgaagcggccattctttttgagatccagaaaactagccacgccgcaggggtgcctctgatgagtctgtcagagaaatataacgggcttggctacaaaaatctgatatccatggtttttacaatgatgagctttagggatcaatggatgcgcgtcggtaaagccggcctaagaaaaccagaggaagatgtctttgttgagcctcttcaccttattctgattgaagagccggaagctcacctgcacgcgcaggttcagcaggtgtttatcaaaaaagcttattcggtgctgcgcaatcatgatgatttgcggacttccaagaggttctcgagccaactggtggtcagcacacattcaagctaccttgcgcatgaagtgggctttgaaaagctcaggtacttcaaacgtaaacccgctacaggtccgcatgacgtgccgactgcggacgttattgatctgtcctgtacttttggcaacggtaaaatccgctcggatgatgtcttacaaacggctcagttcgtggctcgctatctcaaaaccacacactgcgatctcttttttgcgaacgggattattctagtcgagggggcggcagaacgtatcctgatgccgcattttatccgtaataatcccaacgctaatacaagtttggacaacagctacatttcgattctggaggtaggaggagcccatgctcaccggctgagggcattgattgacatacttgggattcccacccttgtcgtcactgatacggatgctcaaaagcctccactcaaactaccggcagatgttcaaaaagtaagctcaggaaataaacccaaagctatcaggcctgaatttggcaagggatatattactggcagccataccataaaaatttggctcgatgttgagggagggctggatacggtccttagaatgccggagcatgagaaaattcgtggtaaggtcaggattgcatttcaatatggtattcccattaaatttggaaaagaggaggaggccgaggctttcccttacacatttgaagatgctattgcattgacgaatcccgagttgttcaaaaaagtagaaaaacctaccgggatgatgaaaaaaatgcaggatgctcttaacctcgatacgcttgaacagtgctgtgaaaaactctatttggcactcaaagatgacaaagccgagatggcactcgatttattgtactgtgctgaccccgccgaactcgccgcgcctaaatatattcaagaggggctggactggcttaaaaaagagctggaagtggcgagtagagaccttacgccggaagtgccgaaagtcactgacgtttgggagggggaataa

SEQ ID NO: 75873 - DNA, 1869 bp, Enterobacter asburiae; identical to SEQ ID NO: 75453

SEQ ID NO: 75874 - DNA, 2208 bp, Enterobacter sp. GN03164
gtgtatatatcttttctaaaaataaataacttcaggaaatttggagataatgataatattatcggattcgtcaaatcacacagtgaatcgccacaaaaagatttagtcgcttcgtcaacaacgctcgtcataggaaaaaataattcaggtaaaacaactgtaacaaaagcactagagcttttatattctgactcagaaaaaatcacaggccatgattttaattataattactccaaagccatacttaagcaaaatctagatggcagacaagacataacgccaaaattatcttttgaaatagagattattttagatgatagcatgcatgacctcactggcgatttcaaatcttttatcgatgcgaaacgatccttaattgatggagtgcgaaaagcaaatatctttattgagtatgaagttaaaataaaagcagattatatatcaaaaatagaagaactcaaaaaaaacctccccagcgagaacgataaccaagagaaaatcttcagaaaataccttgatatattatctaaaactcaatttaaaagaaaaattaaaaactaccaaggcgtatatttagatacccttacaccgaaaaacatcttcgatttgagagttatctcagcagccaaaaacattcacgacaaaaggttactcacaaagtcttttaataaaatcattaaatatatgtatgaatctgatgcagatgaatatgaagggattctaaatttagtcgatggtaacaatgaaaatctcactcagaatattaaaattaaacaccaatcaggtgttgagagaattttagccaagataatttctgataaagaaattggaatagagctaagatctgaattgacattcgacaaactaatgtcggacttaattacttatgaacatagagatggagattttcttgttccagagagtcagtttggtctaggctatgcaagcttagtcagtattattggtgaaataatagattacacaaatcaaagtctaaaagaaacgaaccaaagtaaaattagacttttatgcattgaagaaccagaagtattcatgcacccacaaatgcaaattaatttcatcagacatatccaagaggcattaaatgagattttatcccatcaagtagaaaacctaaattcgctcaaaagtcagatacttataaccactcattcatctcatattctaaacagcgttattcatagcagtaatacttttgatgacattaattatatttacctcaagcacgggaatgctgctaatgtcttactaaaggataaagacatagcagattcaaaaactaaaatattgcaatttgagtttattaaaaaacacataaaacatcaaactccagatttatttttctctgatgctataatttttgtagaaggtattactgaagagcgcgtattgaattcttatattgaaaaagatccaatactcaaccgaatgcatatttctgtattcagaatagatggtgcacatgcaaaagtttacgaaaagttaataaataagattcaaattccatctttgatcattactgatattgattttaaaaaacaaataaagaaaaacaatacaaatataattgaagataataaaattattgttgaagctgttgaagctgttgaagctgttgaatctgatgaatctgatgaatctgatgaatctgatgaatctgatgaatctgatgaatctgattccaaggttcagatcgttggccaaatatcaactctctctgatgaattaataactacaaacgcaacattatgtcacttttttaaaaacaacaaaatttcagcattaagtaattattatgtaaaagataatttgatggttgtgtttcagaaagatggtattgatataccgagagtttctccagaaatcacttattatgccactagttttgaagaggcatttatcttaaagaattatgataataatttactattaaatgtacttcttaaggttataaaaaaagaaacattgagtactcttggaagcacaaggaatactaacaatatagctcataactccagaaaattacagaaactattgaccaataaaaaaagcgaattttctaacaacctcattttctctttagttacagcagaccagcccaagccagaacttcctgattacattttaaaaggatttgaatggcttacattaaaattaaaaagagatggcgtaaactatgaaatttaa

SEQ ID NO: 75875 - DNA, 2049 bp, Enterobacter sp. GN03164
atgaaatttaaacttgaccagcagcaaattgaaatcgagaaaagtgttgaagccgaacttttaaacttgataaaaaatttcaactctttttattttatatctggagccggagctggtaaaactcatgctctcattacaggtgttaataaattcataaccgaaaaccatgctgaattggtcgctcatagtcaaaaaatactatgcattacatatacaaacaatgcagctgatgaaataaaacaaagattaggcgataatgatttagtaataacttctacaatccattcttacatttgggatgttgttaagttccatatggatttactacttgatgagcatgttattttcttaagtgagcaaatcacaaaaattcaaagtgaaatctatgaattagaaacgaacgatatcactttattaaaagtaagaagcctggaagaacatcacattaacacaataataagtcacatattaaaagataaaaataacttttatggttctattaaatcagcctctgatttttgggagtacttaaaatccattactgatgaagttgtatttaaccaacttagagggaattatcaaaaattatcaagcatcctaaaaaaactagttaagcatcaagagtacaaagagtgcatactcaagattgaagctaaagaagaccgtttcgatataataaaatattttaacacaaaaaatattgaggtactgtatagaaacatcattggacataacactttattattgtatgcgtcccgattacttcgtaaatataagttgttattaaaatgcatcatcgattctcatccacttatttttattgacgaatatcaagatacggatgaaaacataattaatttatttttagatatcgataagattgcaagagaagaaaacaaaaaattatgcataggtttttttggcgaccctatgcaaacaatttataaagatagcacgcatagtgaatcgaatagtctcaaaaaattggtcaaaaacatcaacagaagatcgcatcaaaatatcgtggcatgtatcaacaatattagagggggacatcaagatgtaaaacagagcccgatgaaaatccacatagatcaatgttgtccggctttgattattgaacaagaaagcaattataattataactatttaacttctgtaattcaaaaacataaaagcgaatggagtataaatgaaaaatccaagcttgcatgtcttgttctaaaaaatgaaatgctgtcacaactccttggttttgagacactttataatactatgctagatatttaccaagcggaaaatacaaaaggatttgagataattggctcggagtttttattcagagaaatgcgatatgcaggccttctaccatctattttgcacgacttattgatgcctctttatatgttaaaaagaaaagcgaacttttcaatttcagactttttcaataaatcccccatccaaaaccataatctatcagatgttttaaactctataagattcattgactcattaaattttaacacgttaagtgattttgttaacgaaatatctaagtattatccaagtcaagataatgaaattcagaagatcattaactataacttcaatcttgtcattgaaggtttagagatatcaaaaaataaaatcatcgaggaatgcagatttaaagatacaatcaagcttcctcaactattagacagattattccaacttgatatggaacaatttttcttatggctagactttatttatcaaaaatactcagaaagtttagtttcatatttaacttgccatgcatctaaaggtctggagtttgataatgtattagtttttctctccgattcattcaatagaaaagaaggatatttttctactcttttaaattccgacatgaacaacaacctaaattctcaattggaatcagcaagaagattattgtatgtttcaagctcaagagctataaacaatttaaagatttttctttttacaaacaaagaaatcgatgaaaacaaaataacaaatttatttactcacccccctaaatga

SEQ ID NO: 75876 - DNA, 1785 bp, Enterobacter sp. GN02358
atgtatttatcaaaactcggaatccgcaactttagaaattttgaggcggctgatattcccctagcaggtaatgttgtgttattgggggaaaatcgtgtcggtaaaagtaatctgcttttcgcaattcgactggttattgatcccactctgcctgattcagccaggcagcttaagctgtcagatttctgggatggctgcgaccttgaatcaaaccctcaaattgaggtgcaccttgaattcgccgatttcgacagtgacccttccctctcagctctgttgaccgattttcgcatcgcagaggatcctgccgtagcaaggttgagctacatttttcgtaaaaaggaagaagtcgatggggctccacgttcgggtgaggactgtgagtttattgtttttggcggaggtcaggaatcgcgagccattcctggacgcgtcaggcggcggatctccattgatatgctggacgcgttacgcgatgcagaagcacaacttgcttcttggcgaaactctccgctacgccccttattggaaaatgcattctcttcactgagccgagccgatttggatcgcgtagcaactgagcttcaggcagcaacggaaaccatggagaagttcccatcaattaaggatctcgaagattctcttcgtggtggcattcttgacctggctggaactgctcacgatttagatgtccgcctccgttttgcgcctgctgacccgctcagattgatgcgttctatctctatgttcattgatgatggaaagagaggcattattgaagcgagcctaggttctgcgaacgtggctctgatatcactcaagctagcagagtttgcatggcgacgtgaaaagaatgaacgtaatttctccctgctttgtattgaagaacccgaagcacaccttcacccacagcttcagcgcgctgtttttgataaactcttcaataatgccgacaaagatcagtctttgattgtaacgagccattctcccacgctggcaaccattgctcctcttcgttctgttgttcgcatttgcagggatcctgaagggcgatctcgagctttttctctagccgatctgccagtaaccagtgaagaactcgacgacattgaacgatatttaacagcaaccagatcggagctgctttttgctaacggggtaatatttgttgaaggcgatgctgaggaggttttacttccaggtttagcacaggccatggggatcaatctcgaccagctagggatcacggtatgtaacgtagcgggagttaattttgaaccatacgtgaagctggcagccagcctcggactacctttttccgtcgtaaccgactgggacccactggatggtacgaaacaaccgatgggtaaaacccgttcaattggtatctggcaagcatatagtgatgtatcggaaaaactgggaaaactaaccccagaaaatattaattggttcaataacagttcttatgaagtctgtaagcctgtatttgaaaggattggcatttttttaaacgatcagacatttgaagtcgctgtagccaatactacaggcctcaaagaagcgctgcttgatatcctcgatgaacagggatttggtgtgttacgttcatcaaggattgcttcatggcgtgccggtatagctccagacccgacgcaacttctcgcgatgatatctgacataggtaaaggacggttggctgccaagctgaagcaaaaagcacctgggcttgcgccgccggagtatattgcttcagctattcaatatgtggtgtcgaatgtctga

SEQ ID NO: 75877 - DNA, 1794 bp, Enterobacter sp. GN02358
atgtggtgtcgaatgtctgaccgccgcgcactttcagaggctctgaatgagctattgccgaacagagagcagtacgctgcggccacataccccggccactgcgtagttattgctgggccaggcagcgggaaaaccaaaacacttacgactgccatggcacgtgccctgattgaagaggtcgctgacccccgaggcgtggcctgtattacctacaacaatgaatgcgtttctgaacttgaaggacgtctggcatgctttaacgtcagtggcgatgagcggaactttattggcaccgtgcatagctttgcattaaatcaggttttaatcccctactcacgatgtataccgggtttgctgccggatgattttcgtgtggcgaccagagatgagagtcgcgcggctgttgaagtggcttaccaagctagattcggatccgtcggagatcctcatgcacggtggaaatttgcagaagagaaacgacgccgggatgtgaaccgactcctaccggcttggcggaataacaatccggagctggcagattttattgaaggttatgaggcagaacttcggcgcttaggactgattgactttgatgatatgccactcatcgcttttcgtattattagcgagcatgaatgggtacgtaatgctatccgatcgcgctatcctgttttgtttgtagatgaatatcaggatcttgggcacgctcttcatgagctggttctgctgctgtgctttaacggtggaatacgattatttgcggtcggtgatgcagatcagtccatttacggatttaatggtgcaaatccagggctactggatagtcttgtttcacgggcagatgtaagaccgttccgtcttcgcttcaactatcgatctggcgcgaaaattatcagggcatcactaggggcgctgggagaagaccgcgattatgttggccccgatggtaatccagagggggagttaggattccatgggattaatggcgattatgacgcacaggcgcattttatcgctcatgatctaattccttcgttgtttgaaagagggtttcaccctgaacgcatcggggttctttaccgggcagcctggcttggcgataaagttgcggatgagttcaaggccagaaatattgccataatacgtgctgacagtaatgctctcattaagcgcaattctcgtcttgcccgtttcatcgaagcctgcagtcagtgggtaactgggggatggaaagaagcctctccactatttaacctcttactgggtcaggcgctctttcttgtttatggccgccgcgcaagccgtgctgaagaacaattactgaccgtacagctcatcacttttttacgaaacggaattgataaagcggaaagtgctcacgagtggctgagacgtttaaatgatgagctcatcaccggctggatggctatctcacagaacactcagcaggaatgggatgtcatctctgagttactgaaacgaaccgatcccctcaggggactggatgtggctctggatatattcgctgggaaagtagaaggaactggacgcatcacccttagcactcttcatagtgcaaaaggccgagaatttgatgtagccataatgtttggggtaaataaatatgacttcccgagtaagcgagatctaacttcagataatgcccttcgcgaggcccgtcgcctcttttatgtaggcgttactcgtccccgaaaagagctgcacatggtttatgaaaagggtaaacattcaccttggattgccgaactgtattatcgcagccagcagacatag

SEQ ID NO: 75878 - DNA, 1953 bp, Pseudomonas chlororaphis
atgaagatcactaaaatctcagctgtaaattttcgggctttgcaggatgtgacgttagatttgcgggatagtttatctttgcttattggtagaaataatagtggtaaaacatccttgcttgtgctttttgaaaaattctacgagtcaggtgttgcctttaattaccatgattttcctttggcgattcgtaaggatctagttgcgatagatcacggaactgacgttgttcctctatcgataagtatgaggattgaaattgagtacgatgacgaagacaatttgcgacacctatcagaatttatgttggatcttgatagtaaagtaaacaaagtaaatattttattcgagtgcgttataaacaaggatttattgctgagagatatagagcaattcgatggtgaaagggagaggtttcttcgaaaaaaccttgatcggtacttacaggtacatgtctatgcatatgcgaatgatgaagatctacttctggaaaaccggactaggcttgtaaagaaagacatcacttcggtcagggatctgattaatttccaaataattcatgctaagcgagatgttgctagcagcgaaggcggcaagaaaatgctttcgaagctgacaacgcaatatttcaataaggctaataaggatgtcacggacttcgatccgattaataacttgctcctgcaaattgatgagagtcttgaaaacagctataaggatttttttgagccattcttaaagacgtctaaagcctttttggggattgaagatatcaaggttgtatccaatcttgaatcaaatgaggttttggagaatagctcgcaagtggtgtatggagaccgcgccgaatttctccccgagacgttcaatggtctcggtcatatgaatatactttatttgcttttgagtgttgagatcaagaaagagtcgtttgccaaaaccggaaaaaatataaatctcctttttatcgaggagccagaggcgcatacgcatccacagatgcaatatatttttgccaatcaaataaaaagtatcttgaatgagattgacaatattcaggccgtaattactacgcattcatctcatattgtttcgcagtgtgattttaaagacataaggtatttgcaaaactcagaaggtaagacaaaaataaaaaatttccatgctgagctgaaagctaagtatggcgacgatgaagattcatttaagtttctagagcagtacctaactctcaattcgtgcgagctgttttttgcaagcaaggtgatatttattgagggtgttactgaacgaatgctctggccttactttgtagagctatttgataagtcaaagctccacagtaaagaccatatttcattgttttcccaaaatgttacaattttagaagtcggtgctaatgccaaggcgtttaggcattttctagagttcttggaaatcaaaactcttgtcatcacggatatagatacaaccaaaaagacccttgatttaagcaaagataagcccaaaacaacttatctctcctccaaggttgttgacgcagatcacattagcaatgccacgttaaaacattactatgatgctcccgacttctctgatgaagctaagttcgccagttggttcgctagattagtttcgcatgatctaaagcatgcttactctaatatatatattgcttatcagaaggaggaagagaaatatcatgcgaggagttttgaggatgcttttttgcatgtcaataaggagttgattaaaaagaaaattgatagcataaatggattgaagaacgtgcatgagtttgatgcagggctagatgcctacgatttgattgataaagtattggataaaaaatctgcgttcgcgtcctctctgttgtacttggcactaactgatgaccaagttacttggcgtattcccacctatattgaggaggcgttggaatggatatccgaatga

SEQ ID NO: 75879 - DNA, 1995 bp, Pseudomonas chlororaphis
atggatatccgaatgactccgtttgatcaggttttgtcctgcctagcgcgggggaagagtttcctactccaggggggagcaggaagtgggaagaccgaaaccttgaagaagttgttagaccacatttcaaaaaatatgccagataagagggtggcatgtattacccatacgaatttggctgctgatgagatcaagatgcgagcaggtgatctgcataccatcagcacaattcattcgtttatgaatggaatcgtaaaaaccttccggctcgatctgcataaggtcatacacgaaattttccttctgcctgaattcacgcgaggggaggccttggatgatgagaaggaatataagaaacgcgagcatgctcgctataaaagggcatacgagaaatatgccgaaaaggcatattttatacttagaacaaaagaggaaaaagtactaggtaagcctgtttatgatagagatcctgccgcggcaaacaaagttttaaacgataagattaaatatttaaattcccatatattgaagcatattgaaggggttcccgctcataaagtttcttataatgaaaccgtgtttaatagtcttcgcgatctaagtttcggccatgatgggctcattaagctagcggtttctctattggtgaagcgcgcgaaattgcggaaaattttgtctgacaagtatgattatatatttgttgacgagtatcaagatacttctcctgatgtggttagagcgtttcttaactatgttgcaattgatcaaaatataatattcggttttttcggcgattcgatgcaaggtatatatgaggagggggttggggatgttgagtcatatgtacaatctggtgcgttagagaaaattgaaaaggaggataactatagatgctcggagcaggttgtaaggcttataaataacttgaggaacgacggattaaaacaaaatgttgccttgagggtttttgatggcggtcttttagaaactttggtcgagcgccaaggtaaagtgaaactggtttatgcgatttgcgaagagaagcctaatcagcaaagctctcgtgaggcaaaggatttatatgtcgaaaaactttataagttgattgaaagagctcagggttttgataactacaaaatgctaatgctgacaaacaaagctgtagcgttagaagcagggtttggtcgtttgtacgagattttcaactctcgatttggtcagtccacgaatgaaaacctagagaaagtactaactacgtgccattttgatgatttgtatgaactatatcaagatgtttcgtctcgtagacattctaacgttatccgcactgtaaaaaaatctgggtttgtattagattcagttcgtcaaaaggatgagttgctagctgcattcaagcaggttttcgaattgaactgctctgggcacaaggcgatactcgaatcttttcagctgaagttgataaaaagttcggagtcctacgaacgcttcataaaaagaagagatcacttcattgagcagatgaatggggacgccaggtacactgattttaagaagctttacatatcaggtattgacagttgtagtaaattaaataaatcaggattcgatattgatgattatgaatttggagatttggagcgagatgtaaaacgggatttgttttataccgagttttttggcgaaaaaataaccttgggcgaggtgtttaattactacgattatttgtcggagaaaacaaattttataaccatgcacaagacgaaaggctcagggataagaaacgtattagttgtagtggatgagttcttttggcgagactataagtttactaatatattctcagcaggccctgtgtcggctgaaaatcagaagattatgtatgttgcgtgctcacgagctattgaaaatttgacctgtgtacggcttatgggtgaagaggaagcttcatctattggggactattttgatgaggttgaagttgtaaaattagattga

SEQ ID NO: 75880 - DNA, 1872 bp, Pseudomonas chlororaphis
gtgcatcttgtgcgtgttcgcgtccggaacttcagaggcatcgcctacggtgaggtccatttcaatggacacactgcttttattggcgacaacaacgccggcaagtccacattgctggaagcggtggatctggtacttggcccggagcgcctgagtcgccgccctgtaattgatgagcacgatttctatgcaggtacgtacgtagatccggccaagaacgaggtcgtcccgatccagatcgaggttattgtcgctggactttccgatgagcagctgcggcatttccgcgaccatatcgagtggtgggattcacaggccaagagattgcttgtggggccccccccagagggaacagacgccccccatgttggcgcagcaatacgcgtcttcttcaacggctggtatgacgtacaagaggacgacttcgctggggataccttttacgccactcccgaaatgccggatggctcctacctgcggttctctgcgcccgacaaacgaaagtgcggttttctttatcttcgcaccctacgaaccggcgcccgcgcactcagcctagagcgaggctctttgttggacgtaatccttcggctgaaggagacacgactgacaatgtgggaagacttgctcgaccaactgagggcattgccagttggagagaccgaggatatcggcgagttacttgtcgcagtccaggatgcagtacggcactacgtaccatccgactgggcagagcaaccccacatgcgggtttcggacctcacccgcgacatgctccgtcgaaccctgactgtattcatgggcactggagcgaaaaggccggacggctccgtctattccgccccatatcagcaccaaggcactggcacgattaacacgctggtattggctctgttgtctatcatcgccgaactcaagcaaagcgtgatcttcgcaatggaagagccagagatcgcgcttccgccgcacacccagaaacgaattatcaattcgctacgccagaaatcggcacaggccatcttcacctcccactcaccctacgtgctggaggagttcgatcctgcccaggtggtggttctcaagcgcacggccggtgttatgaccggagttcctgcaacatacccaccagcagtcaagcccaaggcttatcgcacagagtttaaagctcggttctgcgaagctctacttgcccgctacgtgcttgtgcttgagggccgtacagagttcgacgcattgcctgccgccgcccgccggctcgccgagctggatcccacgcgattcaaatctctcgaaaatcttggagtggctatcgtcgatgctcgcggcgagaccaatgtcgctcctctgggtgcattcttccggtctctcggcaagatcgtattcgcggtgttcgacaagcaatcacaggaggcgctcgcaaccatcactgcctcggtcgatcatgcctatgagtccgcgactaagggcttcgaaaaccttgtgttgtatggcgtgtctgaggtcgtactccgcagctatgctgctgttgtagttgctggcggcgattggccgcagcatctcgcggcatggacgccaacgcccgcaacgccgctggccgatctgcaggcggctctatcgagctatttcagctgggccaagggtggtggcgacgccggcgacttgctcgcctcatgcccaaccgccaatgacatgcctgaatacgtgagaaccacgctggcagccatcaagaacgtcattgagccacctccgctgcttccgctacctccccaggtagcaggcgtgccccctctcccagaggcggcagccaaatcgccgccattggcagccgcctatgggaagttccaaccgtccccaccccagcctctggcatga

SEQ ID NO: 75881 - DNA, 1656 bp, Pseudomonas chlororaphis
ctggcgctaggtggccctggtgccggtaaaacacacgtcgcactggtcaaagctcgcaatgagattcgctcaggagtactcaagccaggccagaaggtccttttcttgagcttcgccagaccgaccgtagcgcgcatcatcgaaaaggcttctgagctgatttctcgcgaggatctgaagcaactagaggtcagcacgtaccacggtttcgcatggagcattctccgaagccatgcctatctgttgaatggcagaccgaacctgcagcttctgccaccgcccgaagcagcagcgcatttggcagatatcgataaggcccagcacgaaaatgagaagcgacgccttttcgaacaggagggccgcctgcatttcgacttgttcgcaagcttggccagcgaactgctgagccgcagtgatcggttaggcgccatcttctccgacacctatcccatcatcatcctcgacgaatttcaggacacaaacagtgatgaatgggcgctgattcagcagcttggaaagcgcagtcgcctcattgcactggccgaccccgaacagcggatctatgagtttcgaggtgctgatcccaggcgggtgggagaatttctggagaacttcggcgccgcccatttcgatttcgcgggtgaaaatcatcgcagcagcggtaccgatatcacggcctatgggaatgacctgctcactggcgcaaacaagggcaaggcctaccagcaggtcaaaatcacgcgttacgacttcatgtatggcaagagcctgcacttcaccgccaaggctgcagtgttctcggcgttggatcgcctcaaaaaagtacctgacaaatcgatcgcgatcctggtgccatccaggcggctgatgctcgatttttctgactacctttcttctgcagctgatggtctgccagcgctacatcacgacgtcgcaatggatgctgaaccgccggctctagccgctggcgttatcgccacgttactggcgggaggtaccgctggcgatgtggcgagccgcatgctcggcgcacttcactcgcacattcgtgggcggcgcgggggcaggcctaccccacagaccgagcttgacctggcggatgctcttagcgggttcctctcctcgggaaagatccgcggctccaagcgcctgttgattgtcagcgaagttcagcgcatctcagaattgcggcggcaactgcaattaacgggcgaccctgcggaagactggttatacctgcgcggcctattggcatcgtccactgcggaagccttgaaacaagtagcaacagatgctcgctacctacgactgctgcaccgaggctcagtattgcgaaccaatttgggtgcgttgtggcgcgcccagggagagtacatgggggctgaagaggcagtccgaagtgccttgatgcaggagcatttcgctgcagcccaaaaggactggcgtggcatccatctgatgacgatacataaatctaaagggaaggagttcgacgaggtcatcatctacgacggcctttaccagcgcattgccaaagccccgcagaatccaaaaatctgcgcccaggatcttttagtactgcgggtgggcgtgactcgggcgatacgtcggaccactattgtgactccgaagcgcgatccatgccctttactgtga

SEQ ID NO: 75882 - DNA, 1059 bp, Geobacillus sp. T6
aaaaaattaagtcttatttatggacaggaacctatttctattgaaagaaatggattaggaaaaaacaaccttctgtttatttctcttgtactttctcatctcgcttcacaaacagaaaataaatcgccattaatatttagagtgattgggattgaagaaccagaagcccatttacatcctcactctcaaaaacatttggcacacaatttaagtgatattagcaaagttgagacattagattcagacgaggggatacaaaagaatggtgagagtggtataaaaaaggatacacaaattattgtcacctcacattcaacacatattacaacatccatagatcttgagaatttggtagttttgtacaaagataaagggaaactggactatcattacatcttggacggatttaaagataatagggagggtagggaacatatccgttatttaaagaaatacatagatgcgactaattcatcaatgttctttgctagaaaacttattttggtagaaggtatctctgagcaaatattgattccaaccttttttaaattattgtatggtcaaacattagaaagaataggttgtaacatcatcaatgtcaatggcctggcttttaagccttttcttgaagtaataaaaaatggctattttataaaatgtggagttgtaacggataaagataaaggtacacatatggaaaatagagcagatgaacttaagaaaaaatacgatggagacataattaagattgaatttaatgaagaaacttttgaaaaagagattctgaaattcaatcaaaaaggaaaaggaaaggatattttactaaaggtttttcagaaattacgtccaaagttatttatagatttttcgcctaactgggactcagaaattaatattgacgaatattttggaaaaattaaagaagcaaaatcagattttgctttctttttgcaagaggaactacaagaaaaccatgatggctttgaaattccagaatatattaaaagaattttaaagttcataatggaggaaaatgatggggagaagcaagaaaattag

SEQ ID NO: 75883 - DNA, 1572 bp, Geobacillus sp. T6
atggggagaagcaagaaaattagtaaacataagttaattattgcggctgctggatctggtaaaactagagaactaatcaaaagaataaaagataagattaaattattacctccatctaaacacttaattgttataacttatactaatgcagcaactaatgaaataaaagaaagactggaggaggaaattagtattcctgaaaatgtatttataggaacgatacacagttttttaattaaatacgtgattaaaccgtatggtaagattttgaggcttgttcccgatgaaattacaataacagattatgacatcaaaatagattcccagacgggaaatcaatattaccaaagaaaaaatcaaataattaatgcattgtcacgtaaaggcattattacttatgatggagttgtaactctagcgaaaaaaattcttaaaaatgacgtggtaagggcaagattttgtaagagaattgcgtatttgtttgtagatgaatttcaagattctgatttaggtcaatttcagatatttgaaatattaagaaaaggaaactgcactgagatagtacttgtaggagatcctgaacaaaacatcatgaatttccgaaagaaaataacaaatcatcctatcgtttcccttcaaggtaaaaaaacgtatcatgtagaatgtatacagaataactatcgttcgagtgaaacaattgtagaatttattaaccattttcattctgatattaagcaactttataagaataaggaaattacatctaaaaatcctattgtgtttattgaatcaactgaacttaatcaaattgtacgcaattttaatgatttatgtactaacaaggaatattgtgaaaacaaaccgaaaaaaaggttttttctagcgtatgaaaataaagaatttgatgaatataggattaataatagcggtaatagagagtctaaacaggcatttaaagttatagatttaattatgcaatatcttggtgctctttataatgtaaaaaagtctaaactgattaatcattttaatatggaaaccattgaattcagaaaaaggtgtttgaatctgttttttaaaattagaagcgatccaaatatgaaaatagagcatataattacatatctaaattcattatttccgcataagattagtcctttagaggaaaacacaaatattcaatttaaaattgataaaattgtagaagattttattaaagacatccaatctatcgattttaaaaaaaatattgataacattattgatgatgattatgaagaccactttctaactattcataaatccaagggattacaggcagatgctgtattagcagtggccagcactgaaaaagaattattaaaatggctagagatagataaaaacaaaaggttatcagataagacggatgactgccgattaggatacgttgcttttagtagggcaaaggaatttttatgtatagcatgcagaaaaagtattagtgacagtacgagacaacatcttaataatctaggtgtggtattctatagtgataaaactgccgcaaaaaaagacttaacctatgtttag

SEQ ID NO: 75884 - DNA, 1569 bp, Variovorax paradoxus
atgccaggatttctgtccgtcaccaaggaggtgtcacttaccttcatccaagcgcttcgcgacgtcgtggctgagtttcacaacaaccgcactaatccgctgctgaccctgctcaggagcaagagcggtgagatcgacgcggcggccctggtcccgatcgtcgacaaggtgcgcgatctcaatagcgccatcgaagggctcgaggacgtgcagtcggtgcgcaagcacatccgagagaccgtcaaggacactgccggcgaaacctactctccgacctcgctgtcgatccggtcggatctacccgaggaagcggagcagttgtttcagtcactgcgtctgttcatcggggagtcggaggacggatatgaagggacgatcaacgagctcagccttggcggtgccaatttgatctacctaaccctcaaactgctggagttcaaataccagcgagagaagatggcgatcgcgaacttcctgctcatcgaagagcccgaagcgcatatccatacccatatccagaagacgctgtttgatcgaatcgcctacgaggatgctcaggtcatctatacgacgcactccacacacatctccgaagtgagcaatgtgagcaacgtcaacatcctgggtcgacgcggcgcattctgtgaggcataccagccggcgaccggactggatcctgcccaggtgacaagcatccagcgatacctggatgcagtccggagcaacctgctgttcgccaagagcgtgattttggtggagggggacgcggaagagatcctgatcccagtgctcgcaaagcgggtcctgggtctgagcgtggacgagttggggatcagtgtcatcaacatccgcagcaccggctttaaaaacgtcgcggtcctgttccacgacctcaggatccgcaagcggtgtgcaatcgtcactgacttggatacgatcttcttcgacaccacgccaagtccgacggatgacggcgtcttggccgccaggaagcgaaaggcgattggctcgcaaacagcaggggcgcagcgaaagatcgatttggacgcatttgccgcgggcaacgcttgggtgcagagcttctacgctacgcatacgttcgaggtggatctgatcggctcaggcaaccaagaagccttcgttcgcagcgtcgacaaggtctacaaggcgccagcgacgatcacgcaggcaattaccgaccttcgctcgggcctaattcatcagagtggctaccggaccttgacgatggccgagcaagaaggcaaggggtggttcgccatcttgctcgcgcaaacgctggatcaccaagcagtggtgcccggctacatccgagaggccgtcctgtttgcgcatggcccgttctcgcgaccactgatcatgcgaatcctccggcaccggatgaagtgcctgttgggtatcgatcgcgctgcgcgtccgcgcttggtggtcctcaatgctgaggtggagcgtttcgggcgcttggagatcgatctaccgacccttcgtaccgcggctgcagcggcgttgccaggtgacgtggtccatgcgttcctggcggggatggtctga

SEQ ID NO: 75885 - DNA, 1779 bp, Variovorax paradoxus
atgtttgtctgggatgccaccgagctcaatcccgagcaagcggctgcagtagaagagccgtcgagcgtcttcctggttgcctgcccgggcagcggaaaaacgcgcacgctgacctacaagatcgcgtatgagctgtctcggcgcaaggacaagcgcatcgtcgtcgccatcacctatacccaccgtgccgctgacgagattcaggagcgaatcgaagctctcggagtcgataccaccgccctgtggatcgggactatccattcgttctgtctcgaatggatcatcaagccttacgggatctatgtcccggagctggctcgtgggtacacggtcttggaccgacacgaccgcgaaaagatgctcgagcgactgtgcgcaccgtaccgcggcgtgaccttgtatgactgcgactattacttcgaagaagacgattaccggctggggtgcgccgacacatggaagcatgacacgatccacaaggtgctggaggcgtactttcgagagctggcggacacgagacgaatagatttcgagttgatcctctggtacgcccaggtattgatccgaagtcagccgcatatcgcggcgcttctctcccaagtcttctcctatgtcctcgtcgatgagtaccaggatacgaagcggatccagtacaacttggtgggggccatcctgcgggcgggtgccggtagcaccaagacgttcatcgtaggagatcccaatcaagcgatttacggctccctcggcggttatgccatttcagcggcggactttcgcgcgctcacggacatccccattcgggagatggcgctgcgtttgaactaccgatcaagcgcgaggatcatcgggcacttctccaactttaatgtgcacgctacggacattgagggagccggcaagatggttggctttccaagccaagtctcctacaaccgcctcgttgcgcacgaagatcttcacgatgagctcgtcaggctcattcagaaaagtttggccgaaggacatgcacccgaagagatttgcgtgctggcgccgtggtggatcttgctggcgtcgaccacccgaaagcttgtggcgctgctccccgagcagcagttcgacggcccaggattggtgccgttcagcaatgatcctgacaacttctggttcaaactctccaagatcttgcttacggagtcgtcgccccagatgctggtgcgacgcatgcgatgggccagggacgtcattgccgacctgcgagattttggcgtcgacacgtccaggatcacgcagcgatcgctgctgcgggagtccaactccctcgctattacagaagcagatggcttggcgtatctggaccgagcattcgtcgcgttgcttgatcgcctgggggtcgagctgcgtgctttccccgcgctggtggagcatcgcgaggcattctttgcgagttcccaggcgcgactggagaggttgcagaactccggcgccggctacatcaccgatctgtcgttcttcaagaaggtgttccgtgaacgggccgggatcaccgtgtcgacgatacacggggccaagggcgcggagtttgacgtagtcatcgcattcggtcttcttcagggcatggtgccccacttcagcgattccgacggtgatgtcgcagcctgcaagctgctgtacgtcctagcctcgcgcgctcgaaagcacttgcacctcatctcggaggccggtcgctcacgcggaagatatgggagctacgagcccaccgaggttctggcccgctgtgagttcgattacaacgggtag

SEQ ID NO: 75886 - DNA, 1584 bp, Listeria monocytogenes; identical to SEQ ID NO: 73566

SEQ ID NO: 75887 - DNA, 2382 bp, Listeria monocytogenes
atgaagatggataagaattttggaagaacgattatcaattggttattttcctatagtgatgagaggagaatgatgggttataatattttatctcttaaaaaatctaaggatgaattactgaatgtagtttcaaatttagaaaaagagataagaaatttaaaggaaaatcaagtcaataatgaaagtgaacaaaaaaaattaagtatgcttgtgaacgaatatacaaatagatttggtactattagtaatacaaacaattttgcttcagatgttgtgaggatggaagatgaagatgctaatatttttcatcatttagtaagtttaaatggaggtaacgaatttaacaaagagcaagtaaatgctattcgatttgatatgagaacacatcttaggattatcgctggtgctggaagtggaaaaacgcaaacaatttgtgcaaaggcagcttatttagttttgaaagaaaaaattcaagaacgaaatatagtgatgtgcacattctctaaaaaagcaagccaagaaatgaaggaacgtgtcaacgagtttcttggtggcaatagtcgaatagaagtattgactttccatggatggtttcaaaaagagtacaatgtacttattaaaaaatatccgtatctagaaaagtatgggatagcgggagaggtacccggaaaaggctctggaaaagatagccatgataggattttaatgaatttaattaagcagtatcatttatataattttgataaatatgaagaaaaaccaattaatgaacgacttagttattggcgaaatatgggatataatgatgaggaaattgttgcttttatagcaagatattttgatgacaaagaaatattaaaggatcaactacttagtgaagttttttcagagatgttaaaagaattggaacgaattaagagaagagagaaagtcattaattttgatgatatgttaattaatttaaagtgtgtattggagaacgactcaaatgctctttctttaatacaaactcgatatcaatatatatttattgatgagtttcaggatatcaatcccttgcaaaaacagataattgaacttatttgtccaccagattacgagaagagtgttatcaattctactaaattaattattgtaggagacgatgatcaaagtatttatttcttccgtggtgctgaaccacgttacattaaagaatttgatagacaatacaggcaaacgtcaatagagttaatgactaactatcgttctattgctcctgtggtacatataggaaatactctgatatcaaacaatcaacatgatagaataaagaagtctatgatacctcacaaactaaatgaaggtgattgttacgcaaaagtatttcaaaatgaacagctagaagctaattggattgcaatgcggatattaagcttgtcttcagaagagaaaccattccaagatcaaattggtaaaccgaattatacggaaacaatcgtattataccctaataaaaatcaattaaaatctatgattattgctttacaggaaaaaggaattccctttgtcacaaaatcggatgatgatttacttggtatatttggtattaatttttttaaacgatcattcaatctattaatggatattattgatgcagaaacgatagaaataaaaaagcatttatacaagcaactcataaaaaatatttgtttatattattatataccatttgcaaaaagtacagattttgtctcagatgagactaattatacttcggaaaagttaactgattttatatgcaaagaaaagaaagttagtaaaaaagagatggcacttattaaatccatattccgagatattaatgaatttataaaaaccgaagaattgaatattaaagtttttgttaattggcttgtagaaactccgaaagtaaagaaacaattaattgatgaagagaaagattggttgcttaaagaggttagcaatgttaaaacgctaaaagagttaatacttaaatataaagcagcgagaaccttaaaagaagagatggctgacaaattaagagaatatgataataataactataatgcagtgtatctattaacaattcattcaagtaagggattgggatataaaaatgtttttgtaaaaggtatttataaaaactcactaccagactatcgttcagtggataaagaaagtattgaacttcagccgttaattgaacaagcatctccaccaacaacaatggaagaacaaagaagattaatgtatgtagcgctaacccgagcaaaagaaaatctttatgtaacttaccctagagaaataaatgataagcctacacttgtgtcaccatttataaaagaatctaatattatgtttagtgaagaaaaaatatag

SEQ ID NO: 75888 - DNA, 1878 bp, Archangium gephyra
atgcatctctcgcgaataaaggtttcgaactttcgaaatcttgatggaattgatgttgctctagggccccatactgtccttgttggtgagaatggcagcggtaagtcaaacttgctctttgcacttcggctaatttttgatccgacacttcctgacgcggagagatatctcgggtcggaggatttcgcagatatactttccaacccgatcacaagtggcgtttccattcaaataacagttgatatcgaagatttagatgatgacgatgccttggctgtgcttggtgggtatttgattcgagacgaaccgccgattgctcgaattacctaccgattcgcgcctaaagaaagccttgaatcgccaccggtatccgaggacgattacgaattcacaatctacgggggggacgatcctacaaaccttgtcagcccagaggttcgtcgccggttgccaatgatggtgtttcatgcgctccggaacgccgaagacgatctacgaaattggcgtcgctcaccacttcgtcctcttttagaccgattggcttcggaaatctccagcgatgtgctctcggaccttgtggaggagatcaggacctctaacagtggtgcggcctcgctagaggaagttcagcaactctccgagaaaataaatcacgtcctcgcgcagtttgccggagaaggtaatacgacagaggtggcgtttggtatcgccccagtgctgcccagtcgtattctgcgtaaccttcaacttctcattgacggtggcaaacgtggtgtcgagagtgggagtttgggatcgctgaatgtgttgtatttggtgttgaagttcttggagatacagcagttgtgtgaagagaatgtgtacgatcatgcgacgctcgcaattgaagagccagaagcgcatcttcatccacatcttcagcgacttgtttttcagcacctctttaagctttctttgcttgcagaaaaagtcccggtcggaacttttctctccacgcattcgcccaacctcgcgagcgttgccccggttaaatctttggtggttttgcgtcgtcggacgccgactggctctgttgtggctcggtcattggcgactactccattctccgaagatgaaattgccgacatcgaaagattcctcgatgtcacccgtgctgagtgcttgtttgctcgcggcgtgcttcttgtagagggcattgcggagaagtatgtcgttccggcgcttgccaaactgcaaaaaatgtcccttgaccaaattggggtctccattgttgtggtggatggcactcactttgaggcattcgataaattctttggttctcgcgggttggatttgccttttgcggttcttacggatgccgatccatgggcatcgggcgcgagaacgggggcagagcgagttcgacgcttattgtcgtctagaggcgtacgtattccgccaaattcggatgagtcagttatccgcaaccttgcggctgagcatgggattttcctgagcaagtggactctggaagttgatctctatgtttcagggcagcaccaagctgttctcagtaccatgcgtgcattgactgcatcggatgccgcgaaagcaagagttgatgggattgttagagatggagaaataaaggatgtaaaggccttcttgaaggatgttgaatctgtaggaaaggggcgttttgcgcagcgcgtctcaaccgcctttagtggtaccagttgtccgccctatatcttcaatgctcttggatggcttaagcggcaaatagcgaacaaaaatgaactcattcagagtggccgcacaggagttgcatcccaacaaggagcagtggcaggcgtacgaaagccaaggacatctggtcgttctggcgggcccgggtag

SEQ ID NO: 75889 - DNA, 1689 bp, Archangium gephyra
ttggcagttaagcttgctcgcattgcggaggaggaacttgagccaccgcatcgaattgcatgcctgacctacaacaatgagtgtgtatcggaaatccgaaaaagacttgttgctgttggggtgcgtctagaggagcgattttacctgggaacagtgcactcattctgccttagtgagatagttcggccttttgcgcgcttggcgggattgcggctaccaagtccggttagagtagcgccagagcacattcaagaaaaatgtatgcaggcggccattaatcgctttggtcgtggtcaagatgtggcttggttccgaccggagatcgactgctaccgccggacgcacttgaatcgagatcggcctgactggaggggagaggactctagtttagcatctattattgaggagtatgaaagactgctgcgggcggatgggttcgtagactttgatgatatggtgcttttggcagttcagattcttgagaagcaccatgttgctcgtcgagctgtctcggccaagtatccaactatagcagtcgatgagtatcaagatcttggcctccctctgcatcgtatcgtggagcttctctgttttcagtctgcatcgcgcctctttgctgtgggcgaccccgaccagtccatttatggtttcactggggcacgtccggagatgctcctagagcttagtcgacgaattggcgtaactcctgttcgactcaaaaagaattatcgtagtgggcagtcaattttggcggctgctgaagttgcgctcggtgagtctcgcggctacacgggcgagaagaaggatgttggtaggttggaggctcgtcagtgtattggtggtattgaagagcaatgcagtgctgctattcgtgaaatagtgcctgccctgatgcgtcttcatcctgggcttcgcttgggtaatgtcgcgatcttgtatccgtcgaaaaaagagggcgaatacttggcggaggcatgtagagcatcgtcggttccgtttgtgcggaacgatcgaggttctccgtattcgcgaacacgcctaattcgatggttggaggatgccgcagcatgggtggctggacgaacgcttatgacgccccgttgggaggacctgctcgatcgatgggtttcgctatgtgggcatggcgggcgtttggagcaccagaaggcgattgcacttcgccagcgtgttgctagattcctttggcgcaaccgtatgccaggaatgccgctctgtgagtggattgcggtattgatcgaaggctttgaggccgagctttccgaaatgaaactcaacgcccctgatgatgtcgcatccttggttggcttgaaggagcttgccttgaatgggtttctgcaaggatgcacggttcttgggtttgcattcgctggtggctcgccagatactcttaatctcttgactcttcatagctcgaagggattggagtttgaagtggtggtgatggttggtttggatgagggagtgattcctcgctataaggcttcagcgagaggtgttgcggaagctaggcgactcttctatgtggggttaacgcgtgccatgaggcacgttgtgtttgtgtattcaggcttcactgtagatcagtggggacgcaagcatcgaaacggaccatcaaggtttgttcgtgagcttctgggtcgaagccttgttgaggtacgccgcgactga

SEQ ID NO: 75890 - DNA, 2181 bp, Pedobacter sp. BMA
atgaaaatcgattttgtacacctacagaatttcaggaaactgaaagactgtcggattgaatttgcccagcaacaaacactttttgtaggtgccaacaatagcggcaagacaactgctatggatgccctaatgctttttttgaaacagaagagcaaatttactacccgggactttacgctttccaattggaaagacatcaataaacttggcgaaaaatggtgcagtttaactgcatatgacccggaggaattcagtattgataaatgggctggcctcttaccgacactggatgtctggcttaaagtggaacacaccgaactgcaacatgtacataggcttattccaacgctaagctggaaaggcggtctgttgggggtaagattacggcttcaaccagtagacatcgaattgttctaccaggaatttacggctgctcaaaaacaggcaacagagttgactggaaaacccgagaaagggaagaaattcaaaatgtggccttccacactttgggagtttctagatgagaaaggcaacctttcgcgttttttcaaagtacagacctttttgcttgaccctgctctacatgacaagccacaggaaatggatccactcgcagatgccctagagggtgatgttttcagcggtctgatcaaaattgatatcatcaatgcacagcggggtttttctgattcgaacagtgagagccaggaacgctcggaaaatataaaaaacctgggcagccagttgcgaagctactatgataagcacctcaacccgtcagtgaatccgacggctgatgacattgcggccctcaaggcgatcagtagtgcgaaggaaatatttgatgaaagtctcaaaacagctttcaaggattcattgaaagagttggaaatattgaactatccaggttttggcaacccttcaattaccctatcaagcaaatttaactcgctcgatagcctcacacatgaatctgcggtgcaatatgcgcttgaagagggcctgtcccttcctgagaaatacaatggacttggctatcaaaacctgatttctattatatttaagcttatccgattccgtgatgaatggatgcaggtaggtaagggtttcgatagttctggaactacggaggtagtgggttttgaacctcttcacctggtactcatagaggagcctgaggcgcatctgcatgcgcaagttcagcaggtttttatcaataaagcctatcaagtgctccggaagcatgatgatttattagagggttcgctgttcacaacacagttgataatcagcacacactccagccacatcgcacatgaagcagatttcacggcattgcgatactttaagcggtcccaacctaagctgggaatgagccagacgacaactgtggtcaatctttccgaaactttcggcgaagataccgccactaccaaatttgccaagcgttaccttaaaacgacccattgcgatcttttttttgcagatgcggttatcatggtcgaaggtccagcggagcgaatgcttgtgcccagttttgtaaggcggtatgaagatctttgcaattgttatctctcgattctggaaatcggcggaagtcatgcacataccttgcgccccttgattgaggacttaggaattttgtgtttggtcattactgacctagatgctgttcagggaagatcaaaggtacaacctgatctcggcaagggatataacagtggcaacagtacccttaagacttggcttcccggtgaaaattcattggataagcttttggccatgaaagaggctgactggatttccaagaacgggcagattagggtcgtttatcagacgaaaattagcttcaaggaaggaaagaaagacgttccggcctatccttacacctttgaggattcgcttgtattgacaaacaaaaaacttttttcagaaatgcatgctggcaagggtcttcttttgaagatgtgtactgccgcaaagcaaaaaaatacagctttatgcgccaaagaactttatgaagtgattaccgatgaaactgcaaagaaagctgaattcgcactggaacttttgttcatggaagatcctaaggcactggaaatcccggcctatatcgccagtggtctttcgtggttggaaggtaaattatcgatcttgaagaaacctacaaaaggaaaataa

SEQ ID NO: 75891 - DNA, 1884 bp, Pedobacter sp. BMA
atggcagcgacagacataaacaatacggatgctcatgtagatgaggaaatcttcgatggactgaatccccaggatccaaaaagcttttttcttttcgctggggcgggatcaggtaagactaagacactggtaacggtattacgcaggattagggaaaaacatgggcggcattttttattgcgccaccagcggattgcggtcattacctataccaatgcggcggctgatgagatcatgcaccgtctggagcagaatgtccttttccaggtgtcgacaatccacagcttttgctgggatttgattcagggactgaccgcagatatcagagagtggctaaagataaacctgagaggtgagctgtccgatcttagtgcagctcaggcgaagagcagggatttgggtaataaatcatctctagagagggctgtacggatgacttcgaaaaccaaaaggctggaaagtcttgatgggataagcaagtttacctataacccaaacggggacaacatttccagggattcacttaatcatgcagaggtaattgccttgacagcatattttatgcgggagaaatcgcttatgcaggaaatcattgtagacagattcccaatcatacttatagatgaaagccaggatacaaagaaagaattgatagatgcattttttcacctacaggctacgcttccaaaaagagtttcccttggtctgcttggggacacgatgcagaggatttattcggacggtaaggaaaatttgggaaatgccttgccaaaggattggctgacgccggtaaaacagatgaatcaccgttcacaaaaacgtatcattgacttagtcaacacgattaggggtactgttgataaacaactgcagctgccaagagcggaaaaccagggtggactcgtccgtctttttattgcggattcatcggcagacaaggataaagccgaggcttatgtttctgagcgcatggcggaactaacgggtgatcctaagtggcgagaaaatcgactggaggtcaagacgctcattttagagcaccatatggccgcccggagaatgggatttctggatttcttccaaccgctatacgagaacgatcgactcaagacagggctgctcgaaggatcgctttccagtattggtatcttcacgaggatgatcatcccactttaccatgcacaccttattggggacaaattcgcgataggtcgcttggtgaagcaacattccccgctgatatctaaggacaatcttgcgctcgccaccgaacaattagcgcagctggcattggctgataaggcggtagaggcattaattaagctttggaaagatggggctgaaccatctggactggacatattaaagagtttgtcgacctctcgcctatttacggtcccagatgtgctacgccctttacttatggaagtttctgaaagggaacttgtggatgaggagatagagaaaggcgctgaggcggaacaggttagagcgctggcgtctgcattgtctgttcctttttcgcaaatcgtcaactatgacaggtacttgagtgaaaagtcgcagtttggtacccatcagggcgtgaaggggctggagtattcccacgtaatggtgataatcgatgatgaggagtcccgtggtttcatgtttaaatacgacacgcttttcggcatctcgggattgagtgacacggaccgaaaaaacatcaaggagaaaaaggaaacggtaatggacaggaccagacgattattctatgttgcctgttcacgagccaaagaaagcttggcgattatcgcctacactcacgaaccaagtgcattggagcacaatgcactcgaatttggctggttttcaaaattggagatcgaacgtatgacttag

SEQ ID NO: 75892 - DNA, 1794 bp, Acinetobacter baumannii MRSN 7339; identical to SEQ ID NO: 71916

SEQ ID NO: 75893 - DNA, 1782 bp, Acinetobacter baumannii MRSN 7339; identical to SEQ ID NO: 71827

SEQ ID NO: 75894 - DNA, 1794 bp, Acinetobacter baumannii MRSN 58; identical to SEQ ID NO: 71916

SEQ ID NO: 75895 - DNA, 1782 bp, Acinetobacter baumannii MRSN 58; identical to SEQ ID NO: 71827

SEQ ID NO: 75896 - DNA, 1821 bp, Burkholderia contaminans
gtgagaatcagtcgcgtcgtaattcgaaactttcgagttttcgagtacctcgatatatccttgggcaacaatattagttgcatcatcggggagaacaacaccggcaagtctgcatttctccacgcgattcggctttgcatagatgcaaatctctcatcggcgcatcgtagcttgtcgatgcgcgacatatcaacagccattgatattgggaagcctggcgaggtattaattggtctcgaaataactgactatgcggggaaggttaacgaggaagctctcgctggagcgtggagcgtagaaccaaaccgcgctcgcctgatttatcgctttcggcctcggccgagcatccgcgaacgactggcggttgctgatcccaccctcgggaagctagtactttctgactatcagtgggaactgcaggggggaggtgacgccgagatagatctcgcaaatattgattgggacgaagacgttggattcgggatccgattctctgacctccaggccttccaagttgtctttcttcctgcactccgcgatgtagagagcgatctccgccaaccgcgatcgtcgcccttcgtgaagctcattgaggcgtctgctatcacagatgcagagaagcagaagcttgttaccgcaatggaaaaggcgaacgatacaatatcgtcgtcggacaccatcacgaagctcgcccgcgccgttgataagtcattcaatgaggtcgccgggcctgcgttcgaaatgacaattgatgtcggcttggcggagcctacatttcagtcagtggtgcgagcgctccggcttctgctctccgatgacgcggtcactgatgcagatccaagctcgaatggccttggcgttaacaatgttctctacatcgccatcctcatcgagtacttcaagcgtagactccagcaggaaaactcagcggggcaactcatactgttcgaagaaccggaagcacacctgcatcctcaattgcaactctccctctacgccgcgctggaggggctgccgttccagactattctgaccactcacagcacgcacatcacggcacaagccgggctgaacaaattcgtcacgttaacgaatgttgggactggatactcacactcgtcggtaccgtcagcctgcgatgacctctctgacgatgatgttgctgacttagaacgctatttggatgcaacaaaatcgggcctacttttcgcaagaaaggtgatcttggtcgaggggcccgctgagctgctcttgattcccgcactggtgaagcaggtactggggcgcgacctagaccgcgaaggcattaccgtagttcccatctacggggttcacttcgacgtctacgcaaagctcttctcaaagcatgggttgccgaagaaatgtgccatcatcgccgatggcgacctaactccttcagacgccgcagagtcggggctcagcgaggaggaggccccgttcaacgcgccagacctcgctagactgaaaagcaaatacgttagagtgttcgcgaatgccacaacgtttgagcgcgccgttacgatgtccggaaatatcgagatgttcgcacggactgcttcatcgcttggtgctgtcgtggtggcgacgcaactgcgacgttggcgaaaggagtggggaacgctcgaacccgaaagcgacggtgccaaagaaattgctgagaaatgcaggattaaggtcctcagcaccgcaaagcggtacgggaaagcgcgcttcgcgcaagttgcagcgcgcaacatcgcggcagcaacgtccattcccgagtatatccgggaagctatcgagtggttatccgaagcatga

SEQ ID NO: 75897 - DNA, 1767 bp, Burkholderia contaminans
atgaggctaacgaaagaacagcgtgacgctgtcggatgcgatagctcggtgttcctcaccgcatgccccggctccggaaagacgagcgtaatcacagccaagctcgggcgctgcctggaggaggtggagcccactccacggagcgttgcctgcatcacgtacacaaatgcggcagttcacgagattgaaacgcgtgttagaagatcgttaggtgcccggggcgaatggcctttagacatttcgacgatccactcgttctgccttaacaacatttttcgaccatactcgcaccgactccatcactttcagcacggattcaaggtcatcgggcaagacagcgaagagttcaaaagtcttgtcgaggatacgcgatccgcgtttggtaaacgtgctactgggcgcgatattgatgaattcggccaactccgaaccactgcggagaaactcgctgtcggtcctcccatcgtgtctggtaacatcagccccgcagaagctacccatttttggcagctaatgtatgagcgtgggcagatcgacttcgcgagcctgttgtattactcactgacactctgtctaacttatccggaaatctgtgaccacctttcggcccgctttgcctggattctagtggacgagtttcaagacacaacggacctccaggttgccatcttcgaagagattcacaggcgagggaacaccaaattctttttggtgggggatctttaccagtccatttttggttttgcgggtgccgcgccagatttggcggaaagcttcgctaagcgcatcggtgcgcttagcgaattcgcactgtcggaaaactttcgttctgctccctcaatcattgacgatgccaatgcgattttccccagggcaccggcgatgacggcgaagggccggcataagggaattactctcccgacggagctggtagtcgcgagtaacccaacctatgccgtgacagatttttttttaccgcgaattacggaattgggtatcccccttggcgagtcggcggttctggccaactcctggttcaagttgataccaatcgccaaagagcttcgaatccggggcatacccgttctcggaccgggcgctcggccttacaggcgacagaggttcttcgcgacggttgcagagagaatctgcggccacttgtgcgaaccagattttgaagcactggtgggcgtcgaacggtccctctacgacatgatattggaggtcgcaaatcgggcgcctcaccgacttttcacatatgatggtcgaaggctggtctaccaagttctggctgatgccgccaatgctcgagaccattcgactggaggaatggagttcttgtattcgctttctgaacgcgtctcagcacaccttttggccgaaaattacattcgcacgcccgaggctgagatccttcgcgagtcggtggaggaaatggaacgcgacattcgcaaaaacaatatcgatccagaatccctatcaatcgaggaaatgggaattctcgcgaggccaaagcgcgcggtaaagctcttgactttccacgcagcaaaaggccgcgagttcagtgcagttgcgatggttgatctgaatgaaggcagcattcccttctatcaactcaggaccgaagaggagtttgccgaagctcagcgattgttctacgtagggctgacgcgagctcaaaagtacctgatgtatgcgcctgacacgcgtgactacaggaactgcccgagtcggtttgttggagccggctttttaggcaaatgctga

SEQ ID NO: 75898 - DNA, 1785 bp, Enterobacter cloacae
atgcggatttcccgaatccggttaattaatttcgccaacttctccgacgttgatgttgaaacgggtgagagtattgttattgttggtgaaaacaaggttggcaagagcaattttattcgcggcctgcaactgattcttgacccagcgttgtctgagcgtgaccgtcaactgggttttgaacatttttgggatggattgggcgaagacaaattgggggagaccattgaaatttcagtagatttcactgatttcactgacgatccccgattgatggctcatctgaatgactgtgtccttaatccggggcctccgatggtggcccgccttacctatcgctttcagcccaaaaccgagttaaatcgagctccagaatcgttaaaagattatgagtatgtgatcttcggtggtgctgatcctgacatgcatattggtggtgcgtttcgtcgtatgttgcccatcgatgttcaaggcgcgttgcgtgatgctgagaaggatctttcaagttggcgcaattcacccttgaggccgcttattgaagaactttccgcatctctggacgaggaggatcgtgaggagattcaaaccctggtcgatgaggctcagcgggaactggctgggcatgatgaggtggtggcgacagccgaacgaattagcgaacggttgattgctatagcaggtgagcaacatgccgttccggtatcgctcggacttgcaccgactcgcgttgatgcgctgctacgtagcctgcgtttgctgctcgacagtggcattcggggcattggcgatgccagcttggggacagctaatctgatttttctggctctgaaaagcctcgaacttgatcgtcttgttgatgacggagagcgagaccatacgtttttcgtcgtcgaggagcctgaggcacatttgcatccgcacgtacagcgcctagtctaccgttatttcctgggtactgacggggagaatggtgatgaaagggcaccgctgacaacgatcctgaccacccattccccacatattgccagcgtcacgcctgtcagatctatcgttctgctgcgtcatgacgcagaggacgagaagactattgctgtttcaacggcgaacgcaccgtttacgcagcgggacgaagatgatctgcagcgctatatcgacgtcacccgcggcgaaatattcttttcacgtggggtgatcctagtggaaggggatgctgaacgctttcttgtccctgcattcgccgatgctcttgatattcccctcgatatgcttgggatcacggtgtgctcgatcggtggaacaaatttcactccgtatgtgaagctcctggggccacgggggcttaatattccgcatgtgattttgacagaccgcgatcctatggcggttggagagccgctggttcgtaggagacttatcaatattttagacgtgcttgagggagatgttgaccatgatgatatggataccgatgaagtgattgcacgtgccggggtgtatggatgctttgtcaatgagatcaccttggagcctgagctgtttaccggtggactggccgaagccatgcagtcggtcattgagcgggaactatctctggcgcaagttaccttagatcggatacaggcatgggtggatgacacggaccagcttgatatagcccggttgttgaaactaattgagcgaattggcaaagggcggttcgcccaggcgctggcaacttcggtgtcggaggatgtttgtccggattacattcgcgaagcactggagcatatccgcgatgccgttgcgtag

SEQ ID NO: 75899 - DNA, 1818 bp, Enterobacter cloacae
atgccgttgcgtagtgtcagtgcagcctatttggctcaggctgccgagctggccgggaatccgggccagttagccgcgtatgaatcccgtgggcattgcgtggtactcgccgggccaggtagtggtaagaccaagacgctcgtgctgaagctggcccgaatcctggccgaggatgttcaggctccacgtggcgcggcatgtatcacatatagccaagaatgtgctcgcgagctgatccgtcgtctcgaagcgctggggctcagagaagcaccgaatctctttatcggaaccgtccatgggttctgtttgcgccatctgttgatgccctatggacgactggccgatttgccaatcccatttccgctttcagtagcttctcagcgtgctagcgagcggttacttcgacaatctggtgaccgtctctttggcccaaaccatccctataaggctattgatctcggacgacatcgccgttcggtgctgaaccgcaacagtgttgcctggcgtgcagaggaggaactcgctgcctgggccgaggcctacgaagcggcattgcggcaggaagggctaatcgactacgacgatatggtggtattcggccagcgtctgatcgtcgagcatgactgggttctacccttggtacaggcgaaatttccgatccttgcggttgatgaatatcaggatttgggcgttgcgctccaccgtatagtcaaacgcctggctttcgagggtggcgtacgcttatttgctgtgggtgatgcagaccaatcgatctacggtttcactggtgccgatggtgcgttactcatggaactggcaagcaggagagacgttgaaacagtcaggcttcagttgaactatagatcaggaacgggcatcgtcaatgcatctgagatggtgttgggtgaggttcgtggttatcgcgcaagcgacccgaaccgccagacaaccattgcgttccagctgtgtccggatggtctggaggatcaggctgtccatgctgtcgcgcagattattccaactgcgttagctgctaagccgggtcgaacgctgggtgacatcgccattctgtacaaggactaccgtgccggtgatgtggtggccgatgcggtgaccgctggcggttttgattacattcgtgtggacaccgcagcaccttatcgcaaggttgccttgacgagctgggtggaggattgcgcggcatggtgtgctggtggttggcgtattgggcgccctcaactgcgtggattgatagaccgttatctggcatttcatcgggcgagactggatgatgcatgcgcccggcgcaagggacaggagttaactaggctgctttgggcacttcgcaccgaccagcaacctgcgtgcgattttgtcgtgtcgttgcgcaacggactcgttgattccctgctggctactgaaccggcactttctgatcaggctgagcaactggaacacatgactgcagcacttgccgaaggcggtgcgttggcgctgctggacataacgagcctaggtggtcgtgacggctcacctgaacacctcaatttgctgacgcttcactcagccaaaggttgcgaatatgacgtggtcatcatggtcggtttggatctggggaatttgccgtggcgtaatgaggcgccagagaagctgcgcgaaagccgtcgtcttttctatgtggggctgacccgcgcacgggatgaggtgcatatgctgtattccggttttgttgatggtcgcaacggccctatgcgtctagggcgttccccatttctggatgaactggaggcgcgaatgcgaggggccggtttatggtag

SEQ ID NO: 75900 - DNA, 1965 bp, Vibrio cholerae; identical to SEQ ID NO: 71918

SEQ ID NO: 75901 - DNA, 1893 bp, Vibrio cholerae
gtgaagtttattcgacctgaccactggcagccgaaggggatcgacgatcttgagccaaatgcttggcaagcactaaggcaacgagagtccacaagtattatcgctggccctggagccggaaagacagagtttttagcgcaaaaggctgcatatctgcttgagactggcctatgtccatcaaacaaaaaaattctggcgatttccttcaagactgatgccgcaaaaaatctcgcagatagagtgaaagagcgttgttcagaagaagtcagcaatcgatttatttcgatgacttttgatgcattcactaagaatttaatagatcgatttcgcatggctttgcccgagcatcatcgcccatcaaagcgatatgaaatctcttttccatcttttcaccaagagaagcagcttattagtagtttcagaaataattttgggaacgcagtaggtatctatagctttacgcaaagactccaaaacatgaatcagtttatcggaagtgtgcgtataggagatcccaagttgtcatggttggaggaggaatttttaactttttggttgagtcagcaaataaactaccccgacggtgtttccagagtgtcatttccggcgctaaatcgacttgctgaatatatcgttcgcactaacgatcatgttcgtagatctattagagcatcatatcctattgtttttgtggatgagttccaagataccacgtttgctcaatatgattttctatcttctgtttttaaatcaagtgaggctgaggtaacagcagtaggagattacaagcaaagaataatgggttgggccggtgctaaaggtgatgtgtttcatcaatttgaggctgacttttcagcagaacgacattcattgctccttaatcaccgctcttcacctgaattggtcaggatacaacatgttattgcacaagctattgaccatgaagtgagagaggttcagacaagtaatatcaatttaatttctggtgatgccgcttggatttgttgtagttacaatataaatcaggaggctgctcatttggctgagtggatagcaaatgacttgctaggtaggtcactgaatccaagaaactactctattctggtgcgtcaaaaaccagaagattatgaacaacagctatcttattatctcgctcaacatggactgagcttacgaaatgagagtgtgaaaataggtcaaactacattacaagatttgcttgctgaagaactgaccattttgttctctactctgcttaggctgggactggtccgtcgaaatgcacaagcgtggaatcaactatcatcagatattcgaattcttcgtaatacgaaccaggaagacgaaaaggcactacgacaggttgaacgcgagctaacaaagttcatttctacactacggatgttaatgcaacagcctctgacacgggaaaatggtcgcgatgtatttgagcgaactataaaatttattaactcagacgatcttcgcagctccttttctcgttacgctacaggaaatttacttgaaataaacttggcagcactcgaagaattttttataaactgtgttgatactcagaactcttgggcaggtttgctagatgagtttgaaggcacgaaccatattcctcttatgactattcacaaaagcaaggggcttgaattcgatacaaccattttcatggggatagacgacaacgcttggtggtcttataagcaaggtgataaggaaggactatcgacattttttgtagcactgtctcgcgctaaacaaagggctattttttcctattgtcagcaaagagggcaacgaaccaacgtcgcagatttttatgagttgttgacggccgctggtgttcaggagtatgcgatccaaccaagtgtagtggcataa

SEQ ID NO: 75902 - DNA, 2106 bp, Enterobacter aerogenes
atgaaagtaagtcgtgtagcgattcggaacttccgtcgattggaaaatgtgcagattgacattgaagagaaggagtccatttttgttggtcccaacaacagtggcaaaacttctgccactgcggtttttcgttgctttctggggggacgagatttcaagatctacgacttttctgtcgcccggatagcagatttcgacacatttggattgaccggagatgaaacgctcctccccaaaattagtcttgacctttggttcactatcgatcccgaaagcatcggttttggtagagttttcacattattgccaaatctttcggatttcacgagtgtagggattaggctgtcgtatgaggtctctgaagtaaggaagttatacgagaattacaacgctgcctatcctcccaaggaagatggaacgcgctctaagtcgctttcgcaatatctatctatcgacggaaatcttggccgacattttacggtttgttactactcactagacgagaagattcaggagggagcaccgtctgagatcttatcgagttatcttgatcctgacgaaggcaaacgtcttcttaagcagctcatacgtgttgagttcgtggacgcgcagcgcaacattaacgatgacaacagcagtcgcagtaataggctctcttcggcatttgccaccttctaccaaaagaaccttgagcaggttgaccatgccgctgatgctcacagcgtaatcgatgcgaataacaaacagctgactgatcactatgcaaagcaatttgccccactgatcaatctcatcaagcgccttggtgtgccgtcaattaatgatcgcgaattgcagattatatcatcgcttagccccgagactgctcttcgggggaataccgaattgctttatattgaccctagccggaagcatgaactacctgagctctataacgggcttggattcaaaaatctaatttatatggccattcaggcgcgtcacttccattctcaatgggtaatgaccaccgagaacagacctctgtgcctgatgattttcattgaagaacctgaagttcatctccatgctcaggtacaacaaacttttatatccaacatttggcaggtaattaatcaatccgctaaggtggctggagaaccgaatctcgtaccgcaacttgttataaccacgcattcctcgcatatcatggaggctgtggattttgagaaagttcgctatttccagcgctgccattgtgagggtgaaacagaagctgctggcattcgcaatgcgtcaatggttcgaagcctccgcgctttccagccgaatgtggagacaattgatggtaaggttatcccaccatctgaatcgctagccttccttaaacgctatttacgtctaacacactgtgacctatttttcgccgatgctggcatccttgttgaaggcgctgttgagaagttgttaatgccgaccatgattgagcgtgctgcagagcgattacggactgtgtatctcacagttttggaggtagggggagcgtatgctcaccgtttcgagggtttgcttagcttccttcatattccctatcttgttatcacagacattgattcagtttcacctaccggttatcccaaagcctgtcgagcggatgttgctggagcaaaaacgtccaacgcgtccctaaagaaactttgtgggctgacaacaattgaccaattgatcgcattgacttgcgcgcagaagcaacacaacgataaggatcgttgcatcgcttttcagacagatgttttggtcgaggaaaatgatgccagcgagatgttacgtccgcgcacgttggaagaagcaattgtatatgagaattttgggctccttcgatctggtgctttatctattggcattactgtccgagcgtctatcagcgacgcttaccaagatgtttacgatagggttcggtcggataatttcaaaaaaactgattttgctatggacatcttggcttgcgctgagcaatggattgtccctggatatattgccgaagggttgaaatggcttgagtcgcgcctattacccccgctaccagttgtggtggatacagaagcctctgtcgcggcgggagaatag

SEQ ID NO: 75903 - DNA, 1839 bp, Enterobacter aerogenes
atgaggacatggatagaaagcgaagcggatattcaagtccgtgcatgcatcgatggccatcgtagttttgcaatgatagccggtgcaggcgcgggcaagactagttcactggtagatgctcttggccgggtccgggataatgaagggaatatccttagaaagcatggtcaacgcattgcttgtattacctttaccaagcgtgcggttgaggtcatcaagaaaagattggggtttgatgagttgtacctagtttcgactcttcatggatttctgtggggcttgattagccatttccacgaaaatattcgtcaagcgttatatgaaagccgtattccaaatcttatagacaaggctagggaagatgataacggtggtaacagcaaaaaggcacttaaagctcgcgcaaaaatagaacgactgacagaacagcttgcccttctcgaaacagtcaatcattttgactattctgacactagcttcagtgattacgaaaaaggacagattgggcatgatgatgtcatagaaattgcaacctacttgcttgaaaataatcaaacacttagacggatcattggcctacgtttcccttacatcttcgtcgacgaagcacaggacacatttgagggaatcgtctcaggactcaatctcgtctgtgcgggtgatgaacttcctatgattggctattttggtgacccctggcagcagatttatgaccgaagtgccggtgattttgcgccaccagacaaaggtaaagtcatcaagaaagctgaaaattttcgctgttctaaaagcgttatcagacttctcaatgcttatcgtggggatgttgagcagtatgctgctggcgaaaatgctgaatgtgaaggtagtgttgaatttttgctaattaaagcagaagagccaacagaaccacgcaggcgctattcagaagaacagattgagcgggcgctagctcgtatggatgctgctgtcgaaaactggggttgggcaggtcgcgacgatgtcatgaagctcttcctggcacgtcaaatgatcgcgcgacggcttggcttcgctgatctcaatcgcctcttcactggagactatgcctcatcacgggctcaagatgcttttgaggaagggacccatttccttcttaaaccatttctttcgacgatttgccctctcataacagctcaaagccaaggtgacgatcgaaaaattattaatctacttcgtagagatagtcctgctttcgcgagtgatggattaaatgcggaaaagtcactgaaagtgatgattgagacttcgaggtctttggttaagcagttgcatgctttgtgggataccgagacgattggaacgatccttcacttttgcgtcgagatgcagataatccagccctcagaaaggttgagtgagcatcttgatcgtcctccacgtactgagcctttcaatgaggagcttcacagtttcgacaaaggagattggctcgcagactcattttttaaaatggccacagggggagtctcccgctatttcgaatatcttaacaacaataccgcctatagcactcaacatggagtgaagggcgaggaatatccaaaggtattggtcgtttatgatgatgtcgaagcagcatggaaccaatacagctttagtaaaaccctaactcctctcaccgctggggaaccctctgatcgtcaacgctctgtaactcagaagctcgtgtatgtctcgttttcccgtgctgaggaggatctacgtatagtacttttcacagctaatccagagggagctcaagctgaactaattgaaagtaaactattgtcgcctgatcaaatacgaattatggcctga

SEQ ID NO: 75904 - DNA, 2397 bp, Enterobacter cloacae
atgaaaattgaatatattgatatccagaactacagaaagcttaaaacttgcagaattcgtctgactgacgaagaaacactgctcgttggggcaaataacagcggcaagacgtcagcaatggatgcgcttattttctttctggatcaacgaggaagaacggctgcgagcatcgcatcgggtaaatctccatcttcacgaaaattaggcgcagccgatttcaccctatcaaattggcatcagcttaatcaatttggtcaagcatgggcgaacgccgaagaggttggcgaaaaaatcagtgactggcagcccttatgcccaacgctggatgtctggttaaaagtcgagaaaaatgaagtccatcgggtacggcacctaataccgacattaaaatgggatggcggactgttaggcattcggatgatttatcaacccaaagatcttgatgccctaaaagcagattttattgcccacttcaaggccgctgagcagcttaaaatctcggcagaaaaaaatgccgaaaaagctcaaggtggttcagcatctgagctcagtgatttcaaattttcagtctggccgggatcgttgcgtgaataccttgaaagagaggtgtctaaagcttttgagataaaatcttacatcctagatcccgcaaaacttatcacggaccaaggaagcaaattcctccctcaggttcttgtcgaggggcaacttccgctagatttttatcctttcaatggactgttcaaagtagatatcattgatgctactcgtgggttttcagatccctatgtggcaaccggttctcagaatggtgcctctaatctggctagccagattaaccagtactacaatcggcatttaaaccctaccgatcttccttgtgacgaagatttggatgccctcgaagccatcgcctatgctcaacactcctttgatggaaaacttaacaaggtgtttaacaaacccttgaaagagatagagacgctggggtatccggggttcagcgatccccatatcagattatctagcagggttaatccgatcgataatttggaccacgaagcggccattctttttgagatccagaaaactagccacgccgcaggggtgccgctgatgagtctgtcagagaaatataacgggcttggctacaaaaatctgatatccatggtttttacaatgatgagctttagggatcaatggatgcgcgtcggtaaagccggcctaagaaaaccagaggaagatgtctttgttgagcctcttcaccttattctgattgaagagccggaagctcacctgcacgcgcaggttcagcaggtgtttatcaaaaaagcttattcggtgctgcgcaatcatgatgatttgcggacttccaagaggttctcgagccaactggtggtcagcacacattcaagctaccttgcgcatgaagtgggctttgaaaagctcaggtacttcaaacgtaaacccgctacaggtccgcatgacgtgccgactgcggacgttattgatctgtcctgtacttttggcagcggtaaaatccgctcggatgatgtcttacaaacggctcagttcgtggctcgctatctcaaaaccacacactgcgatctcttttttgcgaacgggattattctagtcgagggggcggcagaacgtatcctgatgccgcattttatccgtaataatcccaacgctaatacaagcttggacaacagctacatttcgattctggaggtaggaggagcccatgctcaccggctgagggcattgattgacatacttgggattcccacccttgtcgtcactgatacggatgctcaaaagcctccactcaaactaccggcagatgttcaaaaagttagctcaggaaataaacccaaagctatcaggcctgaatttggcaaaggatacattactggcagccataccataaaaatttggctcgatgttgagggagcgctggatacggtccttagaatgccggagcatgagaaaattcgtggtaaggtcaggattgcatttcaatatggtattcccattaaatttggaaaagaggaggaggccgaggctttcccgtacacatttgaagatgctattgcattgacgaatcccgagttgttcaaaaaagtagaaaaacctaccgggatgatgaaaaaaatgcaggatgctcttaacctcgatacgcttgaacagtgctgtgaaaaactctatttggcactcaaagatgataaagccgagatggcactcgatttattgtactgtgctgaccccgccgaactcgccgcgcctaaatatattcaagaggggctggactggcttaaaaaagagctggaagtggcgagtagagaccttacgccggaagtgccgaaagtcactgacgtttgggagggggaataa

SEQ ID NO: 75905 - DNA, 1869 bp, Enterobacter cloacae
atggagacaccatccacgaacgaacctgtggtagaagagcttttcagttatcttgatctggagaatcccagaagttttctgctttttgccggtgcgggatctggaaaaacccgtacgttggtcagtgtgctggagaaaatgaaacaaaggtattcttcggaactgtctagatgcggaaaaagaataggcattattacgtttacaaatgcagcctgcgaggaagtacaaaggcggttattttttgatgccaatttcatggtttcaaccatacacagtttttgctgggacttgatcaacccatttacatcagatataaagttatggcttaaaaatgaactcgagaagagtattgaacaactcacccgcgacattgaaaaaagcagaaaacctgatggtattacggcgcaaagaaacagacggagtttagccagcaaaacgaaacggctgcaatacctcgataaaattcaaaaattcagctattcccctacaagcaacaggcctgaaaaaggggcgttaaatcatagtgaagtgatcaacgtcaccgcttatctcctccaaaatgaagctctgctcagagagattttatttagcagattcccagtacttttgattgatgaaagccaagacacgaataaatatcttatcgaatcgttaattatgacacagcaggagcatcccaccaaattctgcattggattgttcggcgatatgatgcagcagatattcagcgggggaaaatccgacttagcctctcctctcccccctggatgggagtcaccagagataataattaatcaccgttcaccagtgagaattgtcactttgattaactccatcaggcaattcaatgatgcatatattcaggagccgcgccctgacgcccagcctggaactgcgcgcttgtttgtggttgacatgaacacccacaaggaaagagctgatattgagcgtcaggtcgctgaatatatggctgaacaggcggctgatactgaatggaataacaaacaatcagtcatggtactgacgcttgaacaccatatggctgccagacgtggtgagttcgaaaacttctttctgccccatctagaggtcgaaagattgggtgatgcagcaatcaatggggatagccaagagataacattcttatcctcacaactatggccacttattgacgcaattcgcagtgatgatgattttaaaattgctacaatcatgcgtaagtactcccctgttttttcgagttcgcgcctcgaatatgcagacgatccactattgctcttccgtgaagcacaatgccaaatagacaagataaaagtgcttcttggcgagaacttggcgttccccattctagaagtgtgcaaactgattcatgaaggggaattgctgatcttgcctgaggctttccagcttcacctagcgctggtgccacataaggatgatgaatccacggaggaagtggacgtcaacaaagagcatgaagcatggagcagatctttgagcgcatccgtccgtgaactggaaaattatattagctatatctcatctacatcttcctacgatactcatcagggagtgaagggactgcagtttcctcgagtcatggctattctggatgatgaagaggcccgtggattcatgtttagttacgataagctactgggagtcataccgcactctaaaacggatcaggaaaacgaaagtgcggggggggactcttcgccaaaaagatcgcgccgccttttttatgttatctgcagcagggcacaggagagcctcgctgtcgttgcatacactaaagcgccctatttagttgaacggaccgtaattgagtcaggttggttcgtaaaggaagaaattatgcatatgtga

SEQ ID NO: 75906 - DNA, 2397 bp, Enterobacter cloacae; identical to SEQ ID NO: 75904

SEQ ID NO: 75907 - DNA, 1869 bp, Enterobacter cloacae; identical to SEQ ID NO: 75905

SEQ ID NO: 75908 - DNA, 1980 bp, Enterobacter sp. BIDMC92
atgaaaattacacaaatggagatcaaaggctttaagagctttgataatgtagggcaaactataaatataaattcattcaccagcttaattggagggaatggaacaggtaaaacggctgttctcctcgcattgacaaggatgtttggtgtcaaaagctccgatagaattattcaagttgatgatttttatgttcctcctggagatgaaatcgatactcaagatgaaagagatctatcagttcgtgtaaaattcgaatttgcagacctaaaagacggtgaggacgattcggttgcagatttctttaagcatttaatttcaagtgaagcaggagagatcccattctgtatagcaaaattaaaagcaaaatggacaaagactaatcttgctgaaggcgatatagaaagcgatctggtatgggaaataggggagtctgaaaaaaatataacggcatatgaaagatcaaaaattcatgtccactatgtccctgcttaccgagatccggcccaacaactgaagcaaacagccggaaccatcatgcaccgtctgataaatgcagtcgaatggtctgaacaaatgggggcaacagttgctgaggttgctgtttcaatcggaaatcagttccaagaagaagtcggagtccagacaataacatcttcattaggcagaaattggaaatcccttttcactggtggttacttcgaagaactccaaattaagccagtagtaaatggtattgaagatgtattaaaacatatcgacactgtgtttttaccaagtccagatactcaaccattgccaactgaaagattgagtgatggtatgaaatcattattttatttatctttagttaaatctgcatttgatattgaagatgagataataaattctgatggcaaacaattatcgatatcagtagaagcattagaccctccaaatttaacgataatattaatagaagaacccgaaaaccacctttcaccacaatacttaggaagaatagttaagctgtgtgaagagatatcagaaaatgatcgagcacaagttgttttgacaacacatgcaccatctttacttaatcgggtcgaacctgataatataagatatttccggcttaatgataataaaaacacagttgtcaaggaaatattattaccaagcgatgatgaagatgatgcagacaatgttgatactttcacatatgttaaggaagctgtaaaagcatatccggaaatttattttgcaaaagttgtcattcttggtgaaggtgacagcgaagagattgttataccgaaaatagcacaagtaaatggaattgaacttgatacttcattaataacatttgcgccattaggtgggcgatatgttaatcatttctggaaacttttaaatgagctttcaattcctcatgtaactcttcttgattacgatttcagaagaggcggcggtggatggggaagaataaaatatatcattaaccaattgcttaaagtcggatgtgatgaagatatagtacttcaaacagaaggaggcaaactcactttaaaagaacttaatggaatgcatgaatggaaagaaaacgagaaagatgaaaagtcatggatagattttttcgaaacctacaatgtttatttttcatatccatatgatttagattggataatgttaaattcattcccaacaagctaccattcttttattcctgataatggtggcccaaaaatcctcccaaaaactgatgctcagtatattgataaaacaaaaaatgctatcgcttcagtattgaagaaagatgctgaagatatagatatcgattcttttgaggatcatgaggaatattattggtatcgatatttattccttggcagaggtaaacctctctctcataactatgttttgaagaaactcgataacgattcattgaaaaataatgcaccagatgtattgaaaaatttgatcgaaaaagtgagggggcttctctaa

SEQ ID NO: 75909 - DNA, 1848 bp, Enterobacter sp. BIDMC92
atgacaataataaaagatgatgattgggttcttaaagacattcaagaagttgaagaagaagctatgagggtaataagaaacagtgcagaacataatctcgttcttgctggccctggagcaggtaaaacagaattgttagcacagaaagcatgttttttaattgaaacaggaaagtgtagaagcaaaaaaataattgcattatctttcaaaaaggatgcggccaaaaatcttcaagatagagtaaactcacggcttgattcaaaatatagacacaaatttgaatcaacaacatttgatgcattctgtaaaagtattgttgatcgctttaaaagcactattccggaatcttatcgtccatcaaatgactatgaaataatctttccaaataataatgacttagttgaagaaattaaaagagaggccgtaggctttgaaggattaacatctgaagaattaaataaattacaaccttataattttgaagagaattatatagtaactccttatgataaagcattagaacattctgttgatggcaggataagacggtttgtgtggttacacttattaaaaccaaaatcaaggctttcatttaagatgattaattttcttgctaattatattattagtaggaatcaatatttatctaatgctataaattcaacatatgactatgcttttatcgatgagtttcaggacacaacatataggcaatatgagatttttaagagcatattcttgggtaaaaaaataaaaataacagcagtcggtgatacaaaacaaagaataatgggttgggcaggtgcaatgcacaatgcttttgatgtgtttaaaaaggattttggagtcgaacaacctaatgaattagttagcaatagaaggtcattaaaaaacctcataaattatcaacgcatgatggaagctttcatgaatcatgctgatataaagcctgatatgatgttgattgaaaatgaaggttcagctaagttactacaatttgacgaaagtagtattgaaggggcatatatagcattatgtatccagcaatggattgctgaaggggtaaatgaaagagatatatgtatactgctaagaaacccggctaaacaatatacagacgatatcatttcagcattgcaatatttgaaaatacaatgtcgccttgagaacgagtatcaggatcttttaaatgaagctgtagtacagttacttttacaaatgctaatgtttgtctgtaatagaaaatccatagaaagctgggccactacaatggagcttctatgtaatataagaggagtaagtaaaagaggtgatgttacacggttagaaaaagaacttagccagtttattaaatctcatcgggtaattaaagaagaaattgtcgattatttatattcattattaagtatatttggtgtcgataaaataaagtcttactttccgcagtatatgagtgggaatggtttagaatatagcatagaattactttctcgccacctcgataagttagatgtaaaagaaaacacatcagaagccattgatttattacttggcaataaaacgatacctcttatgaccatccataaaagtaaagggttagagttcaggaaggtcatcgttgtgggtcttgaacctggtgcctattttggtaaagaagaagagcaaatagaaaatcaaaaaacagtctttgtggcattttcaagagccattgaagaagtattaatgactcgttgtaaaataagaaacaatagttatggcaggtctttcaagcagaattgtaatgatataccgttaataacaaacatgataacttattgtggtatcgaggctgaagactatcaaggttga

SEQ ID NO: 75910 - DNA, 2316 bp, Klebsiella pneumoniae; identical to SEQ ID NO: 73440

SEQ ID NO: 75911 - DNA, 1878 bp, Klebsiella pneumoniae; identical to SEQ ID NO: 73441

SEQ ID NO: 75912 - DNA, 2133 bp, Klebsiella pneumoniae; identical to SEQ ID NO: 73850

SEQ ID NO: 75913 - DNA, 1677 bp, Klebsiella pneumoniae; identical to SEQ ID NO: 73851

SEQ ID NO: 75914 - DNA, 1962 bp, Klebsiella pneumoniae
atgaaaatagagaagataaagctacagaattttcgttgtttcgggcatgaggtggtcgagctaaattttgaggaagaactgacaatacttgtcggcggaaacggctccggaaagacggcagtgctgcaagctgtgtcccggttgtttggtacatcatcagcgcagcggtcggtacagcgtcgagattttcacatacctcttggccggcaggagctgcagtctggcgacagtctgtttgtcgaagcggtacttgccttccctgaactggaagagcaagacgctactcctcttgatgccgttccggagttctttaatcagatggcggcttccggtgagggagagccccttaaggcccggatacgactacaagcaacatggacggatgacggtacgccggaaggagcaattgaggaggatatacgctggataagagccctggatgataattttgaatgggatgactgttccaggattcaggctgtagagcgctcttcaatccagtttatttacttaccggcaaatcgtgatgcgacgactcaagtgaccgcccttctaaaagggcggttatggcaggctgccaaatggtcgacggcatttagggatgcaagctatgttaatgccggtcagatccagagcagtttcgaagaagaggagccgtcgaagtttctgctggagcgtctttcgaagcgttggcaacaggtgcatgaagccgatacagacagtaaaccgcgtttaaggctcatcgagaaccgttttgaggagcttgttcgtaaagccgaatttacttttacgcctgatgaagaaggtcaggagcgtcatttgtccgagctgagtgacggtcagcgctctctgttccatatcgctcttacagcggcaacgctcgaaaccgagcgggaagctttttctttgcctgctgatgacagctcatttgaacaggataagttacgccgtattcacctgacgattcttgccatcgaagaaccagaaaacagcctgtcaacgttctttttatctcgcatcatcaagcaggcgagagagattggcgcactgccttccgctcaggttctgctatctagccattccccagctatcctgagccggatagagccggaggaagtgagatattttcgtatggaccggagcgctcggcgctcatcgatccgagaactgactctgcctgaagatgatgttgaggcaagcgtttatgtcaggctggctgtaaaggcataccccgaactttattttgcgcgatttgtaatcctaggtgagggagactcagagcgagtcgttattccgaaaattgcggaagagatgggggtttcccttgatccatcattcgttcccgtcgttccgctcggtggacggttcgtagcgcatttctggcggctgctgaatgatcttgagattccacatgccacattgctcgatcttgatctggggcgccgacatggtggggtgaataccatgagaagctgccttcagaatttggccgatatcgggagtaattttgggagcgccaatggagctaatgttgctcagcttaccgaccaacagctttataatgaaggcctgcaaggtcaatggcttcaagcattcaggagggaaggtgttttcttttcctatcccattgatctcgattttgccatgttgcacgcctttccaaccgcttatcaggttgccaatcctggtggcaatggtcctcagagtagtgctgttgctattcaagccaaaaaggtcagtacgctgaaaacaggtggtaatcctgccttgtataccgcgcattatgatgacgctttcaaatggtatccgtatttgttcctgagccgcagtaagcctgaaactcaccttgcggctttttcccgtatcgcggaaggtggtgttgctgcgtccgctcctgtagagctcagggcgctcattgagtacgttacggataagcttaatctgtcaggagagagtgaatga

SEQ ID NO: 75915 - DNA, 1866 bp, Klebsiella pneumoniae
atgacccgcgtaagcagagacgactgggtacctcagggtgtcggtggtctggaagggagagcgtgggaggctttacgtgaaaccgatagcagcatccttgtgacagctggtgccggtgccggaaaaactgagtttctggcacagaaggcgtcctatcttctgcagacaggtatttgtccggcacccaaacgtattctggccatcagctttaaaaaagatgccgcccaaaacctcgccgaaagggttgcaaagcgttgcccgagagatcaggcgcggcgctttgattcgatgacttttgatgcctttaccaaggggcttctggaccggtttcgtccggctttacctgagccgttcaatgcgcccggtacgtatcagattgttaatccgtttcgtagggattatgacgattttattgagcgacatggctatcacggagtgagtgctcaacagcttgagagaagactgcttctgacagacctgccaattgacttgtcaaatggatctgaagtacatcgtgcgttagcagattactggcatgaacaattcttcgggggcgacgagatatctctatccttcccgatgataaacaggcttgtaaaactgctgcttcaggaaaattcatatattcgcagggctttacaggcaacatatcccatcgtctttcttgatgaataccaggataccacctatgcccagtatgacatgctactaacggcattcgatggtagcgatgctgtctttacggcagtcggcgatgataagcagcgtatcatgggatgggcgggagccatgaacgacgcctttgaccagtttgaaaacgactttgctgccagacgcataacactgctttctaactggcggtcacatgtggatctggttcgtattcagcacgagattgcccgccggatagacgatagtgtggaagaagtgcaggcacaagggacccgtgaaatcgaaggtgaggtttctgctatctggcaattccggagcgcagatgacgagaacaattatctggctgaatgggtgagcggtgaggttcagtcagagcgtgttgcaccacatgatgtagcgattctgatcagaatgcgggcagatcaggttgagggtgaaatagccccttcttttgcggcacgaggtctcaggatcagaaatgcggcccggtcagtcggtgaaattcagatacaggatctgcttggtgaagagctgacctgtatatttgttcctttactccgcctgggagcgacggagcgaagcccggaaaactgggagcagacccagcagaactatctgtttttggaggctgccgatccggataacgatctcacgcaggaacgattgctggttaaacttgaagcattcgtccgtaaattaaggacagagctagcacagcgccagcctagtccggattcggcggaagagattgcagacatgcttcttgaatttgtcgggacccctaggcttcggcaatcctttcccgcttaccagcgtgcaagagattttgagagggtgtggagtggatttgtcacactcctgaaagagtgtgcagaacacagcagcagctggacggaggcgctggatgagttcgaaggtattggccaggtagctttgatgaccgtccataaaagcaaaggtcttgagttccatacgatgatattttatgggctcgacaatcagacttggtggagccttacgccgcaacggggtgaagagctaaacactttttttgttgcctttaccagagcaaagcagcgtgcgtttttctcccagtgcgttgagcgagggcatgctattggctggatacagcaattattggccccggcgggagtcgaaaccatagatggtacgactatattgggtactacgtga

SEQ ID NO: 75916 - DNA, 2316 bp, Klebsiella pneumoniae; identical to SEQ ID NO: 73440

SEQ ID NO: 75917 - DNA, 1878 bp, Klebsiella pneumoniae; identical to SEQ ID NO: 73441

SEQ ID NO: 75918 - DNA, 990 bp, Klebsiella pneumoniae; identical to SEQ ID NO: 71698

SEQ ID NO: 75919 - DNA, 1674 bp, Klebsiella pneumoniae
atgaccagtcaatggctaccttctgagggcattgagccgacacaggagttaatggatattatattctgtgatcaatccgtttctgtacttgctggcgcgggggcgggtaaaacggagcttttagctcagaaatctaattacttgttgcagacaggaaagtgcatgtggcctaaacgcatattatgcctttcatataaaaaagaggcgcaagagaatatcaaaacacgtgtgatgaaaagatgtggacaaagaggtgagcgctttgattcgtatactttcgatgctttttgcaagagtattgttgaccgttttaaagatgttttgcctgagaataaaagacccttaaacaattatgatttagtgtttaatcagaaagccaataatggcaaggataagatatcatttgatctaataaggagtttggcattagatattttaacaattagaacggatattgttgatcttttttcgttgacgtattcacatgtttttatcgatgagtttcaagatacccgctctgatcagtatgaaatgattaagcttctttttaaagacaaaggaacgcaattgctagcggtgggcgatatcaaccaaagcattatgttgtgggctggtgccaataaaacagtgtttgaagattgtgaaaaagagtttaatacaaccaaaaaactattggtgcataattttagagctagtgaggaaattcaagaggtcttaagatgctttattcattttgtacaaaatgatgctaactttacgccaataatcaaaagtatcgataattgcactattcactattatgataatgagctttctgaagcggatgatattgctgataaaatcgcaagattcatcacttctggcattgaagaaaaagagatttgtgtactggttaaacagcagtcagagcaatatacggaaaaacttcgagataagttaacgactaaagggattagaaatcttgatttatcggaattgcaagatgtgttaaaagaaccattagggcaaatatttgctgcgctcttcaaggtttatacatcacgctcatcatcaagctataccgagctttgtgatttatatcttgagttgcatcgagtctcccgcggcgatgaaaaagaagatgcattaattaaagtattgtcggataacatagcggaaaataagaaaaatttaggcgatgagcctagccccgattcattgataacctgcattaaggatattataactctatttggtgtgaaaagaatggtggggcgatggaatcagtataagtccgctgattattgggataagatctggcgtaatcttgagcaacatttgcgctacacaatagacgcaacacactctcttaacgaggcggcgttgatgtttcaggcggaaaattccgttcaggtgatgaacgtgcataaatgcaagggactggaatataaagtggttatttttcttggcttagaggaccaagctttttgggcttataaaaacgcaaaatttgaaaatgattgcgctctctatgttgctttatccagggctaaagaaagtataataataacttctacaaaatgtagagagcatagaatcactaattggcgagatgatagaacctctacctataaaaatattggtcctatatattcgttcttaacgaaacattgcaagtttagggaggtgagataa

SEQ ID NO: 75920 - DNA, 2316 bp, Klebsiella pneumoniae; identical to SEQ ID NO: 73440

SEQ ID NO: 75921 - DNA, 1308 bp, Klebsiella pneumoniae
ttgagaaggattgtagccaagcgctttccatttgtttttgtcgatgaaagtcaggataccgatcctgatgtgatctctgcgcttcgaactattgctaatgacaatcctgacatgtgcataggattttttggtgatccgatgcagaaaatctatatgagcggagctggtgctattccgttaagtgatgggtgggctgaaattacaaaaccagagaatttcagatgtccgacgtctgtacttggtgttatcaattcgattcgtgcttctggggatggtctccaacaaattcgtggtcgaacgactatcgtagatggcgttgaacaaactgtatcaggcacagtgaatcttttcatcttgccttcaaatgtggaacgaagtgcctatctcacatctgtcagacgttaccttgcaaatgaaactagcgatgaacaatggttaagtgatacacgcgaaggtgatgttcgtcttcttgttttggtgcatcgtatggcagctaatcgactggggttcccgaatttatttgctgctcttactgataaagcaccgatgagtttgagtgaaggggtgaacgatgggtcagcttggccgcttcgtccgtttgtccagcatatacttccaatttttgctgcggctcaggcaaacgatcaatttcagattatgtcgattatgcgtagcgagtgtccaaagctggagccgttacgactgcatggtcaagctatggtggcagttttaaatgaaatacaacaaggcatcgatggcctgtttgcactgttagaagaaggatcacaagcaacagttcgggatatattgctacatgttaaagactgcgagctgttacgtcttgacgatcgttttgaaaatcatttaagtgatgaacctgtgaatgatggtaatgatgacttcgaaaatgttcagaactatctaagatgcaatgcccatgaactttgggcataccgccgctacctttcagaggaatcaccttttgccactcatcatggtgtaaaaggtgcacagttcgagcgcgtattggttgttattgatgatgaagaagctcgcttcagccaatattcgtatgggaaatattttcaatacattcccctatccgacaatgatctagccaatcttgaagagggcaaagagtcagtactcgaccgtactcgtcgccttttttatgtctgttgctcccgtgcgctgaaagacttggccgttgtcatctttgttccagatgtcgccgtcgctcaagcggcaatcgttgagcaaaatttattccctgcatcgacaattctagggcagcatgatctaagttag

SEQ ID NO: 75922 - DNA, 2316 bp, Klebsiella pneumoniae; identical to SEQ ID NO: 73440

SEQ ID NO: 75923 - DNA, 1878 bp, Klebsiella pneumoniae; identical to SEQ ID NO: 73441

SEQ ID NO: 75924 - DNA, 2316 bp, Klebsiella pneumoniae; identical to SEQ ID NO: 73440

SEQ ID NO: 75925 - DNA, 1878 bp, Klebsiella pneumoniae; identical to SEQ ID NO: 73441

SEQ ID NO: 75926 - DNA, 2316 bp, Klebsiella pneumoniae; identical to SEQ ID NO: 73440

SEQ ID NO: 75927 - DNA, 1878 bp, Klebsiella pneumoniae; identical to SEQ ID NO: 73441

SEQ ID NO: 75928 - DNA, 2151 bp, Klebsiella pneumoniae
atgtgtagtaaaactatgctaagggcccaatcgattactatgtatatcaataaattagctattagaaactataaaaactttcgaagctcaaatttctactttgttaaaggctcagtgaatacaattatcggtgaaaatgcttcgggaaaaacaaatttatttaatgcgatgagattaattctagatgattctctcccaatgaattctaggattctatctaatgaggacttctaccgtggattatccgaaccctttggtcattggatcataattacgctatattttgatgatttaagtgagtcggaggaggaacaggtccttgccaactatacagtaaatgatggtaatgataagtctataaaggaaggtaattatacttttatatatcgacctaaatttcatattcgacaaaagctgtatgagttaacattagaagatgacaatgtggaagcaagatccgcttcttttactgaatttgcatctaaccatattatttctaaagaaacatatgaagcagtagcttttgttagaacaaaggttgatttgaataatgacgaaatttataaacaagtagttggtgattttgatagttactccttttcaaatcctaatgatgatgatgctactgtattaggggttaagaagccaccttacttttccttaggcagcgaagtcgcttgcacttatgtcaaagcacttaggaatgtagttgcagatcttaaatattataaaacgaatccattgtataaattacttactttaaaaagtaaacaaattgatgatagaagagatattgtagaaaatgttaaagagatcaatggtaaaatttcagctatacctgaaattgagagattgagtaataagatatctgcttcattacttaatacagtaggctcgacttattcccctaaaatattagtatcctcacaacttccagaagatttcacagaattaattcaatcacttggcttagtggttgaagattctctggattacaatggctcaggaaagattgatgatctgagtcttggtggagcaaacttaatttatcttgctttaaagttatatgaatacgaagaaataagggatagtgaagagcatattactcacttcttgttaattgaagagcccgaagcacatattcataatcatatccaaaaaacccttttcgataacttcaattttaaaaatacgcaagtgtttgtttctacacattcaacacaaattagctctgtatcaaaaatatcatcaatgaatatattatcacgccaaaatggattcactgatgtatatcatccatcgtttggtttgacgccgaaagaaatttcttccgtagagcgatatcttgatgcaattcgtagtgaccttttgtttgctaaaagtgtcattctggtagaaggcgatgcagaacttattttaataccagcaatggtaaaagaaacgttaggaattagtttagatgagttgggtataagtcttatcaaagtagatggcactgtttttaaacatatttctaatcttttccatgaaaaacggttgaaaagaaaatgtgcaattctcacggatcttgattcggcctatgtaaaagtagctgataatatttttgatgcggattttgtcgaatctctggtagatgccgaagatgatggattacgaagaaaagaagagttagataaatatattgaaggtaatgagtttataactgttcattacgcagaaaatactttcgaaactgagcttgttcgctacgatgaaaacaataacttgtttatagaagttatgaaaaccgagtataaaaaagaagcgtattttaaaaaggctgaatcagacgtaaattcatctgatctcagagttcggtataaaagagtattaaagtttgcaaagaaaatagggaagggatggttagctactgaaatggtagaacatcttagtgttgataatcgtgttcctgattatattttacaggccattcaatttgttcttcgggatagaaatgttgagcctatatatcaaaaaatgcttgactacaatatgtctttaatggggggtaaagcatttgactgtataaatgccgaaaaagatttttctagtaaaatgatagaatataagaaacacttcaatgacagttttgtaagattgttggagttatag

SEQ ID NO: 75929 - DNA, 1752 bp, Klebsiella pneumoniae
atgccatatagaaatttaacttctgagcaaatggatgccgttaaattcaacgggaatttattattaacggcatgtccagggtcgggtaaaacaaaaacattggtttctaaactttgtttcattttagaaaataaagaactattttgtattggtaaaaagaagataattgctcttacatatacaaatatagcagccgatacgattcttgaacggattatgtcattcggcataagtagtgaatctttatggattggaacaatacacagtttttgtttgaattggattataaaacctaatgtagataagataccaagactttgccgaggatttagtgtaattgatgaacatgaaaaggaatttctcataaatgaattaaaagaaaaacatggcctatctgcaaatgataaagtttttactaatttagattttaaccttggtcagttttattcccgtgggaccaaagaacatttgattgtaaaagaatatcataatcatttgtatgagaaaaaattaatcgattttgatttgatattaaatctgacttgtcgagtgttgacaaaatacaatgcactttgtgaaagattgtctttacttttaaggtgtattttagtcgatgaatatcaagatacatctcttatacaatatgagatactcagacaaattgtattaaagaaaaatacaatgattacttttattggggataaagagcaagctatatacactggtttgggggctgtcgtaaagaatagagatgaattaattaattgtttccaacttgataatctaaccgagatgaaattaacggggtgtttccgtagtagccaatctattattgatttttatagtaaatacaaagacgaagattatgagattaattcactttcagataataaggatttcaactcagtaatttttaaagaaagcgaggtagatgtttctcaactgccgatttatgtatcaggtattattagaactcatttggctcagggagtacttccaaatgaaattgctattctgtgtcctggttggtttgatgtgataaaactttcaaatgatattgttactcttaatccggatatagaaattgatggagtcatgatctctcctatacctaaaaacaatgagaatctttggcttgctttagttaaactatttttaattaggagagttccctctaattttaatactagacagaagctattgcgggatttccttcaagaattaaatgttgttgcaccctatactgaatcgttgtctcctaaaaaaatattaaagattattaataaaatatcattatctgtggattataattgtgaaattgatgtttggttgagacaggttataacgagattttgccattctattaatttgggcataagtaatgatagctactattatcaagaaatggaacttttgattaatgccacattgaaaagaatgttaaagtataatatggcttataaagcaaatgaattacatttgtttttcaattttagaagcggtgttaaaatcacaacttgtcattcgacaaaaggtgatgagtatgaagtggtcatttgcactggattactaaatgggaaaatacctaattggaatgatattataaattgtagctcagagcatcaaaattatgttgcccgtagacttttatatgttgtttcttcgcgtgcaaagaaacatttatatatgatatcagagagaggttacaagacaaaaaggggatatccatatcagacaactccacagctttga

SEQ ID NO: 75930 - DNA, 1569 bp, Klebsiella pneumoniae
gtgccgggcttcctttcagttacgaaagaggtctcgctgactttcatccaggccttgcgcgatgttgtttctgagtttcacaacaatcgcactaaccctttactcactttgctgaagagcaagagtggagatatcaatccactaacgatggaaccaatctccgagatggtccgcggacttaatgcctcaatcgaaggacttgaggatgttcagtcagttcgcaatcatattcgtgagaccattaaggacgccgcaggtgaaacttactcccctgcttcactctcaatcaagtcagatctccctgaagaagcagataaactttttcagtccctgcgactattcgttggtgaatcagaagaagggtacgaaggtgcaattcatgagctgagccttggcggtgccaacctaatatacctgactctcaaactactggagttcaagtaccagcgggaaaagctagccatggccaatttccttttgattgaagagccggaagcgcacatccatactcatattcaaaaaacgctgttcgatcgcatcgcatatagcgatgcgcagatcatttacaccacgcactcaactcacatctccgaagtcagtaatgtaagcaatgtaaacatactgggccgtcacggagcgttttgcgaggcctatcagcctgccagaggtctagatcccacccaaatcaatagcatccagcgttatttggacgcggtgcgtagtaatctcctcttcgccaaaagtgtgatactcgttgagggtgatgtggaggagatcctgataccaatactgattaagcttgtactgggcgtaagcgttgacgagttgggcatcagtgtcatcaacattcgtagcacaggattcaagaatgttgcggttctcttccatgacctacgtattaagaaacgatgcgccatcatcactgatttggataaggccttctttaatatcaccgtacaggcaactgataatgccattgtggcaaagataaaggcaaaagctgcgggatctcagaaagccggtttagaacggcaggccgatttgacagagttcacggcagaaaatccatggattgaaaccttttacgccaaacacaccttcgaggtcgactttgtcgcagccggcaaccaagaggctatcgtccagaccattccgaaagtttacaaggatcaggtaaccagggaagaggcgaagctgcaactcaagtccggagacctgcaacaaatgggtagtcgtacgctgacaatggctcggcaagagggtaaggggtggttcgcgcttttgctcgctgaatacctcactccccaagtccagatacctgaatacatcatacaggccatccattttgcacatggcaaatttccgcgttcccttattgtcagaattctccagtatcgcactgaataccgatatggagcagatgtggcaaatctgccagcgaaacaattatttcttcaggagataaatcgttttgcgcaaggagatattggcctggctgagttcaggataacaattggacgtttattaccgggagaccccattattgtattcttagggaagttgcaatga

SEQ ID NO: 75931 - DNA, 1785 bp, Klebsiella pneumoniae
atgaggttcgtttgggatccaagtgacctcaatcctgaacaggcggcagcagtgacagagccatcgagcatttttctgatcgcttgcccgggtagcggaaaaacgcgcaccctgacctacaaaattgcctatgaactctctcgtcgaactgataagcggatggttgttgccattacctacacccaccgtgcagccgatgagatccaagaacgtattgaggatttgggcgttgatacttctgggctatggattggtaccatccatgccttttgcctggagtggatccttaagccatatggcatttattcgcctgaactagcgcgtggttaccgcgttatcgacccgtacgatcgtgagcgtctgctggagaggctgtgcgctcagtataaaggtatcactcactgggattgtgactactacgttactgaaacgggttatcaacttggctgtgtcgatacgagaaaacatcctattattcaaaacgttttgaaggaatattttaaagagctttcatcaagccgacagatcgacttcgaacttatcctttggtatgcgtactgcttgatgcgggacagacctcctatcgcagtactgctctctcgcgtgttttcccacatcctcgtggatgagtatcaggataccaaacagattcagtactctattttgacgtcgatacttcgcgctggaaggggggagaccaaaatactcatcgttggtgatccgaatcaagcaatctatggctcactgggtggctacgctatgccattagatgaattccgtgcgcaagccggaatcccgataaaggagtttgcgctcagcctaaactatcgctccagtgagcgaatcatcagctatttttcgaactacagcgtacacgctagcaaaatcaccggtgctggcaaagatgctaaatttcccagccggattacctataatcaaaaggttacacgcagcaatgttcatgatgagattgtaaggctgattcggaagagtctagacaacggctactcacccgaaaacatctgcgtcctcgctccacagtgggttttgcttgcctccacgactcgaaaactagttgcaatgttgcctgatcagcaatttgatggcccaggcctcatacctttcagtaataacttcgataatttctggttcaaggtttccaaggttttactgacggattcttccccagcattacttatcaggcgactgcgttgggcaaacgaagtaataaaagatcttgatagtttcggcgttgatactaagacactgacaccgagaatcttgctgcgggagagtaacgcgctcacggtcaatgagttggacggactccgctacctggaccaggccttcaccgagctgctcaagaggctcaatatttctccggaaattcatcctgcgctcttgactcatcgagaggcttttttcagcagctcagctgcgcgaatagagcgtctgcaaaaggaaggggcgacatacatcaatcaaatatccgtcttcaaaaaagtctttcgcgaaagaagcggcatcactgtctccaccattcatggtgtcaagggtgccgagttcgatgtcgtcatcgcctttggattattggagggcatggtaccgcacttcaatgaagtgaatggacatgttgccgcaagcaagctcctctatgtattgagctctcgtgctcgaaaaaatcttcatttaatctcggagtcagaacgtcagagaggaagatacagtagctattccgcgaccgaattactcgcggcctgcatctttaattatgacgaggagtaa

SEQ ID NO: 75932 - DNA, 990 bp, Klebsiella pneumoniae; identical to SEQ ID NO: 71698

SEQ ID NO: 75933 - DNA, 1674 bp, Klebsiella pneumoniae; identical to SEQ ID NO: 71699

SEQ ID NO: 75934 - DNA, 990 bp, Klebsiella pneumoniae; identical to SEQ ID NO: 71698

SEQ ID NO: 75935 - DNA, 1674 bp, Klebsiella pneumoniae; identical to SEQ ID NO: 71699

SEQ ID NO: 75936 - DNA, 2139 bp, Klebsiella pneumoniae
atgtatatttccaaactgaccctggtgaattacaaaaacttcaagaacacgtctctgcggtttcacaagggagtgaacaccattatcggggaaaacggctcagggaaatctaacatcctgcgagctattcgcctcctgcttgacgacaatatggtgcgttctgcttatcgtctggaagagggcgatttcagccgatcactcgaccaatggcaggggcactggatcatcatcagcatggagtttgacgagatcaccactgatgaatccgttcaggcactctttctccacggtacggctcccttggacgatgggccaatacataaggccacatataatctcattttccgacccaaaaaagacatcaggttgaagctggcagccttagaattgtttgattttaaagaactctcggagattcgtgacgcaatcaccatcgatgattacgaaacgcttttcactggacggagcagtgctgatttcggaaatccagcggtataccgaagtatcgttggagattttgatatatgtgatttctcatcagagacggagtttccagaaattggggcaaaggtgccgggcttcctttcagttacgaaagaggtctcgctgactttcatccaggccttgcgcgatgttgtttctgagtttcacaacaatcgcactaaccctttactcactttgctgaagagcaagagtggagatatcaatccactaacgatggaaccaatctccgagatggtccgcggacttaatgcctcaatcgaaggacttgaggatgttcagtcagttcgcaatcatattcgtgagaccattaaggacgccgcaggtgaaacttactcccctgcttcactctcaatcaagtcagatctccctgaagaagcagataaactttttcagtccctgcgactattcgttggtgaatcagaagaagggtacgaaggtgcaattcatgagctgagccttggcggtgccaacctaatatacctgactctcaaactactggagttcaagtaccagcgggaaaagctagccatggccaatttccttttgattgaagagccggaagcgcacatccatactcatattcaaaaaacgctgttcgatcgcatcgcatatagcgatgcgcagatcatttacaccacgcactcaactcacatctccgaagtcagtaatgtaagcaatgtaaacatactgggccgtcacggagcgttttgcgaggcctatcagcctgccagaggtctagatcccacccaaatcaatagcatccagcgttatttggacgcggtgcgtagtaatctcctcttcgccaaaagtgtgatactcgttgagggtgatgtggaggagatcctgataccaatactgattaagcttgtactgggcgtaagcgttgacgagttgggcatcagtgtcatcaacattcgtagcacaggattcaagaatgttgcggttctcttccatgacctacgtattaagaaacgatgcgccatcatcactgatttggataaggccttctttaatatcaccgtacaggcaactgataatgccattgtggcaaagataaaggcaaaagctgcgggatctcagaaagccggtttagaacggcaggccgatttgacagagttcacggcagaaaatccatggattgaaaccttttacgccaaacacaccttcgaggtcgactttgtcgcagccggcaaccaagaggctatcgtccagaccattccgaaagtttacaaggatcaggtaaccagggaagaggcgaagctgcaactcaagtccggagacctgcaacaaatgggtagtcgtacgctgacaatggctcggcaagagggtaaggggtggttcgcgcttttgctcgctgaatacctcactccccaagtccagatacctgaatacatcatacaggccatccattttgcacatggcaaatttccgcgttcccttattgtcagaattctccagtatcgcactgaataccgatatggagcagatgtggcaaatctgccagcgaaacaattatttcttcaggagataaatcgttttgcgcaaggagatattggcctggctgagttcaggataacaattggacgtttattaccgggagaccccattattgtattcttagggaagttgcaatga

SEQ ID NO: 75937 - DNA, 1785 bp, Klebsiella pneumoniae; identical to SEQ ID NO: 75931

SEQ ID NO: 75938 - DNA, 2139 bp, Citrobacter sp. MGH103; identical to SEQ ID NO: 72908

SEQ ID NO: 75939 - DNA, 1800 bp, Citrobacter sp. MGH103; identical to SEQ ID NO: 72909

SEQ ID NO: 75940 - DNA, 2139 bp, Citrobacter sp. MGH105; identical to SEQ ID NO: 72908

SEQ ID NO: 75941 - DNA, 1800 bp, Citrobacter sp. MGH105; identical to SEQ ID NO: 72909

SEQ ID NO: 75942 - DNA, 1776 bp, Citrobacter sp. MGH106
atgtcaattcttataaattctgttaggatttcaggttttagaggtataaaggaaattgaggttgagctaggacgtattgccgttttgttaggtacaaacaatgcggggaaaacatccttcctaaaatcgttgcaactagctttaggtgattaccaacgttactttagtgatgaagatcttcatatagatagttctgggttaaaagttaatgaagttatcgttgacttaaaaataatacctacggatgaacattataataaaacagaagagtttgacgaaaaatggattgatgttttcggtgataatattgcagtagatgcaaatggacatgagtttgtggctattcgtacaaaagttcagccagatgagataaaaggtgggtttaatacacaacgttattatttgaatgaatggggggagtttgagggatggaaagagattgttgtcaacgagagaagaaaggtaagaacaaaagttgatgcaatcccctatatttgtattgaggctcagagggatatacatcatgagcttaaagataaaagctcatatatagggaaggtcttatcatatattaaatatgaagatgaagatgttactgcacttgaagaaatgataagttcaataaatgaaaccgcagtgagtagaagtgagccgcttcaaagcttaaaaaattcacttcaagggttaaaccaatcatttctaggatcaagccacacagaaataactcctttccctaaaaaaatccgagatctatcaaagcaatttacagtacatttcggagatgaagaaaaccattcattttcaatggaatatcatggcactgggacgagaagttgggcttcaatgcttacagttcaatcgtttttaagctttatgcatgaacggcatgagctcgaaaataaggcgctacatccaattgttggagctgaagagccagaagcgcatctacatcccaatgcacaaagaaccttgtttaaacagttatcatcatctcagggacaaattatactgagtactcattcaccatacctgagcgcaatggctgagatagaagatataagatcattcataaagaaaggtgatggagtaacagtaaattgtttgaagaaaagaattgaacatgatgaaaaaaatgcattaaaaagggagataatgttaacccgtggtgagttgcttttctctcgagccttaattttatgtgagggtgttacagaagaacaattaataccatccatgtttgaattgtatttcggtaggacgatgtttagtgttggagttaactgtgtaagtgtcagtggtaaaaattacccaccattcattaaacttgcaagtaatttaggtatccctgtctgtattattagtgataatgatggtgatactcatggtgagataaaccgtcaggtagcacgtttagttcgtgaagatggcctcgtattgaatcctgattgtttctctttagagttcctcaaagaaacaaatgatattgaagctgagttatacaacgagttaaatattcgtgaagaaataattgaatcattagtgttaagtgaaaccaaagctagtcctaatgaacggtatcgagaagccaagaaaagagaaatagaggatttacaagatagtgctataattgaaaaaatgcgtgactcaaaagctagttatgcagggtatttaggagtgattctagcacagaatgcaaatggaaagagaattgaggagttacttccggaatctgttattattgcatttaataaagttaggggatggcttgagctatga

SEQ ID NO: 75943 - DNA, 1899 bp, Citrobacter sp. MGH106
atgattgataatttatcacaatctcaaattgaagttgttagagctcctatgggaggggctatacaagttcttgcatctgcagggtctggtaaaacaagagtgcttactgagagggttaggttcattcttaataactctgctagaggaagtgtggttgctttaacattcacaaataaagcagcagatgaaatgcttgaaaggttagatgatggctcagaaaatcgtgataggatttggattgctacaattcattctgttgcacaaagggtactcgaaagttatgggtatactattgggttaccaaaagaattacatatatttgaacgtgaccaagatcggatggaggttttcctacattccttaagagaacagggggttaatattgatgagtacttagatgttgaggacgttagagaaaagcgcaatcgtgaaaaagttataagtcaatatcttaatgtattctctattattaaaagagagcttttaactgaagatgaagtaaagataaaattcagctccaatccgcgtatttggaatatttatcaagattatcagtctgctttattggaaagtggtggtgtggattttgatgatatacttttatatgcacataaaatcctattaaatcaagaatcggtagcaagaatatatcaaaaaaaatacgttgctttatttgttgatgaagcacaagacttaaatagagctcagtacgaatttataaaggttctctgcggtgataaaataaaagatgtcatgatggttggtgatagtgaccagatgatctatggttttaatggttcatcatcagattattttattaaatcattcgtgaaagattttactcctaaaacttattgtttaaacgagaactatagatcttcgaaagcagtgattgaattagctaataaattaaaaccaaatagccaagttggtgttaatgctgctcttgatggctataaatcttttaatgctttaccagatgaagaatctgaagctatatgggtttgtgatagcattcaacatatactgaatttaaaaagacatccagaaattgagggcgatattgattgctctaaaattgttgttataggtagaaatagatttgtttttaaagctatggaaagtgagcttaaaaaaagaaatataccttatttcctaaagcgtagtgatagaaatgaatcgcctgtttctcttattgggaaaatagtcgatcttgctataagggttaaggttaatccaaaggattgggttgatgggaagagattgtataaattaatcggtttagaattaaatccagaatcagatgttacctacgatattagcaaagtctatgctgacataaaaaaatcatctaacctagataaagatttaattagcttggttttagcacatattgatcatatgtctgtagacacacctaatattttgaagttctgtttagatattaaatcagaactggtgagtttaggagcaaataccaaagattctgctaaagaagatgatattgccacagggattaaagatatagagcagcttcaatccatgtggacacgattcaaacgtaaaggcctcggtgataatctatcctcatttaggaatgcacttgctttgggtcagcttaatgatgataccttaaataatgggattatgttaagtactgttcatacaatgaaaggacttgaaaaagatatagttttccttatcggtatgtgtgagggggtttttccagattatcgagctaagagcaaagtcgagctagatgaagaaagaaataatgctttcgtagctataacaagatctcggcgttggatttttgttacttatccagaaaaaagaatgatgccttggggggattataaatatcatcctgcatcaagattctttctcgatatgcagtaa

SEQ ID NO: 75944 - DNA, 1701 bp, Citrobacter sp. MGH109
atgagaatcgaaactgtttatattaaaggattcaggaattactgtgatgccgttattaattttaatgaaactaatttgattataggtgcaaatgatgttggaaagaccaacctattatatgccattcgattattacttgataaaagtttatctgaattagatctagaaccaaaaagcaatgactttcatgtaagttcggcaggtgaacaggttgaaaacatagaaatcactatcaagtttacagatgttagtgaagatgctgtaatatctaaattaggaggatatgttagcgatgaaggggaaacatacattaagtatcttgcttcatcattaactatggattacaagatattacttagtcatgaacataacaattttgatgaggttcctaatagattttacttaaagtgtttaagtctaaggtatataaattcgcaaagagatcttgaaaaatacattaaaattgaaaagaagcatcttttaagattggcgcaagaagttcgtagtgaaaaggatactgaaaatgatggggcggtttttactgaattaaataagttacttactgaagtaaatgaaaaagttaaaggaataagttatgttgcatcagcaactgaagagcttaacgaggaacttaggaagttatcctatactcatgatagattaactgttcaacttgatactggtgcaatagggattgaccagtttatagagaaattagaattaagtgcgaatacaaatggaaagaaactaatgcttggtggcgatgggtttaataaccaaatccttcttgcgttatggaaagcaaaaagtgttcgcgagcatgatgttgatagtgaagtagtgatctattgtatagaggaaccggaagcacatctatttcctcaccagcaaagaaaattggcggcctatttaatcgataaacttccaggccaagcaatcgttacaagccactcacctcaaattgcagtgaattttaaacctgattcaatcataaaactatactatgatgatggagagactttagccgcaagtaatggatgttctgattgtattagctctgcatgggatggaatgggctatcggatgagtattattcctgctgaggcattttttgctaacgtggtttttttggtcgagggaccatctgaggtgattttttacactgaattagcaaaagcattaaatattgatcttgattattataacatcagtattctttctgttgatggtatccaatttgaagtttatagaaaaatattaacagctctaaatattaattggatcgtaagaacagacaatgatgcttcaaaagtacctcataagaatgaatggcaatatgctggtgtaaatagggcgttagcactgtgtggagagaataaagaaccaaactcaaatattcctatagatagtaaagctttgcatgctaagtggggaaccatttcaccaataataaatcctaacggcgtttatatatctttttttgaccttgaaggggatctcgctaatgacttctcgaagcatgttcttgattatgcaagtaaggataatctagatgatgccgctgattatttgagaggaaaaaaagctatacgtatgcgtgagttaattaaagagaaaaaagcttttttaactgagctgaagaacaaagatatagccagacctctaatacatgcactgaaaattgctagaggtgaattatga

SEQ ID NO: 75945 - DNA, 1623 bp, Citrobacter sp. MGH109
atgaagctaactaaggaacagttagatgcaattgattacgacggtaatctagttataactgcatgtccgggaagtggtaaaacaacaatactcgtccataagattgctgcctgtttatcccattccaaggattatcagggagttgttgcgttatcatatacgaataaatccagcgaggagctaaaagccagatgtagaaaattgggagcagagttaaattctagcttctttggtactattgataaatttttcattaacgaaataatcttaccttttgtaaggcaagtatggggcgggaacgaaagcactcccgaagtagtaaagtatatagatctttctcaagaattaaaagataaaacaaataagtactttgaccgagtggatttttattctaatacctcatttgagggcatgggttctctgagggatatttatttaaaggggatgttgattttagacttccttcctcatttggctttttatatagttagaacatcatattcttgtcagcggtatttaatggcaaagtatattagtttttttgtcgatgagtatcaggataccggttattttactcatcaggttttcaagttcataccaacgttagggatgcctctgattatcgttggtgatttggaccaatcaatttatttgtattctcaccgcagttcggattcactaaaagacttcatgaatgatagtggtttctgtcataaggaaattacagtaaatcatagatgtcacccatctatagtgaattacgccaatagaattaaagattctgaatgtcaactggttccgtgtgatgagatttttgtttatagaaaatgtgttgatggtaatcaaattgatatagctaaatggattggtgaaattattaataatgtaaaaaataaattttcaatatctgataataaggagattgctatattggtaagaagcaatgcttgcgcggagctagtttctgataatttggttgtttctaatagggcttatttggataatgatttaacaaaggctggtggtaaggtttctggtcttgttaatgatttgttgtgttatagatataacttaaataaaactgctcagtctattttggagggggttttgggaggcagtgttaaaaggagcgaggctactcgtatccgtaaggctattaagcaggttagaagtgttaaagatgccttgcttattgacgtaataaataaaattgtagtaactcttttagggattgaaatcgagcaacatcataagtctgctctttcagaaatattagttactccgaggatgcaaaataattatttggatgttagaagtgatgaagtacaaataatgacgttacataagtctaaaggtcttgagtttgactttgtttttcatttggatctctatgattggattttgcctaaaagggttttcatagaaggaagctatgatgttgtattcgaaaatgaacagcaatgcataaatcttcattacgtaggaattacacgagcaagaaaaggcattatgctaatgcattctacgaaacggtataatggttcaggtgatcttaagaatggggctccatctcaatttcttttgaaacctgggttagatggcctttataaaaaaataaattaa

SEQ ID NO: 75946 - DNA, 1734 bp, Citrobacter sp. BIDMC107
atgtatattaaaaacttatcaatacgtaattttagaaattttcaaagtacgaagttgaactttaagaaggaatgtgtgaatacgatagttggagagaactcatcaggtaaaacaaatgtttttgaggctatgagattaatactagatgattctctcccatattataaaagattccttactgaaagagattttcacagaggatgtttgccggtttttggtcaatggatattaatcagtttggagttaggtgacatttctggagatgaggagtctgaaattttatgtcaattaaatacgacagttgatgcgggtggtacaggtcgagtaacatacatatatcgacctcaattccatattagagagaaactttttaatttatcatctattgcagacttgcaaaaaaggagagaggcatatgataagttgctaaaggaatatattattgataaaacgacctacgaggcctggactgtttatcaaggaacctgtgatttctccgatgaaaatgaatatgtcaggattgctggtgatttttcaaacttcattttcccaaatccttctgtagaatatatagatttattaggaaataggcagcgtggatataatttactagaccatattagttgcacatacgcaagggcgctgagggatgttgttagtgagttaaaaaataatagattcaatccattccaaaaactattggatttcatctctaaagatatttcaaatgatgaagagctcacaagtaatattatagacgtaaataataagatatcaacaatatcagaggttagaaagctttctacaggtattctaacatccattactaatgctgtcggctctacttattcccccttagtaaatatttcatcagaacttcctagtgacgtcaaagatcttgtgaaggttttacagctcaaagcaggagattcgttgagtgatgggtacacggctgatttatccgaaatgagcttgggtggagctaatttaatatatcttgctcttaaattgtatgagtatgaagaaggggtgagtaagaatctattgtcaaacttcctgatcatagaagaacctgaatcgcatattcatactcatattcaaaaaacacttttcagtaatttaaaaaacaaaaaaactcaagtttttatttccacgcattcaacacacatctcatcagtctctaatatatcatcaactaatgttttggtgaaaaaacttggatacactcaagcttgttctccttcctcaggcctcgatgaaccaacgatcaataagatagagcgttttcttgatgcgatacgtacagatattttatttgctaaaaatgtgatattaattgagggggatgcagaggaaattctaatacctcatttagtaaaaaactctttcggtgtaacactggatgagttaggagtatctcttatttctgtgagaggaaccgggtttgaattactctcatcgctttttcatccatcgagaataactaaaaaatgcgcaatactcacggatgatgatattaatatctataacgaagataaaccggagtacatcactcaggtaatgtatgatgatgccatttcctcagaaaaatcagggaaagagagagttgaggcgttaaagttattaactgcaaataataatcttctcaaagcatattttacaaaacatacctttgaaattgatttagggaaggtgcgaataagcaggtcatttcttcccaagctgactcgctga

SEQ ID NO: 75947 - DNA, 1692 bp, Citrobacter sp. BIDMC107
atggacgatgaaaaaaaagaattattaaagatcaaaaaaaatctttttgtctctgcttgcccaggcgcagggaaaactaagtttcttttgggtatgcttggcgataatattaggtgtgactcagggtttaagtggcatatagttcttacacatactaatgctgccgccgatgaaataaatttacgattagataaccaaaacattctaaatgatagagtttggtgtggaacaatacattcatttttactcgagtgggtggtaagaaaatatgcgggggcaatggctagaacaaaagatggagtaaggttaatatctgagcgtgaacatcgtgacttaatacgtaagattgagaaggaaaaattccccagtacaagattaaaatttaaatgggatgaatatggtgatcctcatgttgagccattttgtttattaaatgagcctgaaaaaataattgatgctcaaaaaaacgaggcaatagtgtgtgaggaatatgaaaaaaataagatagatgcaagcctcatagattttaacgacatattaactcttagcctggaatttttgactcaaaacgagaagatcgcagagtatttatcgaaacttataggttatatttacttggatgagtctcaggacactagttatatccagttggaagttctttcatttattacaagatataataaaacaatagttcttgttgtgggtgataatgatcaagctatatatcaagatcttggtgtgtctataaaagatgaagttagtattaagaaaatactcaaactcgatgagttggaggtaaggcaacttacgggatgttacagatctacaaaatcattagtagattactataaaaaatattcttattcgaaatcgaatatagaatctatccgtgaggatttaggtaagtcacctattattagacacacattgcaaactgatttggccggtagggtgatgaatcttattgaggcatataataagtctaaaggtagtgttgagagtttggctataataggtccgaatagatattacttaaatgatcttatcaatagtatttatgaacgttcaaatgagtttgtatttgattttttttcaaccaatcctttgtatacattgaaagataccatttataatgatcttgttcgtcttgtgttgcttgatgtgtcagttaataattacagagccagacatgcgttatgcatttctataaaagacaaacttcctgaatttgatggtttatcttgtagtgacttgaaaaaagcagtaaagcaattcaatacaaagcgaactgtttttattctttggttaaaagatttttatgagttccttttatctgctttacctcattctccaaaaataaattctgattatttgatctgtcagtccaatctttcagcttttccagtaaaggctgacataatttcaatacgaaaaataataaataaagaggctaacgttgtgaaagtgacaacaatacatggttgtaagggtgaagaatacgattatgtaatatctattggatatcatgatcaagttgttccccattcttcggcggttgaaaagggtgctgaatactcagaaagcatcgcaaaaagattaatgttcgttgcattttcgcgcgctaaaaatcacatgaatatatatatcgatgaccggagagttgttagcccttattttatagctgatacttga

SEQ ID NO: 75948 - DNA, 2139 bp, Citrobacter sp. BIDMC107; identical to SEQ ID NO: 72908

SEQ ID NO: 75949 - DNA, 1800 bp, Citrobacter sp. BIDMC107; identical to SEQ ID NO: 72909

SEQ ID NO: 75950 - DNA, 2139 bp, Enterobacter sp. BWH64; identical to SEQ ID NO: 74086

SEQ ID NO: 75951 - DNA, 1785 bp, Enterobacter sp. BWH64; identical to SEQ ID NO: 74087

SEQ ID NO: 75952 - DNA, 1785 bp, Enterobacter sp. BIDMC93
atgtatttatcaaaactcggaatccgcaacttcagaaattttgaggcggttgatattccccttgcaggtaatgttgtgttattaggggaaagtcgtgtcggtaaaagtaatctgcttttcgcaattcgactggttattgatcccactctgcctgattcagccaggcagcttaagctgtcagatttctgggatggctgtggccttgaatcaaaccctcaaattgaggtgcaccttgaatttaccgatttcgacagtgacccttccctcgaagctctgttgaccgattttcatatagcagaggatcctaccgtagcaaggttgagctacatttttcgtaaaaaagaagaagtagatggggctccacgttcgggtgaggactgcgaatttattgtttttggcggaggtcaggaatcgcgaaccattcctggacgcgtaaggcgacggatctccattgatatgctggacgcgttacgcgatgcagaagcacaacttgcttcctggcgaaactccccgctacgtcccttattggaagatgcattctcttcactaagccgagccgatttggatcgcgtagcaactgagcttcagacagcaacggaaaccatggagaagttcccatcaattaaggagctcgaagattctctgcgcgatggtattcttgacctggctggaactgctcacgatttagatgcccgcctccgttttgcacctgctgacccgctcagattgatgcgttctatctctatgttcattgatgatggaaagagaggcattattgaagctagcctaggttctgcgaacgtggctctgatatcactcaagctagcagagtttgcatggcgacgtgaaaaaaacgaacgtaatttctccctgctttgtattgaagaacccgaagcacaccttcacccacagcttcagcgcgctgtttttgacaaactcttccataatgccgacaaagatcagtcattgattgtaacgagccattctcccacactggcaaccattgctcctcttcgttctatcgttcgcatttgcagggatcccgaagggcgatcgcgagctttttccctggctgaactgccagtaaccagtgaagaactcgacgacattgaacggtatttaacagcaaccagatccgaactgctttttgctaacggtgtaatttttgttgagggcgatgctgaggaggttttacttccgggtttcgcacaggccatggggatcaatctcgaccagcttgggattacagtatgtaacgtagcgggagttaattttgaaccatacgtgaagctggcagccagcctcggactacccttttccgtcgtaaccgactgggacccactggatggcacgaaacaaccgatgggtaaaacacgttcaattggtatctggcaggcatttagcgaggtatcgggaaaactgaaaaaactgctccctgttaatattatttggttgaataacagttcttatgaagcatgtaagcctgtatttgaaaggataggcatttttttaaacgatcagacgtttgaagtcgccgtggccaatacgactggcctcaaagaagcgctgctggatatcctcgatgaacagggatttggcgtgttacgttcatcaaggattgcttcatggcgtgccggtatggttccagacccgacgcaacttctcgcgatgatatctgacataggtaaaggacgattggctggcaagctgaagcaaaaagcacctgggcttgcgccgccggggtatattgcttcagctattcagtatgtggtgtcgaatgtctga

SEQ ID NO: 75953 - DNA, 1782 bp, Enterobacter sp. BIDMC93
atgtctgaccggcgcgcactttcagaggctctgaatgagctattgccgaacagagagcagtacgctgcggccacatatcccggccactgcgtagttattgctgggccaggcagcgggaaaaccaaaacactgacgactgctatggcacgtgccctgattgaagatgtccctgacccccgaggcgtggcctgtattacttacaacaatgaatgcgcttctgaacttgaagggcgtctggcatgctttaacgtcactggcgatgatcggaactttattggtaccgtgcatagctttgcattaaatcaggttttaatcccatattcacgatgtatacccggtttgctgccggatgattttcgtgtggcgacaatagaggagattcgcgcagctgttgaagtggcttaccgcgctagattcggagctgtcggagatcctcatgctcggtggaaatttgcagaagagaaacgacgccgggatgtgagccgactcctaccggcttggcggaataacaatccagagctggcagattttattgatggttatgaggcagaacttaggcgtttaggactgattgactttgatgatatgccactcatcgcttttcgtattattagcgagcatgaatgggtacgtagtgctatccggtcgcgctatcctgttttgtttgttgatgaataccaggatctgggccacgctcttcatgagttggttctgctgctgtgctttaatggtggaattcgattatttgcggtaggtgatgcagatcagtccatttacggatttaatggtgcaaatccagggctactggatagtcttgtttcacgggcagatgtaagaccgttccgtcttcgcttcaactatcgatctggcgcgaaaattatcagggcatcactaggggcgctgggagaagaccgcgattatattggctgcgatggtaatcctgagggagagttaggattccatggaattaaaggcgattatgacgcacaggcgcattttatcgctgatgatctaactccctcgttgtttgaaagagggtttcagcctgaacgcatcggggttctttaccgggcagcctggcttggcgataaagttgcggatgagttcaaggccagaaatattgccataatacgtgctgacagtaatgctctcattaagcgcaattctcgtcttgcccgtttcatcgaagcctgcagtcagtgggtaactgggggatggaaagaagcctctccaccatttaacctcttactgagtcaggcgctctttcttgtttatggccgccgcgcaagccgtgctgaagaacaattactgaccgtacagctgatcattgttttacgaaacggaattgataaagcggaaagtgcccacgagtggctgagacgtttaaatgatgagatcatcaccggctggatggctatctcacagaacactcagcaggaatgggatgtcatctctgagttactgaaacgaaccgatccccttaggggactggatgtggctctggatatattcgctgggaaagtagagggaactggacgcatcacccttagcactcttcatagtgcaaaaggccgagaatttgatgtagccataatgtttggggtaaataaatatgacttcccgagtaagctagatctagcttcagataatgcccttcgcgaggcccgtcgactcttttatgtaggtgtcacccgtccccgaaaagagctgcacatggtctatgaaaagggtaaacattcaccttggattgccgaattgtatcatcgcagccagcagatatag

SEQ ID NO: 75954 - DNA, 2310 bp, Pluralibacter gergoviae
atgtcagcagcagacgccactacatcattatctgggcagatatcccttcgatttgttgagctttgccagttccgccgacttggtaaggtccagcttgagattgatcctaagactactattctagtaggtgctaataatagcggaaaaacatcaattctggcagcgttgcgccatttcctcgcagatggctcgccatttggtgctttcgacatcagtgtttctcaatggccaaaattgcgggaacttggaagagcttgggacgcattagaagaagatccatctacgtctggcgcatccgaaaatgaatgggtagagcaacttggaaccttactttcggcgatgccaacgctagatctatggttcgatgctaaggccggtatgttccactatgtctctccgttcttgtcaaaattcagttggaaggggggcggggtaggtgtccgattgcgtctggaacctgctacgaacattgaggatctaaaacagttggcttggaagtatcacctgacgagaatacctgtgaaggatatgggaaaggattcgcttgcgtggccgattgatcttcttgatttttggctgcgagaaccttctctactcggccaggttcgggcctataagttggatgcagataacaaccctttggacggaataaagacctatgttagccagatattggatgctaactctagtccaattgatcgtaaacatttgcagaaaatcataaaagtagactttgtggctgcacagcgtggccttggtagtgaggaagctgattcccggtctgcttctggccctcatcgcataggtttattctctaatcagcttctcaaatttgctcgacagcatctaaatgtggcagcaacaggtcatgggcatcgagctgacctcataaaagctgttgctgatgcccagcaggaactagataaaaagatacatgaggctattggaccatccgtagaagaggttaaagagctcgggtaccccggcttgcatgacccccaagagattcgtttccgcacgcgcatacagacagccgaattactcgaccatgggacagctgttcaatacagcatgcagaaggattcattagaggagcttctcccggaatattccattggactcggttatcagaatttacagtcacttagttaccaactagtttccttcaaagcggctcgcctaaatcctgaaaagggcgctccagtacctgttcacctggttatgattgaggagcccgaggctcatttgcacgtacaggtacaacgtattttcccaggtaaggcacataagctaatcagccctaacagtagcgctgagtcaggccttaaaagccaattgattatcagtactcattctagccatctagctcatgctgagaattttgaccggctacgatatgttcgccgcgttgccaagagtgaagaacaaaacatgcctaccaccgaggtggtcaatcttgggcaagtttttggtgatgataaaacgacccgtcaattcgctgagcgttattttcgcgttcaacacacagaccttttatttgccaatgctgcaatctttgtcgagggggttgctgagcgaatgctgttacctcttttcattgaaagagattttgcaatactcaacagccgctatctgtccttccttgatattggtggtagccatgctcatcggctaaagtctctcgttgaaagactccgtattccaactgtaattattactgatatcgatccagttgaagaaagaccaggtaagcctaagaaaaatggggaaccgactacaaccttggttgctgtagctaatacaggacaacccgggctgcaatgtgggaacccgactcttcgcggatggcaccctaagctgcaacagcttgaggatttcaagaacccgaaagatgagcatcttgtctggaacgaaattgccgaatgttctgtacgtttcgcatggcagctgcctgtagccgaagctggtaatcagtggccaagtacttttgaggattctcttatactaagaaatattccttggtttaaggcgttgatgaatgaaaaagtcgatgacggaggcaagcagctcacaccgccaaaaggcgcactgggctcagtagcaagacaggtcgctgaaaatgataatattccagaactgctcgctgcgctgcacaaattaatgcatggatcttttaataaaggagattttgccgcaagcatctttgaaatggttgctgcggatgagccgattgtctgtcctaaatatattgtggatgcattggaatggctccagacacagcttgagccaagcaaggaggtgatgccatga

SEQ ID NO: 75955 - DNA, 1950 bp, Pluralibacter gergoviae
atgactaactcatcaatccttgacggcaatgatcgcgatgcaggggtagtagaagagatttgcggctaccttacagacattccacctcgtaactactttctttttgcgggggctggttctggtaaaacacgaacattggtggaagttttacgtcgccttactggtgtgaccgagcatgagaaggggggacaattggcacggtccctgaagatgtatgggcgttctattagagtggtaacgtatacaaagaatgccgtctctgtaatcaacggacgtcttggagacaatagcttagtctgtgtgtctaccatccattcgttttgttgggaattaattaatgggttcaacgatgatattcgcgagtctcttatagcagtaaaagaagctcaactcgctaaagagactgcagaggcacaagcgaaaccgaggggtattactgcagcaaaacagcgtgaccttgacgaaatcacaaatgaaatcgaggttcttcggacaactgaagtattcaaataccatcccgatcgcaatacatatggacctggtgcactaccacacaattacgtactcgatgcgacagcttggttgcttcaaaataagccaacactccaatccattctcaaagatcgacatccaatcatactgattgatgagtcgcaggacacggtgaaaggtgtactggactccttgatggtgcttgccaaaaaaagtgagagagatttgactcttggtctgctgggagatcatcgacaacgaatttatatggatggtcatgccgatcttccaagcattgttccggaaagctgggcaacgcctgagttaaaaatgaatcatcgcagtcaacgacggatagtcacactgattaataaaatctgggaaaccgaatttgaaggcaggacacaaccaacaaaggggtcagcacaacatccccgaacggaaaaagctggtggaacggttcggctcttcttgggggatacatcacgaagtccagaagataaagtgcttagtgaacgctggtgcgctgagcgaatgtttgaaattagtggtttagctgattggaatcaagggcaatatcagttgcttgcgcttgagcataagcttgtcgccactcgtggctcgtttcttgatgtctatgaggcaatggttctgttagatcccaacgctgcagcaccatctggcagtggggacaataaggggccttcaacagtacaaattttgcttaatgagctggcgcatttagaagcctgcgtcagtgatgaaggaatcgttaatgagtttaaggccaccgaggtttttcgacgttatggcggtttagacaatatgcctgaggactcagaagcaagaattgaacgtactgatgaaatgctcgaggcgatagcgatatttgcaatggcttgcgccaaccctgagtcaacgatcgctgaggtgttagcgccagtcttgagtgcaaacttattcgaggttgatcatcgactcctagaggcttatgccgacaagtcaccagccccgcaagctcctggacgtggtgaggatgagtcaaagcaaaccagaatgcgccgtggatggtgtgcactgtttgcttctccatggaaacaacttaagtgctatcggaattaccttgctgggatttcagagctcgcaacacatcaggtagttaaaggctctgagttcaatcacgtcatggttgtaatggatgatgcgcttgctggtggaactctcattaagtacgacaaaatttttggtggtacgaagttaagtccaacagataaaaagaatgcagaggctggtaaggagacaacaattgaccggactttacgtttgctgtacgtgacttgtagcagggcgcaagaatcgctcgccttagtgctttggtcgtccgatccagctgcagcaatggctcgaattaaggagagtcaatggtttgctgaagacgaaatacaaataatcacataa

SEQ ID NO: 75956 - DNA, 2310 bp, Pluralibacter gergoviae; identical to SEQ ID NO: 75954

SEQ ID NO: 75957 - DNA, 1950 bp, Pluralibacter gergoviae
atgactaactcatcaatccttgacggcaatgatcgcgatgcaggggtagtagaagagatttgcggctaccttacagacattccacctcgtaactactttctttttgcgggggctggttctggtaaaacacgaacattggtggaagttttacgtcgccttactggtgtgaccgagcatgagaaggggggacaattggcacggtccctgaagatgtatgggcgttctattagagtggtaacgtatacaaagaatgctgtctctgtaatcaacggacgtcttggagacaatagcttagtctgtgtgtctaccatccattcgttttgttgggaattaattaatgggttcaacgatgatattcgcgagtcccttatagcagtaaaagaagctcaactcgctaaagagactgcagaggcacaagcgaaaccgaggggtattactgcagcaaaacagcgtgaccttgacgaaatcacaaatgaaatcgaggttcttcggacaactgaagtattcaaataccatcccgatcgcaatacatatggacctggtgcactaccacacaattacgtactcgatgcgacagcttggttgcttcaaaataagccaatactccaatccattctcaaagatcgacatccaatcatactgattgatgagtcgcaggacacgatgaaaggtgtactggactccttgatggtgcttgccaaaaaaagtgagagagatttgactcttggtctgctgggagatcatcgacaacgaatttatatggatggtcatgccgatcttccaagcattgttccggaaagctgggcaacgcctgagttaaaaatgaatcatcgcagtcaacgacggatagtcacactgattaataaaatctgggaaaccgaatttgaaggcaggacacaaccaacaaaggggtcagcacaacatccccgaacggaaaaagctggtggaacggttcggctcttcttgggggatacatcacgaagtccagaagataaagtgcttagtgaacgctggtgcgctgagcgaatgtttgaaattagtggtttagctgattggaatcaagggcaatatcagttgcttgcgcttgagcataagcttgtcgccactcgtggctcgtttcttgatgtctatgaggcaatggttctgttagatcccaacgctgcagcaccatctggcagtggggacaataaggggccttcaacagtacaaattttgcttaatgagctggcgcatttagaagcctgcgtcagtgatgaaggaatcgttaatgagtttaaggccaccgaggtttttcgacgttatggcggtttagacaatatgcctgaggactcagaagcaagaattgaacgtactgatgaaatgctcgaggcgatagcgatatttgcaatggcttgcgccaaccctgagtcaacgatcgctgaggtgttagcgccagtcttgagtgcaaacttattcgaggttgatcatcgactcctagaggcttatgccgacaagtcaccagccccgcaagctcctggacgtggtgaggatgagtcaaagcaaaccagaatgcgccgtggatggtgtgcactgtttgcttctccatggaaacaacttaagtgctatcggaattaccttgctgggatttcagagctcgcaacacatcaggtagttaaaggctctgagttcaatcacgtcatggttgtaatggatgatgcgcttgctggtggaactctcattaagtacgacaaaatttttggtggtacgaagttaagtccaacagataaaaagaatgcagaggctggtaaggagacaacaattgaccggactttacgtttgctgtacgtgacttgtagcagggcgcaagaatcgctcgccttagtgctttggtcgtccgatccagctgcagcaatggctcgaattaaggagagtcaatggtttgctgaagacgaaatacaaataatcacataa

SEQ ID NO: 75958 - DNA, 2310 bp, Pluralibacter gergoviae; identical to SEQ ID NO: 75954

SEQ ID NO: 75959 - DNA, 1950 bp, Pluralibacter gergoviae
atgactaactcatcaatccttgacggcaatgatcgcgatgcaggggtagtagaagagatttgcggctaccttacagacattccacctcgtaactactttctttttgcgggggctggttctggtaaaacacgaacattggtggaagttttacgtcgccttactggtgtgaccgagcatgagaaggggggacaattggcacggtccctgaagatgtatgggcgttctattagagtggtaacgtatacaaagaatgccgtctctgtaatcaacggacgtcttggagacaatagcttagtctgtgtgtctaccatccattcgttttgttgggaattaattaatgggttcaacgatgatattcgcgagtctcttatagcagtaaaagaagctcaactcgctaaagagactgcagaggcacaagcgaaaccgaggggtattactgcagcaaaacagcgtgaccttgacgaaatcacaaatgaaatcgaggttcttcggacaactgaagtattcaaataccatcccgatcgcaatacatatggacctggtgcactaccacacaattacgtactcgatgcgacagcttggttgcttcaaaataagccaacactccaatccattctcaaagatcgacatccaatcatactgattgatgagtcgcaggacacgatgaaaggtgtactggactccttgatggtgcttgccaaaaaaagtgagagagatttgactcttggtctgctgggagatcatcgacaacgaatttatatggatggtcatgccgatcttccaagcattgttccggaaagctgggcaacgcctgagttaaaaatgaatcatcgcagtcaacgacggatagtcacactgattaataaaatctgggaaaccgaatttgaaggcaggacacaaccaacaaaggggtcagcacaacatccccgaacggaaaaagctggtggaacggttcggctcttcttgggggatacatcacgaagtccagaagataaagtgcttagtgaacgctggtgcgctgagcgaatgtttgaaattagtggtttagctgattggaatcaagggcaatatcagttgcttgcgcttgagcataagcttgtcgccactcgtggctcgtttcttgatgtctatgaggcaatggttctgttagatcccaacgctgcagcaccatctggcagtggggacaataaggggccttcaacagtacaaattttgcttaatgagctggcgcatttagaagcctgcgtcagtgatgaaggaatcgttaatgagtttaaggccaccgaggtttttcgacgttatggcggtttagacaatatgcctgaggactcagaagcaagaattgaacgtactgatgaaatgctcgaggcgatagcgatatttgcaatggcttgcgccaaccctgagtcaacgatcgctgaggtgttagcgccagtcttgagtgcaaacttattcgaggttgatcatcgactcctagaggcttatgccgacaagtcaccagccccgcaagctcctggacgtggtgaggatgagtcaaagcaaaccagaatgcgccgtggatggtgtgcactgtttgcttctccatggaaacaacttaagtgctatcggaattaccttgctgggatttcagagctcgcaacacatcaggtagttaaaggctctgagttcaatcacgtcatggttgtaatggatgatgcgcttgctggtggaactctcattaagtacgacaaaatttttggtggtacgaagttaagtccaacagataaaaagaatgcagaggctggtaaggagacaacaattgaccggactttacgtttgctgtacgtgacttgtagcagggcgcaagaatcgctcgccttagtgctttggtcgtccgatccagctgcagcaatggctcgaattaaggagagtcaatggtttgctgaagacgaaatacaaataatcacataa

SEQ ID NO: 75960 - DNA, 2310 bp, Pluralibacter gergoviae; identical to SEQ ID NO: 75954

SEQ ID NO: 75961 - DNA, 1950 bp, Pluralibacter gergoviae; identical to SEQ ID NO: 75957

SEQ ID NO: 75962 - DNA, 2070 bp, Bacillus pseudalcaliphilus
atgtatatttcagaattaaagctaagtaattttagagttttttcctctgaaacaacggttcatttcaatgatggaattaatgttatcattggtcaaaataatgcaggtaaaactgcggtaattaaagctctggatttactgtttaatcctaactcaaaaaagaaactatcaattaacgatttcaatagacaaattaaagtggaagaacttaaaactgcaccgccgaaaatcgaaatttctgcgaaattgtctaaatcaaacggtgaagatgactattcagatgaattgataactgttgcaaattggctcactaaaattgaagatccatatgaagcatacataaaatttgaattcttcttaccagaaactaatgtggaagaatatcaatcattaatgaatgaaattaatagtactgatattaatcaatactggaaagaaattgaacacaacttctttagaaaatacatatctaaaatttatgttggaaatccagagcataaaaatcagatacaagcagatgaaattaataaatttgattttcagtttttaactgccataagagatgttgaaagagacttatttaagggaaacagtagtttgttgaaagaagttattgatttctttatggattatgatattaaaagtgatttaacccttgataaaaaagaaaaggcaagaaaaattcaaggattgaaacgtgaatttaatcaagaatcatcaattttgattaagacattacaagacagaatggaattagggaatgaagagattttaaaatatgtagaaaaaactggggcaggaatagatgagtcaaaacccttattcgatggggagattctggacacagaactatattcagctttaagacttattgtggaaaaagaatcgggaattaagcttccagcagtcagtaatggactaggatacaataatttaatatatatatcccttctactatcgaaaatgcagaagaatgcctcaagtgagtatttaggttcaaactctaaagtattttcaatcttagctattgaagaacctgaagcgcatttgcatccaaatatgcagtacaagtttctccaatttcttaaagaaaatagagcgtctaacgtaaatcaagtatttattacctctcactctccaaatattacagcagctgttgatctagacgatattataattcttcaaaaagacagatcatcaaatatacacattgcctatcctggtaaagtattcaatttaaaagaaactgaagatattaaatcgaagaattacgttaagagatttcttgatgttaccaaggctgatttattttttgctgaatcagttattttagtggaaggtgttgcggagcaagttttactcccagaactagcgatgttattagaggatgaaattgatctggtggacaatcatacatctataataaatataggtggaagatactttgaccactttctgaagctatttgatacatcaaatagtagttatgctttaaggaaaaaagttgcttgcattactgatttagaccctgtgagaaaaaagagagagacggaaaaggctagatgggtaaaatgtgatccattgctattaaatttacaaactgatatttacgaatataaagcgtgttcaaacggattagtatccaaagatgaatatagtgagactgcacatatagaagtatttaatcaagtcattggagaaagttcaacttttgaatatgatatattccttaaaaacccttctgattacctgattacagaatcactatctaatattgacgaacttagaaagttgatacttttactggatgaagcaaaatccttaactgaactattagatgaattgggctcaggagattttaagacagaggttcaagaattgatggaaaaaagtatattactagatgatccaatagtaagaaaaaagttagttgccagtcgatacctttcatcgatctctaaaggtgaagctgctcaagaacttgcttatgcaatatctgaaaataaaactcagataacacctccagagtatataaaggaggcgttagaatggatttgtcaaaagcagtaa

SEQ ID NO: 75963 - DNA, 1689 bp, Bacillus pseudalcaliphilus
atggatttgtcaaaagcagtaaagctagaagacagcaaagaattaatcccaatagaagagcattttaagctatatgcgggcccaggggctgggaagacaacattcctaacaaatcacattaaaaatgtgctaggcgcatctgataagttaaaacataaaaggaaaattgcttgtataacgtacacgaacgcggccgttgataacttgagaacgagattagatacatctttagagagtgtggagataacaacgatccatagtttttgttataaacacatcgtaaaaccatttctttggttattggatcattgcccggtagcaattgagaaaatggagggacacgatgaaattaaactaagacgaagtcagattgataaaattaaaaaggaagctaagcaatcatacttatctaattcaagtctgatggatgctttaaacaaacttcaatggttatttaaaagtaacgggaaattcgaacttggatacaaaagaccatttgatggtatggttgacggctcttacgtagcgaaaataatgtatatgaagtttaaagaagctcattggagtgaggggcgtttaagtcacgatgatgtcttatactttgcttatagaatcatattggaacatcctcaagttagagagataataaggggaaagttcccttacatatttattgacgagttccaagatactagtccattacaagtgaaaatagtaaaaataatctcggataaagaaactgtgatcggtgtgataggagatatatgccaatctatatattcttttcaaggggcaagtgtaggagatttcgaggaatttgaagtcaagaatatgaaactttatattcttcaagaaaatcataggtcttccaaagaaattgttaacattcttaatcatatgagaaaagataaggattttcagcaagaaactaaaatcaaattgaacaattctagacctactattttaataggtgataaatcttcttcatatgagcacatcaaaaagaagtcgctgattgatttaatgatactagcatatcgtaataagactttagataatcttcagaaaccagattcgattaatcaggataaagaagtaaattatttaacagatgattcagattcaaatagggcttggagaatttatcacgttataaaagcgttagagtatgctaaaacacaaaaaataaaagaagcattaaaagcaatgaaaatggcgtatcgaaaagaagacctaagcgaaacggaagtttttcgtaatctcaagcgattaataaatattcgagataaaatttataatctaacccttacagatttttataatgaccatctttttggccactataatgtaaaagcaaaaatttctagaggtgtaattaaacaaatctatgatagtgctctatactcagatgctgctgttaacataaacgttgttgatgagcataataatttccgatcaattcataacgctaaaggtgaggagtttgaaaatgtatttctaataattccttcagtagagaaaaatgaattatcttttcttctagaacctgatatggacaaagaaactcatagggtttactatgtagcattaagtagagcaataaaaggcctctttattagtgttccaagtctaactttagatcaaaaaagtcaattagaagacttagagttttctataattgagacttaa

SEQ ID NO: 75964 - DNA, 2199 bp, Pseudomonas stutzeri
gtgagcttggctggcgagtgtgatgccaacaacagaaactttagggcctggactctgatgcatatcgcaaaactgacgctcgtcaattaccggaacttcgcaagtgcagatctgatgttcacgaaaggtgtgaacacaatcatcggagaaaacgggtcgggaaagacaaatttgtttcgagcaattcgccttttgctcgacgactcgatgtcacgatcagcatctcgcttggaggaggctgactttcaccgtggtctcgacaattggcgtggtcattggatcatcattagccttgaattcgacgaggtcggtcccgatgaggcgattcaggcactcttcttacatggagcaggtgtgatagctggtgcagcgccaatcggcagggccacctataatctgatctttcgaccgaaaaaggacgtccgactcaagttggccaaacttgcaaatggggacatagctgggttggctagagtcagggagtccattgaaattactgactatgaaacggtcatcaccggcagaagcacggccgactttgggagtcccgcgacttactccgagattgtgggcgactttgagaactgcataattagctacgagactgacgatccacgtataggcgctcgcgtgtctccgcttctttcggtcgcaagcgaggtctcgtttacttacattaaagcgttacgggacgtcgtggcagagttccataacaatcgaactaatcctctgctcacgctgctaaaaagcaagagcggctcgatctccgcgcctgacatggatccgatcgtcgccagagtccgcgagctcaacgaatcaatcgtggcactaaacgatgtgcaggtcgtccgatctgatattcgaagcacaattaaggcggctgcgggcgagacctattcgccaagctcgttgtcaatccgctcggatctaccagaagaggctgacaagcttttccagtcgttgaagcttttcgtgggtgagtcggacgaaaattatgagggtgccattcatgagcttagtcttggaggggccaacctgatcttcctgacgttgaaactgcttgaatttcagtatcaacgagcacgtcagtcgattgccaattttctgctcatcgaggagccagaggcacacatccacacccatatccagaaaaccttgttcgatcgcatctcttacgccgacacgcagatcatctactccacgcactcgacccagatttccgaagtcagcaaggtctccagcgtcaatgtgctgggacgacggggtgcagcgtgcgaagcatatcaacccacaacgggtctcgatccaacggcaattgatacggtgcagcggtacctagatgcagttcgaagcaacctattgttcgccaagagtgtgatcctagttgagggcgacgcggaagaaattctgataccgctgatgtttaagcaggtgacggggctcagtcttgacgagataggcgtcagcctcatcaacatccgtagtaccggtttccagaatgtggcaacgctctttcaccaatctcgaatccgcaagcgctgtgccattatcactgatcgtgacgcagccattatcgatacagcccacatgccgggcgattctgaggcggaagttcgctacaaaaggaagtgtcatggatcggacgtgaagggacttgcacgcaagcttgctctcgatctctttgtccggggcaacccttggctgtcctcccattatgcagatcatacgttcgaggttgatttcatcgcagctggaaatgcagcgaaagttagagcgctggtgccgatcatctatgttgatccacaaacgctcgtggcggccgacgttgagctggcatctggggacaaggcccagttcggacggcgcgttctgacgatggcggctaaccaggggaaaggttggtttgctatccagctgggcagatacttggattctaacactgttatcccgctatatattcgagacgcaattttcttcgcccagccgaccctgtcaacggagctgttctcgaacatctatcgctacagagttagcaaggccatacaaagtggtgtcctagccgcgccagacgccgaagcattgcatgagttgatcgagcagtaccgttccggcgctctacctctcgctgacctcaaagctacactgctggcaatgctgccgaacgatcagatccatcggctgctggcgaatgtcgcttga

SEQ ID NO: 75965 - DNA, 1797 bp, Pseudomonas stutzeri
atgttcgcttggtcccgacatgagctcaaccctgaacaagaggctgcggtacttttcgcgggcagtcagctcctaatcgcctgtccgggcagcggtaagacacgaacgttgacgtataagatcgcttatgaactctcacggctgacgtccgcccgccagtttgtcatcgcaatcacctacaccaaccgtgctgccgatgagatacgcgagcgaatcgagaatttgggagtcaacaccgagcgattgtggatcggcactatccatgctttttgccttgaatggattttgaagccctacggtctttaccatcccgatctggctcacgggtttcgaatcatcgatttgcacgagcgcgaaaagctgctggagcagctgtgcgatccataccgagctcaatacgtcactttttgggattgtgattactactttacccctcgcgagcgtgtgctgggatgtagtgatacgcgcaaacatgcgttcatcggaaatgtactggacgagctctttgcgacgctaaaagataagcgtcagattgactttgagctgatcctcttctatgcgcaaaggctcgtggctgcgcatcctgcgatcagtagaaatctttccaatcttttctcatttgtcttggttgacgagtatcaagacaccaaagagattcaatatgcgattctaggaaagataatgtcagctggcggtggtaccaccaagttgttgatggtgggagaccccaaccagtcgatttttggttcgctgggtggtttccctatcgatctcaacggcctgcgagccataacgggtttagagatcgagtcgagaacgttgtcacgaaactatcgctcttcccagagactcatcgactacttcgagaacttcaatctgtatgggatgcagatccaggcttcgggtccagaccgagactttgccagcctgatcacctacgacgcaaccatccataaggacgatctcgccgacgaaatcgcgcacttgattcagcacaacatcgaggtgctgggtgtgccgcccaatgagatctgcgtcatcgcccctcagtggccttatctgacagccatgacgcgcgcgcttgtcgtgcggttgccggagtataggtttgacggtccgggcattgtcccattcgcccgagacacggagaacttttggtataaagtggcgcggctcgcattgaccgagccctcccctggcggctacctgcgtcgcttgcgatgggcaggcgacgtgatcgaggatctgagcagcgcaggcgtcgacgtttccgctttcaaccgaaagcagtttctcgctgaatgcaacgcggtcgtgatcgatgagacgaacggccttcgttatctgcgcaggttcttcgataccctgttccatcgtcttcaagtgccctacattgattttgcgagtctgttagaacaccacgaggcgttcttcgcgagctccgaggcgcgattacaaagactgcaaactgatggagtcgccgctgcgagcgatgtctcctttttcaaaaaggcgttccaggcgcgatccgggattttggtatccaccattcacggcgtcaaaggagctgagttcgatgtcgtcatcgctcacactctgctccaggggatggtgccgcatttcaatgacgccggcggagacgacagtgcaaagaagctcctttacgtcatcggatcccgcgcacgaaggcatctacacatgttttctgagacaggtcgcgcaagaggtcggcgaggcgacacttgggaggcgactaggctattgaaggcctgtgtatttccctatgactcccaatag

SEQ ID NO: 75966 - DNA, 2019 bp, Pectobacterium carotovorum subsp. brasiliensis ICMP 19477
atgatctttaatcattgcattctagaggactataatttgtatttatcacaaattgaaatatcaaattttaggcttttcaaaaatttaagtttaaagttaaaccgaggcttgaatgtattagtcggtgagaatgactcaggtaaaactgcattgattgatgcaattcgatatacgctaggcaccaaatccaatgaccgagcttatcttacagagcaggatttccataacgatgctaacgatttaaaaataagactaaagttttctgaagtaactcctcatgcacatcgttttgtcgaacatatttctcacgaagaatatgaagatgagaatggtgaaagaaaactccgctctgtcttttatgttcagttgcatgctcagattacgggtttagaaaaaagaggttatccctacataaaaactgaattacgttcaggtatagacgggaatggtttagccattgagtctgagataagagattttctagcctcaacgtaccttaaaccgctaagagatgctgaagttgagctttctagtggcagagcctctcgtttatctcaaatactgagctcctcaaaagacattatagagggaatggagagcattcttactatcatcgctagagcaaacgatgagcttcttactgatgatgccgccctgaaaaaatcggcggaaaacattcagcaaaaatatcttcatgaacttatttttgagaaagataaatcaaaacttggtgcatttattgatatcgcaggcattaaagaagaagatttatctaacctaccaaaacacgtccagaagcgccatttacgcactttattagagggattaacgctctccctgaccaatgaccaacgaacacatggacttggttatctcaatcttctttttatgggggcggagttactacttttggaacaagaagcaaacaacgaatatcctttacttctcgtagaagagcccgaagcacaccttcaccctcaactgcagatgaaactccttcagtttataaatagaacaactaaaactgagaaaaaacctgatggagtgcagtgtattctgacaactcacagtcctaatatagcctctaaagcagaccctgctgaaatcatcatgctatctgaagggggagcctggccgcttgctgttggtgaaacagaacttgctaaagatgattaccaatttttgagaaaatttttagattcaaccaaagcgaatgttttttttgctaaagcagtcatacttgtggaaggtgatagcgaaaatatcctgttacctgaattggcaaagttgttggggcgccctttagaaaattatggcgtatccatcgtcaaatatgacaatagcggctcatggaagcgttttgccaagttattcttaagatccggccaagatgaaagcccaaatgcatggcatccaacaaaaatatgcgtacttagggatcttgatctttggccagattgtgctgaagaaaaagatgacggcagtaacccatacggatttaaaaaagagcacagcagaaaccaagtctattggagaagaaattaccccgacgcccagcagagaaaaactgaacatatcgatcaattaaataggcaaaatgttgtagtcaaaatatcggatgactggactttcgagtactgtctcgctaaatacggtctttttagtgagtgctatgaagctactattggctccaatgtaggaatcgataacatcgttggcgatgatgacaccaaagcgacattcattcttagcaaagtctcaaaaacagactttgcctataaactgtctagcattcttcaaaagcaacaagaccaaaaagttgatgacacgatagcttctcttagtgatgaggatgccagtaataacgatatttctaagtcggcacaaacacgggcaaaaactgaattcgcagtcgaactcaaacagagacttccgaactatcttatcgaggctattcaatatgtaacagagccaattgaagaagatactgaagaggtgcagcatgccacagtcgtttga

SEQ ID NO: 75967 - DNA, 2058 bp, Pectobacterium carotovorum subsp. brasiliensis ICMP 19477
atgccacagtcgtttgaaggtttcattacgcatgacgacattaccgagatagccgaaactgaaaatcttattcttcaggatgatattcgtatttcaattctgaaagcaatgaactctattgatgtacaagcttgcccaggaagtggaaaaacaacattgattgccactaagctcattcttcttgctaaaaagtggaactctccacaccgagggatatgcgtcctgtctcataccaatgtggctaaagatgagatcattagccgccttcagcgctcaacatcaaaagttgcacagcgtttactaaaatatcctcattttattggaaccattcaggagtttgtacaccgctttttagccttaccctatatcagatctcgtggtatccaagatatcacggtagacaatgatatatacactaagcaagctattaaactgcttgaattaactcaactttcttggtttaaaggaacattaaatggattaggtaatactgtagaacaagaggctttcctcagaagtacatttagatgtatttctcagaatgttgaagaaatcaatcttgataaaatatccagaagatggagccccgacaacaatcttcagagggctaaacgcgacctaggtcgattaaaaaattatctggatgaacgaggcgtgtttctttatcgtgatatgtatacacatgccgataaagcatgtacaaataatcctgaattagctgaggtcattcgagcaaggtttccgtttgttttaatagatgaaatgcaggacacgcagaaattccaagatgaacttttaagtaaagtcttcccgcataattcatcgctcattgttcagcgttttggcgatccagatcaatctatttttaataacattggaacagaagagcctaatcaaagctttaacggtaagttgcgagaccagatggattatataattcataaatctcatcgctttgatagagctctatctaaaaaaatctgtaaattaagtttcaatgaaatcccgttggaaacagagttagcagaagcaagtttgttagatagagcacaagcccatactactcgtgatagatttaccgatactgttatcatttttaatgacgattcttgcgaaacagtcattaagcattttgctcatattgtttcaaatcagtttgctgtagaatacaaacaaaataaaaaatttacggtaaaagttgttggtgcagtcggagctaaaatagcatctaatgatgcacagtttagaataggtcattattggcctgattttgataaaaccaaatcaaaaaataatttcaaagaaacttattttatagaagctgttcgccagtgccaagagaattcaactatagatttggcagataattataaactcttactaacatgtattcttaagcttatgcgaatgagcaataagatggatgacaatgagagagatttttccagtacaacattgcgagtatatttaataaaaatagggaactggactcgctttcgtaaagggttattttatttactcaccgagactaaagcgacaaaaccacaacattgggaaatcgcctgccgtacgttaatatccttgcttcagttagaaaacatccccgaagaggcaacagattatatggcatttcatgaagatataaatccagataaagccaaacaggcagaacacgcaagctcactgattcttttgaaagataacactctaatccatgaggatggctttcatattgagctatcaacaatacatgcagttaaaggcgagacacatgatgcaacgctagtcattgagacaaaaaaccacacattcgatctacaaactatgttgccatatttgactggagagctacccagcgtagagcatcctaatgccaacctaccgaataaaccaaattcacgtagagcattcaaacccaataaagtttttatgcggcagttttatgtcgcaatgagtcgtccgaaacatttactatgcctagcccttcactctgatcgaatatctagtgaacaaattcagttgcttcagcagcgtggttggcaagttgatataatctaa

SEQ ID NO: 75968 - DNA, 1980 bp, Pectobacterium atrosepticum ICMP 1526; identical to SEQ ID NO: 74908

SEQ ID NO: 75969 - DNA, 1848 bp, Pectobacterium atrosepticum ICMP 1526; identical to SEQ ID NO: 74909

SEQ ID NO: 75970 - DNA, 2001 bp, Bacillus firmus
atgttaatttcagaacttcatataagtaattttagatcatttggtgcagatattcagtcgattaaaattgttaatttaacagctttaataggctcaaatagctcaggtaaaactagtatgattattgctttgttaagactatttggtcagagaaataatgatagaactttgattaaaacggattttcatgtttctgaatatgaagatatatctaatatcgaagaaataaatctcagcatagaagcaaaaatttcatttccagaattaaaatttcaaaatccggaggaaattaagactatacctgaatttataaaacagttggttgtggatgaagctggaacagagccgtatttaagaatgcgtttagtgggtaaatgggtgcaaggtactacaccagaaggtgatattgatcaagaattatattatgtaaaagtaccatatggacatgaggagcaagatgccttaattaaggtgccagttcatcataataagctaatccaaatgatttatgtacctgcaatgagagatccagctagtcagttgaaaaatgcttctgggacattactttggcgtatttttggtggaattgattggcctaaaaatataaaccaagatatagaatcattaactaatccaattgaagagttatttagtggtgtcgacggaataaaagatgtacaaaaaatcttaaactcccaatggaataaatatcataaagatagaaggtattcaaaaagtcaattaaagttcaatagcagcagtttgaacgattttttaaagaacgttgagattttgtttagtccagctgttgatggtaattctattaaagttgatggattgggagatggtttaaagtcattattttatataacactagtttcatctctgcttgaaattgaaaataaacaagaaaaagaagataaaccattgttgaatatattagccatagaagagccggagaatcatatatcacagcatatattgggtagagtagttaggaatttaaaggaaatagctgatagagaaaacgcacaagttgtattatcttcccataattcgtctatcattgggaaaattgatcccgaatatattagacacttgcagatatgggattcaaagtctctagttcataatattacacttcccgcaaaacatgacgaagcatttacttatattaaagaggcagttaaatcttatcctgatttatacttttcaaaattagtagttttaggagaaggtgatagtgaggaaattgtattgcctaagttgttaagcgcttctaatgtttatcttgatgatttcaatatatcaatagtaccgctaggtggtagacatgttaaccatatgtggaagctcctaaatgatttatcgattcctcatgtcactttgttggatttagacagagagcggaatggaggaggctggggaagaatcaaatatgtattaaagcagcttaatgaaaataatagatgttctaaggaccttagaacagtttatagaggtaaagaaaaagaagagtatatttatagtatagaagaaatagaagaatttcataatagagatgtagataaattaaaatcaatgggtacttggataaataaattagaaggagcagatgtatatttttcatatccattagatattgatttctcaatgttgaaaagttttcaagaggaataccaaaatactatgattaatggacctagaattcctgcagatgaacaatcctcagagtacgatgataaattgcaaggctcaattcaagctactctcaaaaataaagacgctgttgcaaaaacatattctgttgaggagagaaagttaatgatatggtacaattctttgtttttaggtagagggaaaccaagcacgcatattgctgccttgaaggacgtagaagatactgcacttttggccgatgcccccaaagaactgttaagacttttaggaaaaataaaagaaaaattggatttaacaggaggagttaacggtgaacaataa

SEQ ID NO: 75971 - DNA, 1881 bp, Bacillus firmus
atgaaattagaggatgccgcattagcttcaataatagaaccttataatgtttcaattgttgctggaccgggagctggaaagactgagttgttagctcataaggtcggatacctaattgaaacaggagtatgcacatatccaaaaaaaattttagctataagctttaaggtggatgctgccagaaaccttcaagaacgagttgaaaagagatacgggaaagacgtttctagcagatttgagtccaaaacattcgactcttttgcaaaaggattattggatcaatttctccatgccttatctgaagaatataaaccagcgaaacaatatgagattattagtaatgaaagactaataaatgacattatcaaagggtatattactgatacaaatgtttattatccaacatggcagcaggagtataacttttcaagagtcaataaacttttgaaagaaacaagacttcctttatcaactcatgataatgacttgtattattggatcaatgagagactatggaatatattattaaaaggaaaaaataatttaaatagctcattgacctttcctatgatatcaattttagttgaatatttattaagggataatccgctaattgttaaatcactacatgctacatatagtcatgtctttttagatgaatttcaggatacaacatatattcagtatgatcttttaaaaacagcttttttagattcacaatctattattacaacagtaggtgataataaacaacgaattatgggctgggctggggcattaaataatgcttttgaaatttttaataaagattttaatgcaacccaattttctttgttaaataactatagatccgctcctagattaatctatattcaaaatttgttttctaaaacactaaataagacttcggtagatgcaattccagctggaaagtggagcgcagaagatggaatctgcgaaatatggacatttaaaaatcataagaatgaagccgatattttagcgaggaaaataaaagagtggatggattctgaagatttaaagccaagggatttttgtattattgttaagcaacaggaacatgtgtatgcagctgaaattattaaagccctttccaagttaaatatcgagagtagaattgagaaagaatttcaggatttgttatcagatgaattaattttactatccttaaattttttaaagttgtgtggagaggaaaaattaccagacttatggttggaatttacggagacaattattgaaataaaatatacaagctccgatttagaagatataaacatattgaacgtagaaaaggaaatatcaaaagctttaaaaacaatcaaagatatttttttaaatattaacgaagccaattttgagactgaatttcaagaaataatgaatacggttgtagaatttttaggtgaagagaacattaaaacaatctatcctaaatataaccagaaaaattatatagaagatagaattcaaagaatgataaagaatctaaactatcatgaaggtgcttcgttaaagggcctaattcaagagttttgtggagaatatagcatccctataatgacaattcataaaagtaaagggttggaatataaaacagtaatatttgttggtttagaagatgcagcattttggagttttaaaactcaaaaggaagcagataagaatgctttttttgtagctttatcccgtgcgaagcaaagagttatctttacaataagcaaggagagggaaattttaaaatatggaaagcctataaatacaatacaagatcttaaggaaatatcggagttactaaaaatactagttgatgcaaatgttccggtggtcaaagagaatgtacatacaattagtgtatga

SEQ ID NO: 75972 - DNA, 1872 bp, Pectobacterium carotovorum subsp. carotovorum ICMP 5702; identical to SEQ ID NO: 74904

SEQ ID NO: 75973 - DNA, 1869 bp, Pectobacterium carotovorum subsp. carotovorum ICMP 5702; identical to SEQ ID NO: 74905

SEQ ID NO: 75974 - DNA, 2094 bp, Pectobacterium carotovorum subsp. carotovorum ICMP 5702
atgaaagtaagtggtgtagcaattcggaatttccgccgactggaaaatgttcagattgaccttgaagatagggaatccatttttgttggacccaataacagcggtaagacttctgccaccgcaatttttcgctgctttcttggcggacgcgattttaagattcacgatttctccgttgcccgaatgcctgatttcgacacatttgcaacgaccggagatgctgcccagcttcccaaaattagtcttgatatttggttcaccattgatcccgagagcatcggtttcggtagagttttcacactgttgccaaaactttcggatttcactcgagtaggaattcggctgtcgtatgaagtctcggaaccaaagaagttacgtgacaattacgacgccgcttatccaccaatggaaggtgggatccgctctaagtcgctgtcgcaatatttagcgcttggtggaaatcttggacgacattttgcagtttgctactcctctctcgatgagaaaattcaggagggagcaccgccagagatcctaactaatcaccttgatcctgatgaaggtaaacgccttctgaagaatcttatacgggtagagtttgtggacgcgcagcgcaatattaacgatgacgatagcagccgtagtaaccggctctcatcggctttctccaccttctaccaaaagaatcttgagcaagtcggtcatgcagcagatgctcacaaagtaatcgatgataataacaaacagctgacagatcactatgcaaagcagtttgccccgctgatcgacctcatcaaacaccttggtgtaccatcgatcaatgatcgagaattacagattatctcgtcacttagccctgaaactgcactgcgtggaaataccgagctgctttatattgaccctagccgaaagcatgaacttcccgagttatataacggtcttggttttaaaaatttaatatttatggctattcaggcccggcactttcattctcagtgggtaatgaccactgaaaacaggcctttgtgcctgatgatatttattgaagaaccagaggttcaccttcacgctcaggtacaacaaactttcatctctaatatatggcaggtaatcaaccagtccgctgaggcggctggcgaacctaatctagtgccacaacttgtcgtaaccacacactcttctcatatcatggaagctgtggactttgagaaagttcgctatttccagcgctgttacagcgagggtgaaataggagcgactcgtattcgcaatgcctcaatggttcgaagtctacggactttccagccggaagtggagatggtagatggtaaccttgtttccccgtcagaatcgctagccttcctgaaacgctatttacgccttacacactgcgacctattttttgctgatgccgccatacttgtcgaaggtgcagttgagaaactgctaatgccatccatgatcgaacgtgctgcagggcgattgaggactgtatatctaacaatcctagaagtcggaggggcctatgcccaccgcttcgaaggtctgctcagcttccttcatatcccctaccttgttatcactgatattgattctgtggcacctaccggccatccgagcgcctgtcgagcagatgtagtcggagcaaggacctctaacgcatctctaaaaaaactttgcgggcagactacaatcgccgatttgatggcattgacttctgccgagaaacaacacactgataaggatcgctgcattgcctttcagacggatattttggtcacagatggtgtgacgaacgcgacacttcgtccgcgaactttagaagaggcaatcgtctatgagaatcttgggctacttcgatccggtacgttatctatcggcaccaacgtccacgtccctcttagcgatgtttaccaggtcgtctacgagagagttcggtcagatagtttcaaaaagaccgatttcgccatggatatattggcttgcactcaggaatggactgtccctaggtatattgccgaaggattgagttggcttgagtcacgcttattaccccagctatcagcggctgtggatacagaagtcgttgtctaa

SEQ ID NO: 75975 - DNA, 1839 bp, Pectobacterium carotovorum subsp. carotovorum ICMP 5702
atggtgacatgggtagaaagcgacgcggatattcaagtccgagaatgcatagatgaccatcgtagctttgcgatgatagctggtgcgggggcgggcaagactagctccctcgttgatgctcttagtcgggttaggcacaaagaggggcatttccttagaaaaaatggtcaacgcattgcctgtattacctttaccaagcgtgcagttgagatcatcaaggggaggctggggttcgatgagctataccggatttcaactctgcatggatttttgtgggaacagataagtcgttttcacgaaaatattaggcaagcgctctgcgagagtaggattccaaagcttatagaaaaggctagggaagatgataacggtggtaacagcaagaaggcactaaatgcccgtgcaaaaattgaacggttgactgaggagcttgaacttctctcctcaatcaaacattttgactatgccgacacgagcttcagcgattacgcaaaaggacagatcggccacgacgacgtcattgagattgcaagctacttacttgcaaataatgaaaccctcagacggatcatcggcctacgtttcccttacatctttatcgatgaagcacaggatacatttgagggtatcgtttcagggctcaatctcgttagttcgggtgctgaacttcctttgatcggttattttggtgacccttggcaacaaatttacgaccggagtgcaggtaattttgcaccgcctgacaaaggtgaagtcatcaagaaaagggaaaatttccgatgttcccagagcgtcatccgacttctcaatgcttatcggggagatgttgaacagtatgccgctggcgaaaatgctgcacgtgaaggtagtgtcgaatttttgcttattggggcagaagagccatcggagccacgcaggcgctactcagaagaccagattgagcgggcgctagctcgtatggatgctgcagtcgaagagtggggctggacagatcgcgatgatgtcatgaaactctttctggcacgtcaaatgatcgcacgtcggcttggctttgctgacctcaaccgtcttttcactggcgattttgcgtcgtcccgcgcaaaggatgcttttgaggaaggtacccattttcttctcaaaccatttctttcgacgatttgccctcttatctatgctcaacgtcagggtgatgaacgaaacattatcaatttgcttcgtcgcgatagtccagctttcgcgatcgatggattaaatgcggaaaaatcactgaaattgatgattgagacttcgagggctttgcttgggcaattgcagactttgtgggatacggagacgatcggagcgatccttcgtttttgtatcgagaatcagatcatccagccttctgaaaggctgagtgagcatcttgatcgtgcccctcgggctgagctgttcgataaggatcttcatagtcttgataaaggagactggctcgcagactcgctgttcaaaatgacgcctgagatggtatcccgttatgctgattttcttaacaacaataccgcttatagtactcagcatggcgttaagggggaggagtatccaaaagtattggtcgtctatgacgatgtcgaagccgcatggaaccaatacagctttagtaagactctaaccccgctcactgctggcgagccttctgagcggcaacgttctgtaactcagaaacttgcatatgtctcgttctcccgtgcggaggaggatctgcgtatcgtactcttcaccagtgacccagatggagcacgagatgaactcattgaaagcaagctattagcatctgatcaaatccgaatcatggcctga

SEQ ID NO: 75976 - DNA, 1767 bp, Bacillus paralicheniformis; identical to SEQ ID NO: 74898

SEQ ID NO: 75977 - DNA, 1377 bp, Bacillus paralicheniformis; identical to SEQ ID NO: 74899

SEQ ID NO: 75978 - DNA, 1989 bp, Bifidobacterium kashiwanohense JCM 15439 = DSM 21854; identical to SEQ ID NO: 74882

SEQ ID NO: 75979 - DNA, 1743 bp, Bifidobacterium kashiwanohense JCM 15439 = DSM 21854; identical to SEQ ID NO: 74883

SEQ ID NO: 75980 - DNA, 2019 bp, Xanthomonas sp. NCPPB1128
atgtacctcaagcaaatcgaagccaagaacttcagactgctgcacgacgtcagattgcttttggagcaccgaactaccgtcatagtcggacgcaataacagcggcaagacatccttgactgaagtgatgaagcgccttctgtccgatgcttctccctctttttccctggaggacttctcgttctgttgctacgaccagttctgggattctcatctccgaagagccaagggcgaggacgagatagagataaggaagatcttgccttcgatagaagtcaggcttcgtttttcgtataaaaatggcgagcacctcggcttgctcagcgagttggtcgtcgaccttgatcccgaatgcacggaagccttaggcgtcgtccggtacgcgctcaaggacgggaagctgcccgaactgttaggtgactttacggagacggacgagaacgcgagaccgggctttttccgcctcctccgcgaccgagttccgtcgctgtacgaaacgacctttgtcgccatcgacccgaacgatgaaacaaacgaaaaggtcatcgaaaggtcgacactgaagaaactgtgcattggcggcttcatcagcgcacagcgcgggctggatgacgcgagccagaaagagcgcgtggtcatcggcaaggtgctggagaaccttttttcgacggccaagagcaacaccgatgacacggacagccacgccatcgcccaggaactcgaggttgcggtcaaggcgatccaagacaagattggtgacgacttcaacgagaagctcgaccaattgcttcccgcattgtcgctatttggctatccgggcctcaacgaccccaagcttctgaccgaaacgactctcgacgttgccaagctcctgaccaaccacacgaaagtcaggtataccggatccaatggcatccatcttcccgaggcctacaacggcttgggaacgcgcaatatcatcctgatccttttgcagctcagggagttcttcaagctctatcttgcgatggagcccaggccctcggtgcacctcgttttcatcgaggagcccgaggtccacctgcatccgcagatgcaggaagtcttcatccggaagatcgcggacatcgcattggcgttcaacaaggaaaccggagaatcgtggcccgtacagttcgtcgtttcgacgcactcgtcccatgtcgccaatgaagctcacttcgagacgatccggtacttcctcgcttccgcggacaagaacggcatcatcagcaccaaggtcaaggatctcaggaagggacttgccggaaagcctgagccagaccgcacattcctgcatcaatacatgaccctcacccggtgcgacctgttcttcgcagacaaagcgatcctgatcgagggcacaaccgaaagactgttgctcccaaagatcatccggatacttgacaaggatttcgcagagggaaagaagcttggcagccagtatctcgccgtcgtcgaggtcggcggcgcctacgcgcatatcttcttcgatctcgtcaatttccttgagctccggaccttggtcattaccgacatcgacagcgtgaaggccaacggcgccggcaagctcgtcgcctgccaggtgtcgcaggggcagaagaccagcaatgcctgcctgaagtcctggtacgataacaacggcatcaccccggcagaactgctggctgtcgatgatgcggccaggaccaaaggccggatgcggctcgcgcaccagtgtcccgagaccgaggcaggaccttgcggccgcagcttcgaagacgcgttcatgctggcaaaccctgagctcttcccgttgccgggacctagcgagcaggagaaagaagcccaagcctgggaagaagcgaaggagttgaagaaatccgcattcgcattggagcatgccctgtccaaaggcgaatggaacatcccgcactacatccggagcgggttggcatggctcgctgaaggcgacctgccgcctacgcccgcgccaccgggcgatgccggagcagtcgcatga

SEQ ID NO: 75981 - DNA, 1755 bp, Xanthomonas sp. NCPPB1128
atgaatgccgtacccgaagcgagccccgcgctgatcgccgcgcgagaagcggaagcacttgtcgtacagtgcttgcgggaccatcgcaacttcctgctcgaagccggcgccggcgccggcaagacctattcgttggtggaagcgctcaagcacctcatcgaacacgagggcctcaagctgcgcaggaaccaccaacgcatcgcctgcatcacctacaccaatgcggccacggccgtcatcaacagccgtatcgacagcaatccgctggtcttcgtcgacaccatccatgcgttctgctggtcgctgatcaggaaattccagccagcgctgaggtcactggtctcggcaatgtcggaatgggacgagaagctggccgaggcaaacggaatcggcagccggatcgtcgaatacgaactcggccaccgccgcgccaccaccgacaccgtcaccctgcaccatgacgacgtcctggggctaatggtttcgctgctcccgaacgtgaagtttcaggcgcttcttgcgcagcagtacccgttcgtactgatagacgagtaccaggatacggacgttgcggtgatgaccagcatgagcgggcacctgctcggacgcgcgaccggcccgatgatcggcttgttcggcgaccactggcaacgcatctacgacaagacgtgcggccacgtcaccaatgaagcactgacggaaatcggcaagaaggcgaacttccgctcagcgacaaagatagtcgatgtcctaaacaggatgaggccagagctgccacaagcggtgaaggacgagagtttcgttggctcggcgatcgcgttccacaccaatgcctggcaaggcgaacgccgatccggcgcgggaggcggacactggaaaggcgatctccccgccgaggccgcccatgcctatttgacgacgctcatcaagaagctggaatcggacggctgggacgtggctccccagcgaaccaaggttctcatgctcacccacaatgttctcgcttcggagcagggctacgattcgatcaccaagatcttttcctatacggaccagttcatcaagaaggaagatccgctcatggcgttcttttgcgacgcgcttgagcccgcatgcacggctttccatcacaagcggttcggggagatgttctcgttgctaggcggcttgacgcctgccgtctcttcgcatgcggacaaggtcgcatggtcatcctcgatggagggcctcactaagattaggctcgacggaactataggccaagtgctggactacatgttcgagcatgcgcatccgcgaccgccggacgctgtgctcggcgcggttagcgaggccgcggaatggcatggcgaggaaggggaggagccaccgcgccgggtccagcagatccggcagttgcgggatgttccctacaaggaagtcatcgccctggacaggttcatcgacggtcacaccccgttcgctacaaagcacagcgtgaagggtgacgagttcgagaacgttctggtcgttctcgggcgcggctggaataagtacaacttcgaccagttcctgcaatggtcggccgaaggagtcccggccggaaagcaggatgcgtacgagaggaaccgcaatctgttctatgtgtgctgttcccgcccgacaacgcgcttagcgcttctcttcacccaagagctttccaacgtctcattggcaagactcgacaactggttcgacggggcaatcgagccagctcccgcaccacaggaggactga

SEQ ID NO: 75982 - DNA, 1980 bp, Methylobacterium platani
atgtttattgaaagtcttagtctaacgaatttccgctgcttcggacctgaaacgataagtgtcagcctaacctccggtctcaccacctttgtaggcgtcaatggcgcggggaagacgaccctgatgcaggccctacagcgcctcttcggcgtgactggcgatcagcggcgtcttcggcgccaggacttccatgttcctgctgccgagcttgtcgcgccgcttcggcgaaacttcgtgctggaggcgatcatcgtctttccggaactggacgccgacggcaccggcggcgccgcgataccagaattcttccaccagatggccgctgaagagggcggtaagctgaaatgcagattgcgactcgaagcgacgtggaccgatgacggttcgctcgacggcgctattgaacagaaatactgggcggtcaggactttcggaccattcactgtggccgagtgcaccgagttgaaagcgaccgaccgggcgcggatccaaatgatctatgtaccggcaacgcgggatggcgcctcccaggttacggcgtttctgcgcggtagattgtggcgcgccatcaactggtcacagggtgtgcgggacacgtttacgaacgctggggctaccttgaacggcgccttcgccggggagccggccgtcgacgtgattgccgcagcggtgacacggcggtggcaggaagtttacaccgccgggactgacacgacgccagtcttccgcccgctcgatctgcggttcgagcatttcatccgaaaggttgaggtcgtcttccgtctcgacgaagctggccgtgagcgagccttggatgacctgagcgacggccagagatcactcttccacttagcgatgaccgcagcgacattggacgtcgaagctgggatcgtcgccgatcctgctggggccggtttccaagctggcggcgtacccttgccggctctcacgctcattgcgatcgaagagcccgagaacaacctcgcccccttctatctctcccgcatcgttcggcagattcaggacctgacgaagtcgccgcaagcgcaggccgtggtttccagccattccccgagcatcctcgcccgtgtcgatcctacccaggtccggcacttccgcctcgccccccaggatagaacggcccgcatccgtccgatcaccctccccttcggcgaagaagaggcctcgaagtttatccgcgaggctgtccggacctatccggaactctattttgcgcgtttcgtcgtgctaggggaaggcgcgtccgaggaggtcgttcttccccgtctcgccgaggccatgggtctcgacattgatcgatccttcgttgccgtcgttccccttggcggtcggcatgtgaaccacctctggagactgctgaccagccttgacattccctacgccaccttgctcgacctcgactggggccgttcagggggtggatggggccgtattaaaacagtctgtacgcaattgcttgcgaacaatgtcacgcctcaatccattttcggacaacacctcgatccgctcggtccggcggcgaacctactggcttttgacgctctgccaatcaccgacattgtgaacatcacccgttggatgatttggctgcgccagttcaacgtcttcttctgcacgcccctcgatctcgactattccatgctttcggcctttcctctcgcctatcaggttatcgaaccgggccgtcaaggaccttcgcgcgccggcgagcctcgcacgtcagttctaggcgacgacggcctgcctcacctctacgatgcgagccacgacaccgtgatgcgttggtatcgctatctgttcctcgggcgcggcaagcccagcacccacgttcgggtccttagcgcccacgactcggtcgccgtcgcggcgggcgcgcccgaagaattgcgtgcgctcctgacttcgattgtcgcgcgcctgacgccgccgccgccaccgctgccgcccgaaggcccttga

SEQ ID NO: 75983 - DNA, 1884 bp, Methylobacterium platani
atgcgccttattcggccagaggactggcgccccagcggcatagacgatcttgaaccggcagcgtggagcgccctgcgccacgtcggctcagcgtgcgtggtcgcgggtcctggcgccggtaagaccgaattcctggcccagcgagctgactatctgctcgagaccggtctttgccgagcgccgcaccgcgtgctagcgatttcgttcaagaccgacgcagccaacaatctcgcctcgcgagtccgccagcggtgcccgccagagtttgcccaccggtttgtatcagtcaccttcgacgccttcaccaagagcctggtcgaccgctttctcaacgccatccccactgaatggcgtccgacccggccttacgaaatcgccattccaaagcggagggtggtagaaaacttcctgacgctcgcccgcctcaatgcgccgctgcaatggcaggccgagatcgccggctacagcgcaagcgactttgaggccaagatcgtcggcagctaccgcctgcctgtcgggccgaccgcgcctcagagcgccgccgagttcgccatcgcacgctggtgggtgacccaactacggccgggacagccttctttgctcaccttcgtcggcatcaaccggctggcagagctgctccttcgggccaatccccacatccgccgtgcgctcgtcgccacctatcccttcgtgttcgtcgatgaattccaagacacgacctacgcgcaatacgactttctgcattcagcgttctcgggcgagcagaccattatcaccggcgtcggcgatgacaagcagcggatcatggtcttcgccggcgcgcgcaaggacgcctttcatcggctgcaagcggattttatagccgctcgcttccccctcctcttcaacttccgttcctcgcccgacctggtcgcgatccagcatgtcgtcgcacgtgccctcgatccgaacaccgtccagacggtcgcccggaccgcgcgccaggtgaatggggatgtggctcaggtgtggtccagccagaccatggccgcggaagccacctatttggcgaaatggatcgccaacgatatggccacgcgcggccgggcgccgcgcgactacgcactactcgtgaagcagaagtccgatgactatgagcacgaactcgccggagccttcgccgctcatggattgcggattcgtaatgagagtcatactcttggcaaaacatcgcttcaggacttgctctccgacgagttgagccggcttgcgatcgctatcttccgacttggcgcgtcacgccgtgcacccgccgcttggcagctggtctcgacctctgtcctggcactgcgcgcgaccggcccagacgatgacgcgcgcgcggccaaggtcgagacggagctgaccgcatttctcgcggccctccggaccgacatggccgccacgaccccatcgaagaaaagcgccgtcgacttcgccacgagggtttttgagtatctcgacctggatgcgatcgcgcggacctatgccgaatatggtgtcggcgaccagcttcaaatcatcctcgaagctttttgcatccacttcttaggttgcgccgatggcgcgccgaactggacctcctgcctcgacgctttcgaggggctcaatcagatccccatgatgaccgtccataagagcaaagggctggaatacgataccatcatcttcgtcggcctcgatgaccgggcttggtggtcacacacccccggcgacccggagggcatcgccgcgtttttcgtcgctctctcgcgggcgaaacagcgcgcgatcttttcattctgccaacaacgtggccagcgaaacaacatagctgaactctatcaacttcttactaaagccggggtgccggagattgcgatataa

SEQ ID NO: 75984 - DNA, 1980 bp, Methylobacterium platani; identical to SEQ ID NO: 75982

SEQ ID NO: 75985 - DNA, 1884 bp, Methylobacterium platani; identical to SEQ ID NO: 75983

SEQ ID NO: 75986 - DNA, 2091 bp, Lactobacillus rhamnosus; identical to SEQ ID NO: 71704

SEQ ID NO: 75987 - DNA, 1788 bp, Lactobacillus rhamnosus; identical to SEQ ID NO: 71705

SEQ ID NO: 75988 - DNA, 1623 bp, Mycobacterium chlorophenolicum
atgagactgactcactttgaggtccgagggcatcgggtcctccaagacatgacagtggacgttcgcgaccatctagtcatcatcggagccaatgacgtagggaagacttggatcctgcgtctactgcacgctctcctcggagcatcggtgcaacagctgtttcagacctttaccctcaccgacatccgcgaaggcgaagacgagctgagcgtagtcgcacgcctagaggatctggatgcggacgagcttgctctcttcccgtttgagacttccgttgaggccggggagcctaattatcttgtcctacagctagaggttaggccatcagaagaagacccggacaacgtggcaatcacacgtttcttcccagattccggaactcggcgaggcccaagtcgcaatcaactgttggcaattggttggcggtatcttcctgctacacgttcgagcggcccggagttcatggacggccgaacaagccctttccgcacaatgctcgactcggccgatcttggggacgagatcgaggacttcggcgcgctgcttcaagaatttaacaacaagctggaggagaataccgccttacttgaactgcgtaagacaattgcgacgcatttgtctcgatccgtccccaagacttataccgaggatgcgctcgctattagaacgtcggctgatccggtcgatcaacccttacaagacgtaaccatctatctacgggaaggggaccgcttcaagtcattgtcagaacagagtgatggcatgaggcagttgatggcgctgacgtttttcgatcttgctcaggtccggtccaacattgttgccgtggatgagccggagatccacttacacgcatcgagtcagcgcacggtggcggcccttttcgcagaatctcctaagcaacggatcgtcgtaacccactccccctacatcgttcaccgattcgagccgaaacacgtcctcgtcatcaatccggccagcgaggcaaggcaacttgcagaagagaacttttccgatgtcgaaaaggagatgctgcactggtggtcgccatacttgctcgagagcctcacggccaggagggtcctgctcgtcgagggccttgctgaccgaattctgatcgaagctgccgcaagagcacttggcatcggcctcgaccgcattggcgtgtcagtcttagccttggatggagcagataagttcagtcacgtgctaaagattctcggtcgcaatgggttccgccttccagtctgcggtctctgcgacgaggatagggagcaatcttgggctggaacgttaggtctacgaccgcgcgcactcgaacaaaacggcttcttcgttgcacgtaaagaccttgagcacgagtatgttcgcgcggctggcgtcaaaaaggtggtggatgcgctcatagctgcgaaggtcgcacgcactgagggtattacacaatctacaggcgctgcggacattgattctgtcaccccagatcaactggggaccttcctgtcttcggtggatagcaggaaggtgccagcagctagggcagtggcacccatcttgacgccagaaatcgtggcagcaagcccatccctaatggggctaatcagttttttgaaggcagatgcctga

SEQ ID NO: 75989 - DNA, 984 bp, Mycobacterium chlorophenolicum
atgtgttctcggaatattacctacgttggcgacccgcaccagggcattttcggctgggctggcgcggacccagttcatgttttgcaagacatcaggtctagggcggaccagacaattgatttggacgtcaacttcaggtcatcgcctgcagtcctccgggtaattaattcagtttcatccagcctcggatccgcgcctttacatgcggcagagccggaagaatggaaatccggtgaccatgcttacgccgtgcaatatgcgaccgactcagatgaagctgctggaatcgtatccctgaccgactatcttgccgagaagtgcccggaagacactgtcggcgtaatttgccgagcagagtaccggcgtagtgccctcaattccgcatacgagaacgctcgatatactccacagttctgggactatgcgctagacaacccccgggttacacgcttacttaaaagacactcaaagcatgttgacgcaggcctaacattcgaccaacaagtcgacgaattgcgcgagcgcgcaaccgggtccttcaacccagccgacgtcgacgcaatatctgaggtccatgaggcctgcgagcagctaatgcaacataccgacagcaatcttccgctttccgaattcatgaatagattgcgtgacaccacgatgtctgcaatcagtccaggggtgcacgttctgaatgcgcatgtcggtaaaggccaacaattcgactgggttgtggtcatgggtctcgaggagggtcacgtgccaagttcatactcgacgacgccggcgcaggttttggaggaccagagaatcctgctggtaatgctgtcgcgggcgcgaaaaggtgtctttctcacttgcgcgcgctccaatcggaatcaatatggccgcttgtttcataacgaagcgtcgcggtggtggacagacatggagtcgtcgtgccaaccgctttcaccgtctgtcgcggtagcgatgcgcgtgatgtga

SEQ ID NO: 75990 - DNA, 1923 bp, Mycobacterium obuense
atgaagataactgcgttgcgaataagcaattttcaatgctttggtccgctgcctacgactcttgaactggacagggtaacttacgtcctcgggccgaatggtgccggtaagacagcggtactggaagcactgtctcgcctttttagcccgctgcaggggcaacgtcggattcgagctagtgacttccatgtaccgattggtcagtcgcctggcgacgttcaggctggcgagccagtcctctggatcgaggtcgacgtcgagattccagaagctgcagatgacggtcaacacgcctcggtgccaccaagtttcgggcatatgcggatcgaaagcgcagacgggattccacgcatccgcgtgcgcctgagtgccaaactggctcttgatggttacatcgacgagaagattgaatacgtcttagaagcaaaccaggctggtgagccgaccaaaagcgccgagatgcaccggtacgaccgcggacacattgaggtctactatctgccagcacgtcgggacccctctgaccacatctcctataccaccgcttcactgataggccgtagtcttcgtgcggccgactggactcacgaacgaaagacgattaacgagctctctgccaagatcacagagtcaattgtgggcaacaccgcggtcaatagtatcggcattcgattgaccggcgagtggagcggcctgcacagcggcgcctacttcaaggacccatcaattgcgttcgggcggggtgaactcgagggcatcttgcgccaaatcaccgtaaccttctcgccgtcgcatgaggggtcgccgcttcccttcgagcgactaagcgatgggcagaagtccttgctctacatctcacttgtacttgcttggcaggccctggctaggcgtgttttgaaccgtgaggagatgggtttggacgcagaccgtctgcgtccacccgtacatacgatcatcgccctcgaagagcccgaaaacagcctggctccacactatctcgggcggatagtgcgtcaactgcgtacggcttgcgacgtcggtgacgtgcaagcgcttattgcgactcatgcgccgaccctgctccgccgggtcgacccacacacgatccgcttccttcggctcgacccaagcaggcaaacaacggtcaagcgcatcgtgttgccagacgatgatgagttggctgcaaagtacgtacgcgaagcagtcgaagcgtttcccgagctttacttctcgcgatttgttgtcttgggagaaggtgacagcgagcagatcgttctgccccgaattttcgctgctgctggcatcgccgaggatgatgcgtcggtcgttgtgactccacttggtgggcgtcacgtgaatcatttctggcgattgctcaatgagttagagatcccccacgcgacgctattggacctagacgctggtcgacacgggggaggatggggacgggtacggaatgcaatgaaacagaccaacgtggttcggccgaatacgttcgacgaagacaagatcagccagagtccgaagtgggatgacgatgttccgtttccgcaacgtgagaacgggaagggtgcgctcacggaattggagaagcaaggagtgttctttgccgatccggtagacctcgacttgatgatgatggcggcttacccagatgcatacggcgtcgagccagctgacccagacgacaagacgatctcggctgtgcttgggaaggcgcacaggaatgaaacgcgtttgcccgtgaacgtccgcagactcttcgacgactaccataagaaatttgaccttggtagcaagcctgtgacacatcttggtgcgatggcaaacctcaccgacgagcaactactcgacaagctgcctgatgtactagcgcggttggtcgagtgtgtggacacgcgactggctgaactgacggaatga

SEQ ID NO: 75991 - DNA, 1662 bp, Mycobacterium obuense
atgatccacccggatgcatggcgcccggtcggtggcctcaagctcgaaccaaatgcgcagaaggccgtcacgatggtcggcagaaatgtggtggttgccgctggacctggagcaggcaagactgagttacttgctcagcgggcagactttttgcttcgcaccggcatctgttcctacccgcgccgaattctggctgtatctttcaaggtcgatgcggcccgcaatctgcgggaacgggtgcgagctcgctcggggacacggctcggggcacgcttcgacagttttacctttcatgccttcgccaagcgacttatcgatagctttcgtccggcactcgccggtcagaacgccctagacgccgactatagaatcgaccttacggaccgtatcgagcgcgaacagatcacgctgaacgacttggttcccttagctttagagattctcgaaagcaacaaatatgccgtcggcggggtgcgccaagcctacagtcatgttttcctcgacgagtttcaagactgcaccaaggcccagtacgaactcatcaaggtcgcgttcggccaatcgatgcccgccatcacggcggtcggagatacgaagcagcaaatcatggcctgggccggtgctctcgatggtgtactcgaaaccttcgccgaggactttgcgggcgtcccgcttcctctctatcagaactttcggtcagcaccgcggcttagacgaatgcagaaccgaatgatcgctgatatggaccccggtgcaatcactccatgggcagagctcgttggtgaagagggggttgtagacgtactgagcttcgacacagagttcgatgaggcagagaacgtcagtcatctgatcgaggaatggctgaatgacgggattgacccatcggagatcgggatacttatccgccaagagccacacctggtagccgctgagctgggccggaagctgaccgagcggggcattgcattccgcaacgaacaggaaagtcaggatctgggtgccgagcctgtagcggcgctcttgctcaacttcgtccgcgttatcgcggacgagcgacagcccactgcctatacagagcttatgcgagtcatgaagcgctctaacggttctgaagaagaggcgtcccgacatgacagtcgcgtcaaacgaatgctgcttgaatcacgaaggatcgtaagggcgcccggtttcgagcctgcagaaattggtagttggaggcccatcgtcgaggagtttctagacctcgtgtctttgccagtgctgacggcgttgtcgcctggttaccaacagggcactcgacttatggatttgattgagtcaaccttgtcggctttccagcgcgagttgtcggtcgacggagatgcgattaaggccctcaaacgtctttcagaagtcgatgcgatccggtttctgacgatccataagtgcaaaggtcttgagttcgagaaggtggtcgtgctcggtgtcgagaccaaatttttctggggaaatgccgtcgcggcaatgtctgaatacttcgttgcaatatcacgagcgaagaaccaccttgtactcactcacgccggccaccgtgtccgaccggatggtgtgcccgcttggcggtggcctgagcaacgaattgcgcaatccaagatgctggggtacgcgacggaatcataa

SEQ ID NO: 75992 - DNA, 2091 bp, Lactobacillus rhamnosus; identical to SEQ ID NO: 71704

SEQ ID NO: 75993 - DNA, 1788 bp, Lactobacillus rhamnosus; identical to SEQ ID NO: 71705

SEQ ID NO: 75994 - DNA, 2079 bp, Bacillus cereus; identical to SEQ ID NO: 72832

SEQ ID NO: 75995 - DNA, 1746 bp, Bacillus cereus; identical to SEQ ID NO: 72833

SEQ ID NO: 75996 - DNA, 2079 bp, Bacillus cereus; identical to SEQ ID NO: 72832

SEQ ID NO: 75997 - DNA, 1746 bp, Bacillus cereus; identical to SEQ ID NO: 72833

SEQ ID NO: 75998 - DNA, 891 bp, Lactobacillus farciminis
ttgattatttcacattccccagaagttgcagtttcggctttcgaaatgaattttcaaattataataggaagaagtcacggtggaattactagatttatcacttgggataatttgggaagtaataacccattatctaaacaaaaattgaaaaaattaattttaaattataatgctgaattactttttgcagataaacttattgcaattgaaggtgattctgaacggatcctcttaaattccattatgagaaaaattaatccgactttattatctgaaaaaattgcaattatcccagttggtacaaactttaaaggatttaaagattctttagctgatttattattcgataagattttattaattactgatattgatttttctgaaaaagatacagaagacaataacatctattctactaacaaaaatatacagttactattttcttccaatttggatactactataaaggaccatcctttgaacaaaactttgaagcaagaaaaatcttttctaaccaaagaatggaatctaatgcccaatggaaatttaactaattcagataatgatagtatctcttcaaattttaaaattgtgactgaaggatacagtaatgaatttaaattttggcctagaacacttgaaagtgccatggtaacagcaagtcaccaaaattttgatttatataaaaaaaatgaattactaagaaacgatgttaaagtttcattggataagaacccatacttactaaacgatatagagggaaaattactcagaagtacagtaaaaaaagctgactttgcgctaaataccctagattttatcaacaataaaacttttagaatacctcaatacttaaagaaaggattagaatggtttggtaataatgattga

SEQ ID NO: 75999 - DNA, 1554 bp, Lactobacillus farciminis
ttggtaataatgattgatgacacttatttaactaaaaagaatggtatctatgaagttagaggtgcggccggatcaggtaaaacatatcaattaacaaaagatataagaaaattatctttatcaagtaattctattttcataataagttactctaatgcggcagtagatgaattaaaatcacgtctaaataatccagttttaagtatttcaactattcattccttttgttggaaaattctttcaaatttatctttaaaaatcataaaatacaataaagataataatttttcccctgatgcattcaaagatataaaattcaatccacaaattataaaaaaggtcacttatgaagaaggaatcccattcttcaacaatgaaacaggagaattatttttatcgcacaatgacataataaatttattcatatattctattaaagagataccagaattacgaatgtctatttcaaataccattgattatttattaattgatgaatatcaagatacaaatggaaaatttttacaatctatttttgaatatttatcaccgaactgtactatcggattatatggtgatccatgtcagtcaatttatttgaatgaagatactattaacattagtagtagatatgatattacctctgagtcactaaagaacaactatagatcaagatcaacactagtagaattcttcaatgaatttcgaaatacttttgacaaacttgatcaagttccccaaaggactgaaacaacaaagatacacgtttttgctcgtaacggctctttaaacgacgaaactgtaacaagtattgagaataaaaccaatgtacacaatgaaacaattttatcattaacaaatatcttgcgtactaagatcgtcggattagagagaatagcaaaaaaattaaagaaagactttcccaaaaagaataaagttgcgtgggaaaaaataatgaatcctaattctaatgaatataccaatatcatgaacagttatgcatgtatatttcaagataataattacttagcaatcaagtcacttctgaagatatttacaaaagactctttagaaaaagttggtctagattctgttaaaaatttaattacgaaaaaaaagaaaaaaaatgatccaagtataaaagagtttctagacttaaatttagaaatgaatgccggtttagattcatttaaagagacaatcaatttatttaatcttacggatctaaatgaaatagtagaattttacaaagtttttgacagcaccactacgaagaacattaccatttttaagtcaaagggtcttgagtttgaaaatgtattactaaatattgactacgggttctacaggaaacgcaattggaacaatattaattttaatcataaagaaaatgataacagagatactgatcaagatattatgtactatctcttctatgttggcataacacgtgctaaaaacaatttaaatatatacataaatagtaaacaaaacaaagaatttttaaataaatttactgtcaaatttcctgatattgaaattcaatacatataa

SEQ ID NO: 76000 - DNA, 2037 bp, Yersinia aleksiciae
atgcaacttaagaaaatttttatttctggttttaaaagtatttcgaatcaacaccctcagaccattaaccttgaacatgagttgaccacatttatcggccataacggaactggaaaaagtacggccatggaggcgcttaataaactgttctctgtggatcaatcactgcgtagtttatcaataaatgacttctataatgcggatgtcgagaaagatgaaaagaacagaactttaattatagaagcttggtttagcttccctaagccaaatgaagggaaaatttctattccctctttaattgaacatcttactattgataagtctgatgggatcattctttttagggtgcggttagaaggtaaactttcctttgatgcaaacccaattggagatattgatgaagatatctgggtgatcagttcgagtgacgacgtggttgaggatagtagtaagcagaagctatccgccgcagtaagaaatgctatccaagtgagttatgttccagccaaccgagacccttctttgcaattaaagtattcatcgaaagcggttcttgggcgcttactaaaggcgattgaatgggttggcggaagtcagaaaataatagaagagcaagcagccaaactaaacgcattaacaaagagtaatacagcattaaatgagattgctgcggctattaacgctagttggggacgaatctataaggggcgttatttgtcccgcgcgtcgcttaatttcccactagctaatatcgatgagatattgaaactgattcaacttcagtttaatcctgatgaagtaggtaacacagtcaatgttgaccgattaagcgatggacaaaaatcattggtttatttttcccttattaaggctatgtttgatatagacaaaaagactagggatttgatttctttaggagagtcttctaattttaatcctgagaaaatgagattgcctatttttagtatgatctccttggaggaacctgaaaaccatctttcgcctcattacttaggtagaataattaaactggttaaagattatggtcgtaatgagttgtgccaagttattatttcttctcattcatcctcccttttaagtcgaatagagcctgagcaaatacgtcatttcagattagatcaacactcaaaaagtacggtggttagtgcattgacgctaccggataaagctgatgagctttctaaattcataaaagaagctgttaaagcatatccagaaatctatttttctaaactggtaatatttggtgagggagatagcgaggaaattataatacctaaagtgcttgagctgcattcaacggaaattgacagccattctatctcggttgttcctcttggggggcgtcatgtgaatcatttttggcgtttgttgaagtcattaaaagtgccctttattactgtgttagattttgatatagatagaaatggcggcgggtttggtcgacttaaatatgctattgaccaattagctgagattggtgaaagtggaagtacctatatacataaagacattgctaaagaaataccatcatggaatgacgaacgagacccaacaaagttcactattaaaaatgctaatggtgtaaaaattaatattgttgatgaattagaaaattgtaatgtttacttttcctcaccgttagatattgattatgcaatgattgaagctttccctgatattttctgtgtgaaagatgaagtttatggtgaaagaggccctctaaatatcaagaaaaaggagggtgctgacgaggagaagaaagaactaataaaagctgtattgaaaaagggcaactccggtgttcgttatgttttttctgctgattatctaaaatatttcctgtggtatcgctatcgttttttatccaataaaagtaaaccagcatcccatgttagaatgttttctaaaattgaagaaatgtatacaccagatgaaataaatgcaaaattgcctccagtgctaattagaatagctgaaaaaacagtaaccatattagaagaggttattgaatga

SEQ ID NO: 76001 - DNA, 1680 bp, Yersinia aleksiciae
atgatgatgcaatggcaaccttctgagggtattacgccgacgccggagctaatggatattattctgtgtgatcagtctgtttctgtacttgctggtgcgggagcaggcaaaacggagcttctagctcagaaatcgaattacttgttgcaaaccggaaagtgcatgtggcctaaacgcatattatgcctttcttataaaaaagaggcgcaagagaatatcaaagagcgcgttatgaaaagatgtgggcaaaaaggtgatcgctttgactcatatactttcgacgctttttttaagagtattgttgaccgttttaaagatgttttatctatggataaaagaccattaaatagttatgatttggtgtttagttcaaaagaaagtaacggcaaggacaagttgtcatttgatctaataaggcagttggctttagagatcttaaaaattagagctgatattgttgatctattttctttaacctattcacacgtttttatcgacgagtttcaagatacacgctctgaccagtacgagttgattaaacttctttttaaagataaaggaacacaattgctggctgtgggcgatataaaccaaagtatcatgctatgggcaggtgctagaaaaacagtatttgaagattgtgaaaaagagtttaatactaccaagaaattattggtacaaaattttagggccagtgatgaaattcaggaagtattgagatgttttattcactttgtacaaaatgatgttaatttttcaccaataactcgaagtgtagatagttgcactattcatcattatgacaatgaattttctgaggctgatgatcttgctaataaaatagaaaattttattgcatctggcatcgaagaaaaggagatttgtgtactggctaaacagcagtcagagcaatatacagaaaaacttcgagataaacttacgacaaaaggaattagaaatcttgatatgtcggaattacaagatgtactaaaagagccattagggagaatattttcctcactttttaaagtttgtacatcacgatcaccttcaagctacaccgaactttgtgatttataccttgccttacacagagttaaccacggcgatgaaaaagaagatggcctgattaagtcattgtcggataaaatagcggaaaatagagagaaattaattaactcggccaatccagacttatttatcttatgtattaaagatattataaagttttttggtgtgaacaaaatcatggggcgatggaatcagtataaatccactaattattgggataaactctggagtagccttgagcaacatttacgctacacggtaggtgcaacgcagtctttcaaagaagccgcattaatgtttcaggctgaaaactccgtgcagattatgaatatacataagtgcaaggggttggaatataaagtggttatttttctaggtttagaggatcaggcattctggaactataaaaaggcaaagtttgagaatgactgtgctctctatgtggcattatcaagagcgaaggagaaaatattagtaacaacagctgaaaatagagaacacagagtgaataatggatatgataatagaaactctaaatatcaattggttaaaccaatttattcatttttgacttcgcattgtaagtttaaatctatatggtacccatga

SEQ ID NO: 76002 - DNA, 2121 bp, Vibrio crassostreae
atgtatatcagtcagttgtccattgttaatttcaagaactttgaacgttcaaacttttacttcgaaaaagactcagttaatacagttattggagaaaatgcgtctggtaaaacaaacgtattccaagctatgcgtcttattctagatgactccttaccagcaaattcaaagtttctaagtgccgatgatttccatcgtggaatcggcgagccatttgggcattgggtcgtaataactctgcactttgaagggttgactgattctgaagagcagcaagttttgtcgaactatatcttgaatgatgaaggcaaaaaagttgactcttctaatggtacatactcgtttatttatcgccctaagttttctataagacaagatctgtatgagctaacttgtaagcacgatgacaagattgcacgctctgaagcaatccaaggctatctaaaatcaaaggcaattacacgcgatacgtatgagccagtcgctttcgttagaactaagctcgatttcaccgatgataatacgtataaggctacggtaggcgactttgatgagtataagttccctgacccaagcaaagaaagtgaagctacattcggtaataagaaaccaccgtatttctcattgttaaatgaagttgcttgtacatacgtcaaagcattgagaaatgttgtcgcagaccttcgctactataaaacgaatccactgtataagttactaaccctaaaaagcaaagagattgaagatgataagagtgttgtagacgacattattgatataaacaacaagatatcgtcgatccctgagataaaagccctgagtgaagatatatccagttctttagttagtacgatagggtctacgtattctccgaagatcagagtgtcatcccaactacctgaagattttgtagagttagttcaatcattaggcttggtcgttgaagattcgttggactaccaaggtactggaagaattgaagacctcagcttgggtggagcgaatttaatatacttggctttaaaactctacgaatatgaggtaatcagagatagtgatgatcacatcacacactttttgatgattgaggagcctgaagctcatatacatacgcacattcaaaaaacgctctttgagaacttcaacttcaaaaacactcaggtatttgtatccacccattcaactcagattagctctgtgtcaaagatttcatctatgaacattttgtcgagaaagcagacaaaaacagaggtgtatctaccttccaatatgctagaaagggacaatattcaatgtattgagcgttatttagatgcagtgaggagcgacatactctttgcaaaaagtgtgattttagtcgaaggagatgctgagctaatcctcataccagcgcttgttaaatctactcttggagtaagtttagatgagatgggggttagtctgataaagatggacggtacagttttcaaacacatatctgaccttttccataaggaacgaataaggaattattgtgcaattcttacagatctagacgaagcttttgtaaccgaaaccaatgatacattcgccactgacgactttgtgaagtctcaaatgaatgcagataagtcggggaaggaacgaaaagaagccttagatgaatatgtagaggataatccatatgttaaagcattttatgcacagaatacctttgaaacagaattggtaaaacttactcaaaactttgatttatttacaaaacttatggattctaactataaaaaaggcaagcgactgactagtgttaagagcgaaatcaaagataaggatctgcgtgttagatataaccgtgctcttaagtttgctaagaagattggcaaggggtggttggctacgcaaatggcagggcacacacaaattaataatctgctacctgattatattttacgatcgattaagttctctcttactggaaaaaacttggacgatatattgttgaaaatgatggcgtttaatctcgaggaaatgaatgcggaggaaaaagctgcaatcaacgaagtagatacttttgacgagaaactgaaggtgtataaatctttctatgatggtgatacttttgtgaggtttgtcgaaatataa

SEQ ID NO: 76003 - DNA, 1749 bp, Vibrio crassostreae
atgccatatcgaaacctaactctagagcaaatggatgcagttacttacgttgacgatatgctactttctgcctgccctggctcaggcaagaccaaaactctggtttctaagctttatcatatcttagataactctgacgatttgttaataggtaagcgtaaagtagtagctatcacttatacaaacatcgcagcagatactatcactgaaaggttgctttcatacggagtagaaagtaactctttatgggtgggaaccatacacgccttttgccttcaatggattgttagacccaatattaataatatacctcgtttatgtggcgggtttgtggtcatcgatgagcacgaacgagaagccaagttagtagagctaaaaatacactacaagaaaaaaggttatgaccagatagttacttcacttaactgcgattatgaacccgtgtataaaaaaggctcggttgagtataagatcgtaattgattaccatcgttatttggccactaacggttacatagactttgacctaattctcaacatcagctaccgattacttgtcgccaatccacagatagcacgccgtttagcaaaacttttataccacgttctagtcgacgaatatcaggatacgtcggcgatgcagtatgagattctcaagctaattatttctcacaaacaaactaaactcactatgattggggataaagagcaggctatttacacgggattaggggctgtagtaaaaggtaagaaagaactagaacatttttttgatctagataagggaatagaagagaagcgccttactggttgttttcgtagcagtcaaaaagtcatcaaccactatcttaggtatcaagatgctggttatgaggttagtgctctatctgaacttaaggaattcccgtcggtggttcacttagagtctactgttgataaaactcaattgcctgagtatgtcaaaggtattattgagactcatttagcgcagggaattgaagggcaagatatagcagtagtttgtcctagttggttcgatgtgatggcattatctacaggaattgatgcactagcgaaatccttcgacattgatggttttttgatttcaccaattccaaagaatcaagacaacctatggcttccattgattcggttagtgttgcttaaagttaatatgaataactttgttaagcgtcgtaggttggctatcgaactatccgataaattgtatgatgcgggttctactcaggatagaattgacccaagagtgctactaaaaacggttaattccatatcgctcaatatgaatagtgaaattgaaccttggatagagctagttattgagaaagcttgcgaaaatctggagattgatctttatgagacgactgaagcttgtaaagctaaacaaagcatactaagtgctactacggaacgaatggctaagtatgggatggattacaaggcatcagacttgagcagattcttttcatcttcgaatggagtaaaaatcactacatgccattcaacgaaaggggatgaatatgacgttgttatctgtacaggcctgcttaatggtaaagtcccgcattggaatgacattatcgactgtagtaggtcacatcagaactatgttgcgagaagattactttatgtgatttcgtctagagcgaggaagcacttgtatctaatttctgaaagtgggcacaaaacgaccaatggaaacccttaccgaccaaccagtcagctttaa

SEQ ID NO: 76004 - DNA, 2226 bp, Vibrio crassostreae
atgaaaattagctttgtagacattcaaaacttccgaaagttgaagcgctgtcgcgtggagtttgcgaaggagcagacacttttagttggggcgaataatagcggaaagacatcagcaacagatgcgttgatttgctttctcgataagggcaaaaaaataacatcaaccgattttacattatgcaactgggttgcattgaatgagtttgctgaatcatggatgaaacagggggcaactttagcagaactgcctgaatggcaaccttattgtccttcgttagatgtttggatagacgcagatgttagagaagttcaaagagtttctcatcttatccctactttaaagtgggatggagaacctttaggtgtccgattgatatatcagcccaaagatttagataggttgcgagaaaactatgtacgtgaaagagatgctgtagttaaggtaaacaaagataaacaactatcactttggcctagagactttaaagactaccttaaagaaaagttacatgttgaatttgaaatcaaagcgtatttacttgatccctccaagaaagatgagactcaaacgctatcaaatgactctatatgttttgagtctgatccatttaagggtatttttcgagtcgatacaattgaagcacaaagaggtttttctgaccctcactcagatttaggaaagtcaactagcagcttatcttcacaactaaacgagtactacaagcgccatttaaatccatctgatatgcctgaggccgaagatttagatgcgttagaggcagttgaaaaggctcaaatcgagtttgattctcgattggataaagcctttgaaaaaactcttggcgaaataaaggagcttggatatccagggtttaccgatcctgatattaagctatcgagcaggttgaacccgatcgatactttagagcatgatgccgccgtaatctttgacgttagaaaacagaatttcggtgacaatacattttctcttcctgagcaatacaatggattgggttacaaaaacttgatccacataatttttcagttgattactttccgagatcgttggttgaaggtcggaaaaataggcaaaaagcgctcggaagaagacgcggcgattgaacctatccatttagttttggttgaagaaccagaagctcacctccatgctcaagtacaacaggtttttgttcgtaaagcctataaggtacttagagagtatggatccgttgaagctaacttaacgacccaaatggttattagtacccactctagctacgttgcttatgaagcaggttttgaatcccttcgttatttcaaaagaaaacctgcttctaaagaacaacctactcctcaggcagaagtggtgaaccttgcgacagttttcccctccgagaggaaaaatgaaactgatgtatcgtccacgaacaaatttgtttcaaggtatctaaagacaactcattgcgacttgttctttgctaatggggtaattctggtagagggagctgcggaacggatgcttctaccacatttcatttccaatcatcatcaggatttgagacgaagctatatttcaatattggaaattggtggtgctcatgcgcaaaggttacgtcctcttattgagctactaggtttaccaacattagtcattaccgatactgatgcgtgtgactcgctagggaaaaaagctcgcccgaaaagaggggcttctttagagtttggcagtgaaacactaaaaagttggtttgaatttggtaatttgactttggatgacctgcttgacctaccgcctgagcaaaaagttcaaagtaacgttcgcgtatctttccaatatggcattcagacaaaatttacgccgaaagcgagaacgacgaaagaagttattccttatacgttcgaagatgcagtagctctgacgaacttggagttatttaggaagctaagtaagccaactggaatggtaaagaaaatgcatttggctacgaaaatgacaacactaaatgcttgttgcaatgccatgtataaagcactcgatggagagaaagcaaaaatggctttagatctactatatgatgttgaaccaaacgagctgcttgttcctgaatacataagcgaggggctggtttggctagagggtgagctagagacgatgagtttagaatacacatgggcaccagaagatcaagcctctgaaatcatggaggaaatgattggtgagtaa

SEQ ID NO: 76005 - DNA, 1860 bp, Vibrio crassostreae
gtgagtaagcctaacagcctaatcggggtcgatcatgaaatctacggatacctaaaccttgataaccccaagagctttctattatttgctggtgctggttcaggtaaaactaggtctctagtaaatgtattacaagaaatacgagagaagaacttaggtcgccttatccaaaatggtcaacgggtcggggtcataacatataccaatgcggcgtgtaacgagattcaacggcgcttgtcttatgatccattgtttcatgtatccacaatccatagctttgtttgggagatgattaagccgtttaccgaagatattaaagggtggcttaggacaaaacttagtgccgatatcgaggagcttgacttaaaaatctcgaacgctagagacatcaacggtaagacagctcagcaaaatattagaaagaaagaggctaaagctacgagattagacgaattacgattagtcagaaaattttcgtactcgcctacaagtaataggatcgaaagaggtacggtttctcatgaagaagttatacagatcactgcaactctattgaacgagagcccgttacttcaaaatatacttacaaataggtatcccatacttttaatcgatgaaagccaggacaccagaaaagagctcatggaggctttcattcaaactcaaagtttgaatcgttcgaagttttctcttgggttatttggagatctcatgcaaaggatctacggaggagggaaacatgatctagagtcctccttgcctgacgattggaagaccccttcgaaaacgattaattaccgctgcccgcagcgagtagtagagttaattaacagtattcgcgaagaggatgataagaaaaagcaggagccaaaagctggtgcgtcgcttggagtcgttaggttgtttattgttgattctgatacagcacataagcgagatgtagaagcttcaattagagctaagatgtcagctatttcagaggattctttgtggcttgagccaaatcagataaaagctcttactctggaacatgcaatggcagctatcaggggtaactttgataagttttatttgccacttgcaacagttgacagtctcagagattcgttacttaacggaacaaatgcttctttaaggtttttgtgtagtagcttgttacctcttgttgacgcgatcagagttcgagatgagtttgccatcgcaaacattatcaaaaagtattctggtgttattagctccactaacgcggatttttgtttagatcctatatcgactcttaaaaatacggatcagtcggttgaagaaattagggccatagtctcggagctagatcctcccttagcgcaggtattgctcttgataaaagcttacaagctactttatattcctgatgaactaaatgctcttcttgtagaatcatccagcctgaaaaacgatgatgaggaggagaacttgagcaaacggtcaattgcatggaatcaggctcttttagctcctatcagccatttggcaaactacgcgctttatattaatgaagagttagggtatggaacacatcaaggggttaaagggttagagtttgatcgtgttatggcaattatggacgataacagtgcaaatggattcctgttccgctatgaaaaactatttggtgctcaagagttatcccagacggatatacgaaatcaatcagaaggcaaagactctgttctatcaagaactagaaggttgttttatgtgatatgtagtagggcagaaaagagtttagctgtcgttgcttataccaaagatcccaaagctgtaaagaagaagagtttagagtctggctggtttactcaagatgaaattgaaatgatgtag

SEQ ID NO: 76006 - DNA, 2121 bp, Vibrio crassostreae; identical to SEQ ID NO: 76002

SEQ ID NO: 76007 - DNA, 1749 bp, Vibrio crassostreae; identical to SEQ ID NO: 76003

SEQ ID NO: 76008 - DNA, 2121 bp, Vibrio crassostreae; identical to SEQ ID NO: 76002

SEQ ID NO: 76009 - DNA, 1749 bp, Vibrio crassostreae; identical to SEQ ID NO: 76003

SEQ ID NO: 76010 - DNA, 2121 bp, Vibrio crassostreae; identical to SEQ ID NO: 76002

SEQ ID NO: 76011 - DNA, 1749 bp, Vibrio crassostreae; identical to SEQ ID NO: 76003

SEQ ID NO: 76012 - DNA, 2121 bp, Vibrio crassostreae; identical to SEQ ID NO: 76002

SEQ ID NO: 76013 - DNA, 1749 bp, Vibrio crassostreae; identical to SEQ ID NO: 76003

SEQ ID NO: 76014 - DNA, 1698 bp, Vibrio sp. J2-31
atgtacatcagaaaggtaacgattaacaactaccgtagtttccgcactttcgaagctaaacttcaacaactgacagttgttattggtgaaaacgatactggtaagacgaactttttcaccgcactttcgttaccgttaagcggcaacctaatagacttcaaccagaagcgtttgagtgtttctgatatcaacaaagattccgttattgattttctaacgtccgttgtcaatgatgacaccgaagagaatcagcttaaaaagatccctaaagtatcagtaaccgtagagttcgctgatccgaaagatgcttatgaaacagcactgttagctaagtggattgttgcagatggaaataaagaaacttacaaaatcagatacgactttaagcctaaagacgacaaagatttgcttgaggtcgtgaagaaatcgttcgctggtaagattttagatgatattaactggtttactctacccgttgagctatacgactaccaagtcgtctctgtgaacaacgaaaagcctatcgcatacagtgacttaaaacacgtcagtctccatagcatcaatgcagagcgagatgacttctcagaaagcagttcaatgaagtccaatagcattttcaccaaactgcttatgaacactctcaacgatgacgacaaaggtcagatcaataccgcctactctgagttttttagtgctattgaaaagactgaaacattcgacaaagtcattagaactaatgacgattttgagaattacgacagtattatcaaacagcttgagtgcactcctaacctgcctaacttgaagaacatcttatcgaacatcactttgaaatacgggaatgaatttctgtaccaaaaaggcttaggacaacgaaatcttatctacatactcatcttgtttgcttactacaagtcatgtggtgatacattcaacttgtgctgtatagaagaaccagaagcacacttgagcgttaacaaccttcgtttagtaagagacttcattgagaaaagctcaagcaacagtggctcgcttgtacaaactatcatttcgacccataacccatcgatcatcaacaagctaaagatctctaatgtgttggcgtttactggcgagaaagcaattagtctgtctgatactccaactaagctagttgactacctaagaaagagacctaacttcgacatcttaaagctgctgtttgcgaacaaagtcattctcgtagaaggtccgactgaagaaatgctaatcagcacttatctgtctaaacagccagccctcaacgacattgatattattccaattggtcaacgtggttacgccactttcttagatatatggctagccttgaacaaagataaccagaacaagaaaattggtgttgtccgtgattatgacaattcagatgcggctaaagccaaacatgatgcctatgacacagcgcatgcgaatgtcactgtaagaacaacaacaaactacacacttgaaattgatttagtagaagcagaagacaacctagctttactaaatgatttattcgaaatggaaggcgacctcgacgcagtatccaaacacatgattaatggtaagacagcaagaatgcttgatgtatgtgatgcgatggttgatgaagagaatccgctggatatcaagttaccagctcacatcgctgaggttatcgaggcggtatcatga

SEQ ID NO: 76015 - DNA, 1377 bp, Vibrio sp. J2-31
atgatagaagtacagattgctggtgcaggtgctggaaaaacttatggtttagcaaagactttgatagagcacatcgaagcttgtactagtcacaaaaagacatttgcactgacgtacacaaactctgcaacagcgaagatagagcaagagataatcaaacagcatggctttattccgtcgaatctctgtatacagaccgtacatagcttcttgttaaacgaaatcatctacccattctcgtcattcactctcggagatgtgtataacgacgcatcaataatgatgttaccgagcgatgctagattcaaaaactggcacttaaagcgattaaaagataaaaatatcattcatgccgagagcgtctacaacatcgctaaacaaattgttgatgaaaccaccagcaagcacaacaacagagcgaagaaagctaaagtccgcagacttttggctattctaggaagctgttttgacaagatattcatcgacgaagtccaagacttagataaagatgcacttcgctttttcgaagttctaggcagcaacgatattgacatatacatgatcggagatccaaaacaagcaatcaagtttccccaagatcttgatgctttcgttcaaaaattagctcaaaaaaaatacgcgaccatactaccgatcaacaatcaaactaggcgagtccccagagagatactaactgtctcaaacagcttctgttatgaaaatcagcaacaagagtcactatcagaaatggttggtgaactcatgtacattgaatcgacggacgggcgatatgacgatctactaacgcactacttagatacaaaacagcttgtttgtatcgacaaaaagaatggtcgctatacaacttcatctaaacacaaacactcattcccacgagagatcgaggaaatgattcgtgattctaaccacaagaaagacaaagctttgtttgttaaagcagctttttctgactttatggacgatgcgatcaatgaagataataagaaagccataagtaaactcattgctcggcattcattggctcttaataaacagcacttcgcccaattacatgagctatgcaattcatgcacaaaaaatgatgttcaattcaaagtccaaagtatcgaatctatcaagggattggatgctgatgtgtgtgtaatcatacttagccctaataccctgaaatacttaactcaaaatggtattagcaaagcaaatcgatttaataaagaatggaaaaaaatctatgtcgctcttactcgtgccaaaaagaggctggtgttagctttagatcacgatttactcgctaaagaagatatggcggctgttagggattccataggtgaactgggattcgttactcataactag

SEQ ID NO: 76016 - DNA, 2121 bp, Brenneria goodwinii
atgtatatcaataaattagctattagaaactataaaaattttcgaagctcaaatttctactttgtcaaagattcagtaaatacaattattggtgagaatgcttcaggtaaaacaaacttatttaatgccatgcgattgattcttgatgattcacttccaatgaattcaagggttttattagatgaagatttttatcgtggcttaaatgaaccattcgggcattggattattatcacattgtattttgatgatttaagtgaatcagaggaagaacaggttattgcaaattatacaataaataatggtaacgaagaggcattaaaagaaggaaattatacattcatatatcgtccaagatatcatataagacaaaaactatacgaattgactatagataataaaaatttagattcaaggttagaggcttttagagagttgaaatcaacttgtataatatccaaagaaacatacgaggcagttgcgtttgttagaacaaaggttgattttaatgatgacgaagtttataagaaagtagttggggattttgataaatacattttttctaatcccaatgaagatgatgctacagttattggtgtaaaaaaaccgccatactttgccttaggtagtgaggttgcttgtacttatgtcaaggcccttcggaacgtggttgctgatttaaagtattataaaactaatccattgtataaattactcactttaaaaagcaaacaaattgatgatagaaaggatatttctgaaaatgtgaagaatattaatgaacaaatttcagccattcctgaaattgctcgactaagtaataaaatatcaacatctttacttaataccgttggttccacctattcaccaaaaatattagtttcatcacaactgccagaagattttactgagttgattcaatctctcggattagtagtcgaggattctttagattatgatggttcaggaagaattgatgatctaagtcttggtggcgcaaacttaatatatttggctttaaaattatatgaatatgaagaaattagagatgctgaagaacatataactcattttctgttgatagaagaaccagaagctcatatacataatcacattcagaaaactctatttgataatttcaatttccaaaatactcaagtttttgtttccactcattcaacccaaataagctcagtttccaaaatttcgtcgatgaatattttggctcggcaaagagggtatacagatatttatcagccttccaacggactggagctaaaagaaatttcttcaatagaaagatatctggatgcaattcgtagtgatgtattgtttgctaaaagtgtaattcttgtagagggtgatgctgaattaatcattattccagagcttataaaagtcacgttaggtattagtttggatgaattaggcattagcttaataaaattggatggtactgtatttaaacacatttcaaatcttttccatgaggatagattaaaacgcaattgtgcaattttaactgataaagatttggcatatgtgaaagaaccggatgaaatatttgatgctgatttcatcaagtctttaaaaaatgctgaaattgatggtttacgcagagagcgggaattggcagagtatgtagaagacaatgactttgtttctgtattttatgctgaaaatacatttgaaactgaacttgcaagacatgatgaaaactgtgaccttttcaaaaatgtcattgagacaacatacaaaagatcaagtgatattacgcgagttgttgctgggatagagtctgatgatttaagagtaagatttagaactgctctttttttcgcaaataaaataggtaaaggatggttggctactcaaatggtcgagcatctcagtaatgagtgtcgagttccagattatatattggaggcgattcattttgcactaaaagatagagatttgaatgctgtgcttaataaaatgcttacctataatatgtcattaatgggatctcattgggggggggtatgtgagaacattaattctgaacccgactttgataaaaaaatggaaatgtataagaaccatttcaatgatagttttgccaagttttgggagttgtga

SEQ ID NO: 76017 - DNA, 1752 bp, Brenneria goodwinii
atgccctatagaaatttgacttctgaacaactggatgctgtaagatttgatggtaatctattacttacagcttgtccagggtcaggaaaaaccaaaacattggtttccaaactttgttttatccttgaaaacaatgagttgtttgacataggtaagaaaaaaattgtggcattgacatacactaatgttgcagcagatactattctcgaaaggattaattcatatggtataaatagcgattcattgtggattggaacgatacatagtttttgtttaaattggattataaagcctaacattgatagaattccaaggctctgtaaaggttttaatgtaattgatgagtatgaaaaggaattcatattaaatgatttgaaagatcgttataatttatctccttacaataaaataaatacacttttagacttcagttttactccgttatattctcgtgatactactgaatattcagtggtaaaagcttatcacgcttatttacatgagaaccgattaatcgatttcgatcttattttgaatttaacatgcaatctattattgaaaaacgatgtgctttgtgaaagactatctcttattatgcgatgcattttagtcgatgaatatcaagatacctcttatattcaatatgagatactcagattgatagtgagtaaaaaaaattctttaattacctttattggagataaagaacaagcaatatatactggattgggagcggtggttaaaaatagaaaagagttgtttgattattttaaccttgaagaactggaggaaatgaggttaaccggttgttttcgtagtagtcaatcgataatagatttttatagcaagtataaagatgatgcctattatataaactcattatcagaacttaagacatttccctctgtgatactgaaagaaaatagtgttgatattacccaattgtctgtttatgtttcgggaatcataaggacgcacttggaacatggtatttctcctagtgaaatcgctgttttatgcccaagttggtttgatgtaataaaattatctaatgaaattagatctctaaatgctgacatagaaatcgatggagtcatggtttctccaatacccaaaaacaatgaaaacttttggctcaatcttgtcaagcttgctttaattaaaaagaatccatcgaattatattgttagacagaagcttttgcgtgatttattaaaagagctaaatgatttagagccatatacacaattcttgtctcctaagcaaataataaaacaaataaataaaattgaatttgcaatgaattataattgcgaaatagatgtttggataaatgatcttataactaaattctgtaactcaataagtttagatattaacaacgaaagctatgcttataaggaaatgaactgtctgattgatgctacaaaaaaaagaatggttaaatataacatgagctacaaagcaaatgatcttcattctttttttaattttaaaagcggagttaaaattacgacttgtcattcaacaaaaggagatgagtacgatgtgattatttgcacagggttattaaatggaaaaataccaaattggaatgatattatagattgtagctcagtacatcaaaattatgtggctcgcagactcttgtatgtcattgggtctcgtgcaaaaaaacatttatatatgatatccgaaagcggtcataagacacaaaaaggttatccatatcagatcactccacagctttga

SEQ ID NO: 76018 - DNA, 2040 bp, Proteus vulgaris
atgctattaaaaaaagcggtgatttcaggatataaaagtatttctactgaccaccctcaaacaatagagtttgatgaacaactaacagtttttattggacataatggcaccggtaaaagtacagctttagaagcgttgaataagttattttctacagatcattctttaagaggaattattccttctgatttccatttaccagatgagatgaaccctgaaacacctcgaaatctaatgatagaagcatggtttagtttcgctgatactgaaggtaatttatcactaccaattttaattaatggattaacagcaacaagttcaactgaggagattatatttagagttcgtttagaagcaagtttgagctttgattataatccattaggtgatgtggatgaaaatatttggattatcgatggtgatatgaattttccagaagaaggtaataaacatcgtttatcagcagcacaaagaaatgcaattcaaataaattatatccctgctaatagagatcctttggttcaattaaaatattcttctaaagctgtactaggccgattattgaaatcgataaaatggtcagatacggaaaaattatcttttgaacaacaagctgaggccctaaatttattagctttgaataatcttgcattaacagagattacgcaagctatcaatagaaattggcaaacaatatataaaggacgtcatcttaatcaagctgatctttcctttcctgtaggaaatattgatgaaatattaaaactaatacaactgcagtttatgcctgatgctacaagaaaaaaagttgatattagtcgattgagtgatggacaaaaatctttagtttacttttcattgatgaaagcattatttgatatagataaagccacaagagaattatcagatatcacagtatctaattttgatgttgagagaatgaagctacctattttcagtttaattcttcttgaggagccagaaaatcatttatctcctcattatttgggaaggatactaaaattagtaaaggattatggagcaacaaaatattgtcaagccgtgatttctacacattcggcttcattagttggaagaataaaaccctcccagattcgtcattttcgtctagataataaaaataaatgcacatcaattcaaaaattgttattaccaaaaaatgatgatgaacagtttaaatatattaatgaagcaataaaagcttatcctgaaatttatttttcaaagttagtcatattaggtgaaggggacagtgagcaagtaattattcctaaattaatagagcatttaaaaaaagatattgatggatattcgatatccgtggttcctcttggtggacggcatgtaaatcatttttggagactacttaattctttaaaaataccatttgttactttattagattttgatattgatcgaaatggcggtggttttggtagacttaaatatgctattgaacagctatgtatcttaggggatactaataatatatacattaataatagtataaaagaacacattcctgattgggataacgataaaaatccagtaacattttcactaaaatatactgataatcaaactaagagaattgtagatgaattagaaaaatgtaatgttttcttttctagccctttagatattgattattctatgattaattctttcccggaaattttttgcgaaaaagatatttattatggagaacgaggtcctttagaaggaaaagaagatgaagaagaaaaagatattgttgaaagagaaaaagcattaattaaagctgtacttaaaaaaggccatataggtaaaagatttaattttggtaatgattgggaaagaaatttcctatggtatcgttaccgatttttatctaataaaagtaagccggcctcacatgttagaatgttcacgaagatagaaaacaagtatacatctgaacaaatattagagaaattacctgtcgaattaaaaagaatgatgggcagagtagtttatctattagaacaggtgattgaatga

SEQ ID NO: 76019 - DNA, 1197 bp, Proteus vulgaris
atgatgaataattggaaaccaactgatggaatagatgaaacaaaagaattaatggatatcattacttttgataattctgttgcagtattagctggggctggagcaggaaagacagagctattagctcaaaaagctaactaccttttttctaccaataagtgtatttggcctaagaggatattatctcttacatttaaaacagaagcacaaataaatataaaagaaagaataaataaacgctgtggtaataagtctaatcgttttgattcatttacatttcatgcgtttagcaaaagtatcgttgataggtttaaaagtcttcttccagaagaaaaaaggccaagtgacaattatgatattgtttttaataaaaaacatttatctggtaataataaagttttaatgagtgaattattatcattaacaataagtatactgaaagaaagagatgatataaggaaaatattttcttactcttattcgtatattttcatcgatgaatttcaagatactacagatgagcaatatgaattgttaaagatattatttaaagggagtgatgctaaaattctggctgttggtgatattaatcagagtattatgttatgggctggtgcacgaaaaacagtatttactgattttttaaaagattttaatgctaaaaataaatttttagtaaaaaattatagagcatctgtagaaatacaaaatgtattagagttattattagagtttattaaaaataaagataatgaattaaaggaaatatctgatatccctcaaaattgttcattgcatctttttaatgatgaatataaagaggcaagatttattgcaaaaagaatatctactttagtaaagaatggagttgaagcgaataagatttgtgttctaactaaacaagaatcatctagttatactcgagtattgagagatgaattaacaaaattagatataacaagtttagatatgaatgaattgaaagatgcattaaaagaacctttaggtaagattttttcattattcttaactgcattaataagttctaatccaaaatctatggctgaattgtttttgcttgttttgtcattaaataatattgatgatgaaattaaagagaataagattataatatctttgcaggaatttatttttaaaaaaaaaggattcaatgaaagaaacagatactgcagatga

SEQ ID NO: 76020 - DNA, 2016 bp, Longilinea arvoryzae
atgtatctacaaaaaatcgctattaaaaattttagatgctttgatgaaactgggattgttttcacatttcagccaggtgtaaatatcataattggtgaaaataactcaggcaaatcgtccctaattgatgcgcttaggattgtgtttagcttggggatagggaaaagagaaatttttgttactacctctgattttcatcttgatgaaaatggaatctatgcgagtgaaatatcttttgatttgaattttattgacttgaatgaagatgaacaagctgggttttatgaattgctcgttgtagaaggagctgtttttactgcacaactacatatcagggtaaaaaaggaatctactaaaggatttgaaaaaataaatactcagatatggggtggagaaaaacaaggtcagcctgtttcttacggcactttagaattcataaatcattattaccttggggctttacgtgatgcggaaagtgatttgcgtccaggcaagggtagcaggattggaaagcttgttagaaagctgatagaaaacgatgatgaaaaagaggcaatactagcccatataaaaacggcaaatcgaaaaattttaaacgaacctaaggtgaaacaggcaagcaccgtaataaatgatcatcttcttgatattgaagggaaccggctaaagcagaatatcaatctggggctggttttacctgattttggtagggttaccgattctttacgtgcattacttccacccaataataataaaacaaaagcagttctaaaccaaaaaacatggcaatcaatgattgcacaaaataattcacttgaacagatattgaatggaaaaataacagtagtgggtaatagtgtttatatttctataagtgagttgtccgaacaagaaaaagaaaatattggcctcgaaatttattcggaaatattggagcatactatttattttgagctagatcagaatggtatggggtataacaatctgatttatatgggaacagtacttggtgacttacaagaattaaaaaaggtcgaaacatgttcatacaacactcttcttattgaggaacccgaatcccatctgcaccctcaattacaaaatttggtgtttgactttttcaagagggtttgctcaaatcaaaatggaggagcagccccaaactcagttcaagtctttgtaacatcgcactcacctactcttgtatcaagagctgatattgataatattcaactgattaaccacaatgaggaagataaagtaattgtaactggactaataaattgtcccctccttccggatcaaaaggatgacttacgacgatatttggatactaccaaatctcagctcttcttttctagaggcgtaatatttgtagaaggaatctctgaagcgttattgctgccaatatttgcaaatcgcatgaatagaaggttagatcaaaatgcaatagaggtagtaaacatatctggaaccgcctttgaacctttcgcacttcttttcaacgatccagatgaaaataaaagaattaacattcgatctgtgattatgactgatgatgatcgttgcacctcaaaggatgatgtaaacagaattactgatgaaatgagtcctgaagagatattgacaaagttaccaaatgggcatatttctccaagagcagaaagagcccagagtctgcaaaatgaaaacctgttagtgaaaatggcatataagacttttgaatttgagttagcacaaatcgatctaaatcttcctgtgcttttatcagcacttgatcctattcatccaaggaaaacggctgaattgagaggattatttgctgcaatcgatgatcctagtctcaaagcaatttatttttggcaagcttgtaaagatacaaaggcggagtttgctcaaaggctggctactatactcaacaaacgaaatcagcaaggtaacttcgtcacccaatttacaattccgcaatatattattgaagttatcgaacatgtagccgtgatagaaacagattaa

SEQ ID NO: 76021 - DNA, 1794 bp, Longilinea arvoryzae
atggttattttatcacccgaacaactaccggcagtaactagagcaggaaaatttgttgtaattgcttgtcctggaagtggaaagactctcactgtttctactcgtttcatgcgaagaatgaaggattggaaaagacaatcatcaggtatcgcgactctatcgttcacaaatgtggctcactctgaaattagcggtgatcttataaacgatgggtttagtccctctcctccgtttccacattttcttggaacaattgatcatttcataaatacatttatatttcttccattcggtcatctcgttatgggctgttctggtaggcctaatttaattggaatgggaagcaatgtatggaatcaaaaagaactcaatttatattggggaaatcaaaaatgttattcatgcaagttggagaatttctcatacgacattaatggcagacttattggtggattagtgaattgtccttttgattttactcattgtcggatccttaaaaatagattcaatagaatgggacttgcaactcaatcggatgctgaatattttacaatgagaattctcgaaaggtatcccggaattgccaaatctctatcaactcgttttccagaaatgatcattgatgaggctcaagatacatctgaaattcaaatgaggattatcgatttgctcgtaatgaatggcctttcagaggtcatgctagttggtgatccagatcaagcaatatatgagtggagagacgcaagacctgatatattcatgagaaaaacaagtcaattggaatggcaagaaccatattatttggatcagaatcggcgtagttcacagctaatttgtaacttaactaagaatttttcaagttcactgcgaaatatatcacaagcaataggaactgatgcaaatttcagtttgcccccaaaactagtgacatatgatccaaatcatttatcaaccataaagaatgattttatcaatttatgtgagaggcagggattagagataaaaccatctgagatatctgttttagttcggacaaataggcaattattaaaattaagagatattattgatatgggtgatccttggaaccatgctattacacggctactcgctcaggttgcatattaccgcgataaaggcgacattatcagatctcacaactcatcagaagctgcattagttcggatattatttggagatcgatatatctctaaattcgatctggaaaatcaaatagaagcgagaaacctaaatccgggatggcctttaggtatatggcaaattatgaaattactcccaaattctggtgatgcacttaggttatggttgataaatgggacacgaaaacttcatgagtggtttgatgcccatcctagttggagagaggttgacagaggtaaattagatcttagtataaaacaataccaagtgatgaatcgccataaatttaccgcctattacgatgaacccgtttctaaactattttctgatccagaatctgttgtcgatggaattactattgagaccattcacgccgcgaaaggaaaaacatacgaagccgtcttatatattgtaaatgacagcaccagaggaggggcgaaaggaaatattacccaaataacaacaaatgatttgaataatgaagaggtcagaactgcatatgtggcaatgacaagacccaggaaaatattagtaattggcgttccgattggaacacaagagaatttgcttcggaatagatttccagattggatgattgatcaattaaatattccattacaagattttggctaa

SEQ ID NO: 76022 - DNA, 1875 bp, Tetrasphaera australiensis Ben110
atgctcgttaggcagttggagatcgagaacttccgtggcgtcgcctcggggcaagtgctgttcacacggaacacacttcttgtcggtggcaacaacgtcgggaagtccaccatctgcgagtcgctcgacctagccctcggccccgaacggctcaaccgccggccttccgtcgatgagcatgatttcttcgcctcgaagtacctccgcgaagacggggaaccagtccttatcaaaattcgggtagtgctgaccgaactcagcgatgaggcacttcgccgtttcggcggccatctccgccgctggaacgacgacacatgcaccttcatcgacgagggagtcgacggcgccgatcacgccgacgacgacaacgtcgtctgggcgttgccgatcctcttcagggcacgctacgacccggaggaggacgacttcgaggccgacaccttcttcgaccaccccctcgaggatccggccgatctcgacgaagaggtagccgcctctctcggcgcaggtcgagacaggttcacgcgcacacataagcgactctgcgggttcgtcttcctccgtacactccgcacgggctcacgagccctagggcttcaacgcggctccctcctcgacaccgtgctacgcctgagcaacgagggtgccgcagagatgtggatggacaccctaaagcagatgcgcgaactggaccccgccgtgggggacgtatccgacctggcggagatgcgcaagcagatccgcgaacgactgggggctttcgtcaacctggcgccaggcgcggacgcgaccgccttcttcgcctccgatctgacccgcgaacacctccgggaagtggtgcgcctattcatcgcgaccggaccgagcaaccaccccgtcccgttcacccgacaggggacgggctcgatcaacctgctggtcttcgcactcctgaccatgatcgcccaactcaagggcaacaagactgtggtcttcgccatggaagagccggagatcgcgctgcctccgcacactcaacgacgggtgatccggttcgttcgaaatgagatgggccagactatcgtcacctcccactcgccgtacgtcatcgagcagttcgaccccgaggacatcgtcatgctcggccgcgaatcggacggctcactcatgggcgtccctatcgatcccgctggcgtgaagctgaagagctaccgcagtcagcgccgtcagttctccgaggcgatcctcagtcgggccgtcttggtggtggaggggcagacagaggcatcgatcatgccgattgtttcgtcggtgctcgaggcgagcgggaacgggtacacccatctcgacctcgcgggcgtctcgatcttcaccgcgaacggcgacggagacgtgccacgctgggggccgatctttcgggcgctcgggaagacgccctttgccctctatgaccagcaaacgacgcccttcggcgccgaagcgcaggctgacctgatggcctacgaggagcactgggagtcacctgcaaactcgatcgaagacctcctggtcacccaggtgccggtggcggtcctacggcgcttcctcgacaacgtggttgagcgtggagacttcccggcacatcaggccagctacgacgcgacgaagcccgaagccgagctgccaaccatcgccggcaaagttctgaaggcccgcaagggagatgcctggggatacgccgcaatgctggtcgagcactgccaggaccgtagcgaactgccagctttcctcgtcgatgccttcgaccgcatcaacgagctggttgcccctccgatgattccggaggaagccgcaagggtagagggccatgaagaaggcgcccagggcgacgcggcagccgatccccagccgtcatga

SEQ ID NO: 76023 - DNA, 1719 bp, Tetrasphaera australiensis Ben110
atgaccttccggctctccgatgaggcggcacgcgcccttgagcatgagggctccatcctcgtcaccggcggccccggatctgggaagacgaccctcgcgctgctcaaagccaagcaactgactccgacccttcagccgggccagaagatccttttcctcagcttctcccgcgcggccatgcgccaagtgctgacccggacgaaggacgtgctgaagtacgcagagcgccgggagatcgtagtaatgacttaccacgccttctgcttgggtcttttgaagagccacggacggctgctcactggtaccgcaccgcgaatcctgtttcccggccccgagcggctgacgagagcgaagcacgagggggactggaatcacgaagtactccgcctcgcgaccgaggagggccgctacgccttctcgaccttcgcgggcagtagtgccgtcctgcttcggcgggccgacagtgtccgccgcttgatctccgacgcttacccgatcatcatcctcgacgagtttcaggacaccgatgactcgcagtgggcactggtgcaagaactcgccaaaggcagcctcttgatcaccttggccgaccccgaccagcgcatcttcgagtaccaggacaacattgacccgctccggctgcactacttcagacaggcgctcaagcccgcggagttcgacctcggcggcgacaaccaccgcagcccgaatgccggcatcctgcagttcgccgatgccatcttgaagaacgagtcaccgacccccagcgacgatgtcaaacaggtcacgtactacgcgagcagccgaaatgggatggtccatgcggctgtgatttggatgctgaggcggctgcgcaagcaaggcatcgacgtgccgaccgtcgccgttttggcgcgctccaaccccttcgtggcggatgtgtcgatcgtcctctcaacgccgaacaccttcaagaatagggagttgaagcccgtcgaccaccacgtcgtctgggacgctgagctgaccgcggccgcggcccaagttgtagcctccatccttgagtggccactgcacgacgaggtccatggcgtcgcgatcacccttgacgccgtcgcgcacttctacgacgtgaagtatgccgaaaagcccagcgcctccgcggcatcaagtgcctcggcgttcagatccgccgcagaagccgtgaggggaggacgaacgccgcggatccaagcagcgaagctgctcctggccctccacgtagaggaccccggctacaacggtgacacggcggctgactggtttgtcgcccgtcggatcattgaggccatcccaaagctcagcgaagtcgcgacatcggcacgctttgttcggctcttccgggccaccgatgagatagggggcagactggctgcgcagtgggcttcaaccggcacctacacagacgcccgtacgatcgtccgacgtaccctcgaagtcggccgggtggccgcgaacgagcaggaggccaccggagtagtactcatgacgatgcacaaatcaaagggcaaggagttcgacggggtgatcttggtcgaaggccagtaccgcggcccgttcttcaacacgcgaagcgagccctggccatatgccgccagccgaaggctcctacgcgtcgggatcaccagggcgcggcaccgcgtcatgatcctgaggcccaacggtgcgctgccgctgtaccagccgcaggagatggcctag

SEQ ID NO: 76024 - DNA, 1947 bp, Vibrio nigripulchritudo AM115
atgtatttaagtaatttaaaagctgaaggtttccggtgttttggtaaagagttcaatattcaactaactgatggcttaaacgtgattgttggtgaaaatggagcaggaaaaaccgctgtcataagcgcaattcggcaactatttcatgactctgaatcaggtagatatagcgtaacaagtgatgactttttcagcccgtttgtggctgaaggtaatagcgcagcatctttatctatttgcgctgaatttgatgggctggatgtgaaagataaagtagcctttctaccatgggttggagcttcagatacagctctattaaacttacaagctgaaaacaaggaaatacgtggtcggtttaaaaaagtcatttggggaggtgccgcaaagaactcccaatttgaccctgagctgttggatcttgtccaatgtatttacttgccaccgctaagggatgctgaatcaaagttgtcgaatggtcgtcagtccagactatccaaacttctcaaggctctgaatcgcaagcaactaaaacagtgtagagaagatggggagttacatcctcttgaagcaagcctaaaaaacttcaatgaatccttagctactgatgacaaattgagtattaaggatgcgaataagctcataacagacaacctgacgaaagctatcgggcatcactttgggcaaaaaaccagtattcagtttgcagaaagcgattttaccaaaattgcagaaagtctaactttaatgttctttcctgacttgtctgtagaggatcagtcactgttccgtgaccttagccaaaatagtttgggttataataatctactttacatagcttcaattatggctgagcttacattagatgacgaggacgaagagcaacctttatttaagttactgcttatcgaggaaccagaagcacatttacatccacaattgcaaattaggctgttaaatcacctaaagtcagtagcaaagcaaaacgaaaatgttcaagttattgtaactacacactcaacagttttagcttcttcagttgaatttgagtcgatcattcatttgtcgaaatcaccaactccagtagcgacacccttgcgaagctgcgggttatcggaagcaagcagccagttcatcaaccgttggctcgatgtaacaaagtctaatttactattttctagtggtgtaatccttgtcgaagggattgctgaacaaatgattatcccggctttggcaaaaatagttctaaaagaacagaaagaagggcacaagaatctggaagacttgggaatatcaacgataaaccttaatgggatctactttaagcattttatgcaactatattgcaacgtttcaaagccagatgataccgaaggagcagcttttgttaggagtattccggttaggtgttccggaataactgaccgagatccacccaaaactataaagaaaaaaatacctgaccctgaaaaagacggggaggaaaaagaggtaagcgaagatttccttccttatgaggggaatattcacaatgggactaatcatgctattgatctcgtgagctccatcaacaagtcaactaattcacgtctttatgtaagtaaatacaagacactagaatatgacttagccatggagggtaacaatgcatctttaatgtccgaaattattgcttctctgtggcctgagcctaccaaaagaaaaggtaccgtaattacagaatttacggaaatgtcgaagcaagattggactaaaaagcaaccacatgaggttgctgaagccgctcacaaaatcttgaagaaaattgatgacgacaatattgggaaaggcctctttgcccaagttttgaccgacagaatccagatggatggatatgacttttctgttcctgaatatatcaaaaaagcaattatgtgggcttcatcggtagatatcgaagaggaagagtga

SEQ ID NO: 76025 - DNA, 1758 bp, Vibrio nigripulchritudo AM115
atggaagtagagtttaccgacgaacagcttaaatatgtggattcaagcattgaagagcatactttcttagaggcttgccccggaagtggcaaaacagaagtggttgctgcgaaattagctaaggaagtcagttcttggaagaagagacccggaggtctcgccgcactttcattcgccaacagtgcaactgatgaactaacaatcagggtatctgagtatctgccttttggtcgaagcatgtttcctcattttttaggtacatttgatagctttatctacaaaaacatcgtttcgcctctatcaacagagctgacaaagtatgttggggaaggtggtgattcatctattcgtataatcgagccgacaacacatattggctatcgaactgaatactcatatgccaaaagaggaaacatatacgcaaaccgctactcgcttgacctaaaaaataacaagctgatatttgattcaggtgattctgttttagataaaacgctaggtgctctaacactaactgattggcaggttagagattttattcaaaccaaagatagaatgcttaagggcgggtttgcaacctatagagatatcgagaacttggctttagaagtgctcagaaatgaaaaataccagagcttcgtcaaattgttggttaggcggtacccactgtttattgtagatgaatgtcaggatttatcagaagagcaacttctaatctttcagtctcttgctgataatggggcaaaacttcactttgtaggagatcttcaccaagcaatctatggatttagagatgttgacccagctaaagttaaagattttgtaatggataataactttacccgtttgcaattgacgcgaaattttagaagttgccaaaacatcgttagtatttgtgcgaagctcactggtcgtgggaatataaaaggcaatatgagtaggcttaatccaagatgcttggtacttcagtataataattgccctacggaactaatagaaacctttgaagaaaaatgtaatggtttcaacaatacagtggtcgtatctagagggcattctacactcaataaattccagacttcagtcgacaaaccaactcacattcagaatctgaccctagctattaagctatacaatccacaagatatggaaagactcaatcagtctttattgaaattctcagagtttcttcgtttccatttaaaagaaacctgcaaaccaaacagcttcaattgccctcaatctattacctcaaacctttcttggagaaaatttttaaacaactcattaagttacatgattgataatggtctacagaaggttgacgttcaatggtcaagctgggcaaaggatgcaaaaactttgattcgctctctcccaaagcagagcttttgttctgaagctattacaagcatattaactccattggaaagcataaacttagtttcaccgtctggttctgccaaactcgaagttgcgtcgtcactggctgtgactaacaaaccagcttttcaattttcaaaaagaacgattcatggggcgaaaggagaaactcatggtgccaccatagttatatcatcttctcgctctggaagtggctctcattggaaagattggctcaaagaccctaacagcgaggctgctagatttgcttacgtagcatcatcaaggccaaaagaacttctgatttgggctgtaaaaactctgaagccactagaaagggagcaactagaatcggttggatttactattgcttga

SEQ ID NO: 76026 - DNA, 1710 bp, Vibrio nigripulchritudo BLFn1; identical to SEQ ID NO: 74656

SEQ ID NO: 76027 - DNA, 1482 bp, Vibrio nigripulchritudo BLFn1; identical to SEQ ID NO: 74657

SEQ ID NO: 76028 - DNA, 1710 bp, Vibrio nigripulchritudo ENn2; identical to SEQ ID NO: 74656

SEQ ID NO: 76029 - DNA, 1482 bp, Vibrio nigripulchritudo ENn2; identical to SEQ ID NO: 74657

SEQ ID NO: 76030 - DNA, 1947 bp, Vibrio nigripulchritudo FTn2; identical to SEQ ID NO: 76024

SEQ ID NO: 76031 - DNA, 1758 bp, Vibrio nigripulchritudo FTn2; identical to SEQ ID NO: 76025

SEQ ID NO: 76032 - DNA, 1947 bp, Vibrio nigripulchritudo Pon4
atgtatttaagtaatttaaaagctgaaggtttccggtgttttggtaaagagttcaatattcaactaactgatggcttaaacgtgattgttggtgaaaatggagcaggaaaaaccgctgtcataagcgcaattcggcaactatttcatgactctgaatcaggtagatatagcgtaacaagtgatgactttttcagcccgtttgtggctgaaggtaatagcgcagcatctttatctatttgcgctgaatttgatgggctggatgtgaaagataaagtagcctttctaccatgggttggagcttcagatacagctctattaaacttacaagctgaaaacaaggaaatacgtggtcggtttaaaaaagtcatttggggaggtgccgcaaagagctcccaatttgaccctgagctgttggatcttgtccaatgtatttacttgccaccgctaagggatgctgaatcaaagttgtcgaatggtcgtcagtccagactatccaaacttctcaaggctctgaatcgcaagcaactaaaacagtgtagagaagatggggagttacatcctcttgaagcaagcctaaaaaacttcaatgaatccttagctactgatgacaaattgagtattaaggatgcgaataagctcataacagacaacctgacgaaagctatcgggcatcactttgggcaaaaaaccagtattcagtttgcagaaagcgattttaccaaaattgcagaaagtctaactttaatgttctttcctgacttgtctgtagaggatcagtcactgttccgtgaccttagccaaaatagtttgggttataataatctactttacatagcttcaattatggctgagcttacattagatgacgaggacgaagagcaacctttatttaagttactgcttatcgaggaaccagaagcacatttacatccacaattgcaaattaggctgttaaatcacctaaagtcagtagcaaagcaaaacgaaaatgttcaagttattgtaactacacactcaacagttttagcttcttcagttgaatttgagtcgatcattcatttgtcgaaatcaccaactccagtagcgacacccttgcgaagctgcgggttatcggaagcaagcagccagttcatcaaccgttggctcgatgtaacaaagtctaatttactattttctagtggtgtaatccttgtcgaagggattgctgaacaaatgattatcccggctttggcaaaaatagttctaaaagaacagaaagaagggcacaagaatctggaagacttgggaatatcaacgataaaccttaatgggatctactttaagcattttatgcaactatattgcaacgtttcaaagccagatgataccgaaggagcagcttttgttaggagtattccggttaggtgttccggaataactgaccgagatccacccaaaactataaagaaaaaaatacctgaccctgaaaaagacggggaggaaaaagaggtaagcgaagatttccttccttatgaggggaatattcacaatgggactaatcatgctattgatctcgtgagctccatcaacaagtcaactaattcacgtctttatgtaagtaaatacaagacactagaatatgacttagccatggagggtaacaatgcatctttaatgtccgaaattattgcttctctgtggcctgagcctaccaaaagaaaaggtaccgtaattacagaatttacggaaatgtcgaagcaagattggactaaaaagcaaccacatgaggttgctgaagccgctcacaaaatcttgaagaaaattgatgacgacaatattgggaaaggcctctttgcccaagttttgaccgacagaatccagatggatggatatgacttttctgttcctgaatatatcaaaaaagcaattatgtgggcttcatcggtagatatcgaagaggaagagtga

SEQ ID NO: 76033 - DNA, 1758 bp, Vibrio nigripulchritudo Pon4; identical to SEQ ID NO: 76025

SEQ ID NO: 76034 - DNA, 1710 bp, Vibrio nigripulchritudo SFn27; identical to SEQ ID NO: 74656

SEQ ID NO: 76035 - DNA, 1476 bp, Vibrio nigripulchritudo SFn27
atgattgaagttcaaatagcaggagcaggtgcaggtaagacttatggtctagcgaagaagatcatcgcacactacgacctaaagtcgcataaaaagatttttgccatcacttatactaacagtgccgcgaagaacatctcacaagcgattatcaaacacctaggatacctgccagaaaatatcatggtttgcacagttcatacgtttctattgaatgagatcatttacccttactctccattcgtactaaatgagaagcatactacctcctcacgctgcaaaacgttctcaaactttcctcctgggaagactgaagaacaaaagaaacgagaaacggcgagtaccatcagtagactaaagaagagtggtgttatacacgttgacgaaacctatgccgctgcatggagagttgtcgatgaaaactactcaaaacacagcagccagaagaaaaagtctaaagttaggaaagttcacaatatcctaagtagcgctattgataagattttcctcgacgaagctcaggatcttgatgaaactgctctcaaagcctttcaaaaaatcggtgagctttcagttgacatctacatggtgggcgaccctaaacaagcaatagattatccaaaatctttcaaaggctggctagctgcgaacaaagccaacgaaaaagttaaagtgcttccgaatataaagacttctcgtagggttcctcagagaattcttgatatctcaaataacttctgccccagaggtcaagcgcaaactagcttgtctgaagttgaaggacacctaacatacataacttctgaagatgagcattacgaccaaattctctgtcatcatattaagaatggaagcttagttagcatattcagaaaagaaggtaattactcaaccaagaaagcgggatctctccccgagtttgacccagaggtagaagggctacttacagtgaagtttcctgaatacgaagaaggtgtggtcatatactcattgcagcgctattttgcatccttgttatccaacaatgacaataagacatcaatacgtatatttcttaataagctagagattccgtacgaaaaagaactattcaagaagctttgccgatcagcagaacaatacgattcatccaaagataattcagccaagtacgcaatcagtagcatccaaataaccaagggcttagagtctaaggtgtgtgttttgatcttaactccagcgattttcaagtacttaatgcaagatggcgttgaaaaattcaacaaaacttggaatatggtctatgtcgcgttgactcgtgctcaatctgaactagttgttgctgtagatatggatttacttggtaaaaaatataagcatgatgatattgttgagggtcttaaatctattgggtttgaagagctaaacccaaatcatccaaaccacaaaaccgaagagaaattcggaagcataatatcgaccaaagataattactga

SEQ ID NO: 76036 - DNA, 1710 bp, Vibrio nigripulchritudo SFn135; identical to SEQ ID NO: 74656

SEQ ID NO: 76037 - DNA, 1476 bp, Vibrio nigripulchritudo SFn135; identical to SEQ ID NO: 76035

SEQ ID NO: 76038 - DNA, 1794 bp, Sinorhizobium meliloti RU11/001; identical to SEQ ID NO: 72414

SEQ ID NO: 76039 - DNA, 1824 bp, Sinorhizobium meliloti RU11/001; identical to SEQ ID NO: 72415

SEQ ID NO: 76040 - DNA, 1914 bp, Sinorhizobium meliloti RU11/001
gtgcagataaagcgtatcaaaatatccaacttccgctctattcaacgtgcggacatagaattgggccctgttacagtcctgatcgggaccaataacgccgggaaatcggctatactggaagcgatccgtattgcgcttacccggcgctgggggcagcgtggcaccggttttacagaatacgatgtccatttgtgtgatggcaggcccgatcccaaggtgggggacccggttgtcatagaagtggaacttcaggaaggcgtggccaacgagtggccggaagatctccagggcgagctggaggacatcatccaactcgatccggtctctggcaaagcgtcgatcatcatgcgggtcagttgctcttgggatgcagcagaggaaagttttgtgcctcgatgggaattcctgaacgtcgacaggaaccccctagcgggccgtggcgccagggcggttaaccttcaggaattcttccagttccttcctgtgttctatctcgaggcgcttcgggatgtctcggacgaattctcatcacgaagccagttctgggggaagttgctgaggaccgtacagatacctgagaccatcgagcaaaagtccaaacgcatctttgatttgctgaaccggcgcctccttgacgccgatccgcttctcgccaaccttgcgactggcctgtcgcacattagccgcgtcgcggcggccgacgttcccggccaggcagacctacgccttctgcctctgaacacatgggacatcctttccaaggccgaagtcatttaccagacggagggcggcaagccctggctgccgctggctagacatggccaaggggttcagagtctatcggtgatgttcctgttcaaagcctttgtcgagctcatactgagcgacctttatcgccccgaaagttctgccgttcttgcgttggaagagccggaaacacatctgcaccctcaggcggctcgcagcctgtggcgtcacatcagtgagcttcccggccagaagatcgtcacgacgcattcgccatacttcctccagcacgttccttttcgtgacatccgcgtggtgcgggttgaggccaacggcacaacagtaagctccttgccgcgcgagtttcgcgctgcggtgccgtacattccggcgctcgaaccgattatcgccgcatcgggcggcttgattacctacgaccgcggcctcaacgagctggtgctctccggcatcttgcctcagaatcagtatcaacagctcatcctcgcctatggcggccggccggatacagtggctcttcacgcggcgctgcgccaagtgtgcgatgcgtccaaggagttcgtttcagatgctgagctagaccagctggagactttcgcacgacgcattcgcggtgaaatctttttcgcgcgacggtggctcttggtcgaagggcagtcagactaccatctggtccacggcatcgccaaaggcctggactatgatcttgacgaaaacggtgtttccgtcatcgacttccagaattgtggcaatcccgaaattttcgctgttcttgcgcgcgccctgcattatccgtggctgatcgtcgtggatggagacgccgccggtcagggatatctcgcaaagattgccagtcgaagcttctctcagcaggaaatggagagacgcgcattttcgctgccggcgggctaccttgagcagcagctcgtggcagacggacttcaggcagagctgaaggccatcctcgtctcgctcggcaatgctgccgctgcaaatcttgacgatgccgcgttgattacaacactcaagaaagacaagagcggctatgctgccgtgcttgcgaaacagtgcgccgaaaatcctgcgctggcccaacgcatgccggcaccgttccgtaacgcaatcctgtctctgagaggcctgacatga

SEQ ID NO: 76041 - DNA, 1917 bp, Sinorhizobium meliloti RU11/001
atgaccgaatccgccctcagcgtcgcgctgtccgagttaactgacgcacaggccgtcgccgtcgaatggcgcgacgggcctatgtttgttctggccggccccggttcaggcaaaacacgcgtcctgaccacgcgtgtcgccaaattgcttgccgacacgcccgaccgatcgttccgggttctcgctttgactttcaccaacaaggccgcggacgaaatgtcagctagggtaactgccctcgtgccggaacaggagcgacgggcgctgatcggaacgtttcattccttctgcatgcagatgctgcagcagcatggctcacatattgggatcaatcccgatttcgcgatctactccctcgatgttgatcgtcaggaaatcctgcgtgatgctatcaagcgggcgggattggacgccgacgatatccggcttctctcgactatcgataagctgaagtcccagctcgtccagcccaagggatctgcgcgacattttcgcaacccgtccgacggcgcgcgcgttgagcaagtctacgcggcctacgaggctgctctcactcaagccaatgccctggatttcggctcactcatcgcccaggcccatcggctcgtcacaagttttcccggtatagccgcacgttatagaaagacctacgcctactggatgttcgatgaattccaggacacgactgacggacagtatgagctgatccgcgcactggccggcaatgaatttacgaatatatttgccgtcgccgacgatgaccagatcatctatcagtggaacggcgcaagctaccagcagatccagcgtttcagaaccgatttttcgccccaggagctgcagcttcccacgaactacagatgcccccctgcgatcgtggcggcagctaaccacctcgtcgtccacaacgtgcagcgaaccgccgccaaacgaccgctcgaggcgggcaagacatcgctccgatatcccaatgagcagcacatccgcgttctgcgttactccactgacgaggtcgaagccgcgtcgatcgccgatggcatctccaaaatggatcgtagccgctggggggaagtcgccgttctggcgcgaacacgttacttgctcgaaaagcttcaggctgctttgacacaaaaacaggtggccgcggtcatttcccaacgccgcgacgacttcagatccccgcagttcttgtggttggccgcagtgctgcggcaggctcttcggcctctcgatcgacgcgctctagaaattctgacaggagccttcaatcgctggttcggtaccgatacgagggccgatctgataatcaccgcttcagaacttactgaacgctccttccttgacgaatggaccgtagcggtgaaagccgcttcgggccctaaccctaatgctgccgaactcgcagatctcgctgcgaaattcggaaaagaacccacgcggttcaagcccttcattgaagctgttctcgccaaaattccagctcaggacgacgaatccagcgatattgcagaagaccgggctgcctggttcgatctggcccgaaacatcagcaagactatcggtcgacatgccccgctggaacagttccttcaggaactcgctatccgttcaaaggaggccccagtcggaaataatacggttaccctcatgacgatacacggcgccaaggggaaggaattcgaccatgtctatgtcgtcggcctcgccgaggatatactcccgagctttcagagcctgaaagccggagagaacagcgcggagatggaagaagagcggcggaactgcttcgtcgccatcacccgggcgcgcgaatggctttgtctttcatacgctgactcttatcggggttgggcgaaacagccgtcccggttcctgagggagatgggcttcatcctacctgaccaaccaatgcaatga

SEQ ID NO: 76042 - DNA, 1647 bp, Afipia felis
atgcgcctcagcaaactcagtatacggaatttcaggaatttccggtcggtcgacgttccgctttccggcgacgtcgtgctgctgggcgagaacagggtcggcaagagcaatctgctcttcgcgattcgccttatcctcgacccgacgctcccagattcggcgcggcagctgaagctttccgatttctgggatggcgcgccgccggatttcagcgaggcgatcgaggtccatctggagatctccgatttcaccagcgaccttggccttctcgcacttctcaccgattttcggacggcgcttgatccgacgatcgcgcggttgagctacgtcttccggaagaaagccgacgttaccggcgtgccgcaatcgagcgaggactgcgaattcatcgtcttcggcggcggcgacgaagcccgtcccgtgccggccaaggtccggaggcgcatcgcaatcgacgtgctcgacgcgttgcgcgatgcggaggggcaactcggctcatggcgcagctcgccactgcgtcatctcctcgaggaggcaatcgccggcatcggccgtgccgacctggacgccgttgcggccgaactcgacaaagcgacgaagacgctggagggctttgcgaccgtcaaggcgctggaagacgagctgcgagccggcatcctgcatctctcgggcaaggcccacgatatcgacgcccggctgaggttcgcgccatccgacccgctccggctcttccgggcgatcgcgatgttcatcgatggcggcaagcgcggcattgcggaggccagtctgggctcggccaatgtggcgttactcgcgctgaagctggcggagttcacctggcgtaggaaaaagaacgagcggaacttctcgctactgtgcatcgaggagcccgaggcacatctccacccgcagctgcaaaggtccgtcttcaagaagttgcttggcggcggggatgcggcgcaagcgctgatcgtcaccagccactcgccaactctggcggccgtcacgcctttgcgatcaatcattcggttaaaaatgcaagagggttcgacccaggcgtactcgcttgccaatctgccggtgacatctgatgagctggatgacgtggagacctatctcgacgccacgcgcgccgagctgctgttcgcccgcggcgtcatcttcgtcgagggcgatgcggaagaggcgctggtccccgtcttctcgtcggccgccggccacaacctcgacgatctcggaatcacagtctgcaacgtggccggcacgaatttcggcccctatgtgaagcacgccgaggcgctcggcatgccatacgcggtaatcaccgactgggatccgctggatgggacgaaaccgccgttggggcggaaacgcaccatcgacctgtgggccgcgatgctgcaggtccggggcaagccgcctttgacgccggcgcagcatatggagtggaatgtcaagccttatccggaattcgccacgacggcagcaggctccggcatcttcctcaacgaccagacgttcgaagtctcggtcgccaacacacccgccttgctcgtcccattgctcgacatcctcggcgatcaagggttcggttcgatccgcaccaagcgcatcgcgaactggcgcgccggcgccgcgcccggttga

SEQ ID NO: 76043 - DNA, 1890 bp, Afipia felis
atggtggctgacatcggcaaggggcgattgagcgccaagctctcgaaaaaaaggccgtcggccttggtgcgccaaaatacatttccgacgcgatcgcgttcgtggtgggccgtgtccagtagcctcccgctccttcgcgccatcgacgagctcagcgcgaaccctgagcagctagccgccgtgcgggagaccggtcattgcgtcgtgctggccggcccgggcagcggcaagaccaagacgctgaccacggcgatggcgcgcgcgcttgcggaagacgtggttgatccgcgcggtgttgcctgtatcacctataacaacgagtgcgcaatcgagctggagacgcggcttgcccgcttgggcgtcgccgctggcgatcgcgcttttatcggaaccgtgcatggctttgcgctgagccaggtgatcgcgccgtatgcgcgatgtgtggcggttgaattgcctgccgatttcagggtcgcgacccgcacggaatcgcgcgcggcagtcgagatcgcgtacgctgcggtgatcggcggctccgacgatccgcatcgtcgatggggctttgcatcggagaagcgacgccgcgatgtcgatcgcacccagccggcgtggcagggccggaatccggaactcgcggccttcgtcgaggcctatgaaagcgagcttcgcaagcagggcttgatagatttcgatgacatgccgcttcttgcctaccgcatgatcaaggagcacacctggatcagggaagcgctccgcgcccgctttcccgtgttgttcgtcgacgagtatcaggatctcggtcacgcattgcatgagcttgtcctgttgttgtgctttggcggcggcatccgcttgttcgccgtcggcgacgccgaccaatcgatctacggcttcacgggtgcgaatccggaactgctggaaagtctgacccggcgcggcgacgttcggacgattcgattgcgttttaactatcggtcggggaggagaatcgtgcgggcgtcccttggagccctcggagaggagagggactatcgtgaggtggcgggcgcgccggaaggcgagctcacattctggtcggtgccccttgggctcgacatgcaagcgcaggcggttgctgccacggtgattccgaaactggtcgagaagggcatcgcgctcgatgaggtcgccgtgctctatcgggcggcctatctcggcgacaagatcgccctcgcattgaagcgagcgggcatcccttacgtccgcacagatggaaatgccatcgttaggcgcagttcacgactcgcacgccttatcgaagactgcgcccgttgggttgaagggggctggcgcaacgccgagccgcgattcgggcgcttgctcgaccagggggtcgcgctcgtttacggaagacatgcgactgaagaggaggagcagcgtttgtccgaccggctcatgggcttcctgcaggcgacgatcggcttcgatggcagtacacatgagtggctgcagcgctttgatcacgaactgatcgccggctggcggacgacttcgcgaaacgcggagcaggagtgggacgtctgccgcaagatgattaccaacaccgaccccgccgccgacctggatattccgcttccgcattttgcgggccgggtcgagggcaccggtcgcgtcagcctgagcacgctccatagcgcgaagggcagggaattcgacgcggtcgtcatgtatggcgttaatgccggcgactttcccagcgaccgcgacaagagaagcgcgaccggtctgcgcgaagcgcgccgcctcttctatgtcggcgtcacgcgcccacgaaaagagctgagtctgatctttcaagagcatcaccattcgccttgggtgaaagagcttttcgacagaagccaggcttga

SEQ ID NO: 76044 - DNA, 2133 bp, Yersinia similis; identical to SEQ ID NO: 74274

SEQ ID NO: 76045 - DNA, 1797 bp, Yersinia similis; identical to SEQ ID NO: 74275

SEQ ID NO: 76046 - DNA, 1932 bp, Pseudomonas putida
atgaagctttgcagtctacggatcagcggttttcagtcgtttggacaggacatcactgacataaccttcgacggcgttacatatctcctagggccaaacggtgccgggaagactgcgacgttgcaggcattggcacgcatgtttggtttcgagcctggccttcgtcgcctgcgtcgatcagatttccatgtccctttgaacgagcaggaggtacccgctcagcgctcgctctggattgaggcggacttcacattcgacgaaacgctcgatgatgccgaagacgacacagtgccgccgttcttcacgcaaatgaccttgcaaacggctgacggggttccccgtattcgatatcgcttggaaggtattctccaccctgatggcgaggtagaggagcgtttacattacgtgacccggatggacgagcatgggcaacctacgacgctcaagcccgtggcgaagcgtgaacgagacgagatacatgttcattacctacctgctcgccgggatcccgctgatcatattgcctttggtgccagcgcccttctaggccgcctccttcgagccgtcaactggagtgatgaccgggactcaatcaagcagctcactgagcaaatcactgagtgcttgtcggagaacgagtcaatcaagaccttgagcgctggcctcagcggcgcatggcaacgtcttcacaaaggcgatttcttcgcgaatccatcccttaccttcgcgaactctgaaattgaggcaatcctgcggcacctctcgatttccttcacgcctggccatggtgaaagcaacgtggactacgcgaggttgagcgatggtcagaaatcaatgctgtacctctcgctcgttcttacatccctgaccataggccgcgaggtcagatcaggacagaacacttcgttcgaccccctcaaactgaagcctgctgcctatacgattctggcagtcgaagaacccgagaacagcctgtctccccattacctggggcgtatcgtgagctctctgaaatcatccgtgggcgtggacgcgcaagcattgatcgccacgcaggccccgtcgatgctcagacgagttgagcctgaccagatcaggtatctgcgtctgaattcaaagcgagaaacggatgtgtcgaccatcgtgcttccagacaagcacagcgacgcctacaagttcgttcgagaagccgtccaggcatttcccgagctctacttcgcacgcttggtggtacttggtgagggggatagtgaagaaatcgtgctacctcgaatccttcaagctaagggagctcccgttgacgaatacgcagtggcgatcgctccactaggggggcgccatgtcaatcacttctggcggctgctgaacgcgctgggtacacctcatatgaccctgctcgacctagacgtggggcgccatcaaggtggctgggggcgtgtgaactatgttcgtactcagcttgatgtattcgaccctacacgtagcatcccggatcactggacgcgccactcttgggatgatgctgagcgacctattcgaacacaccactggttcgacaatggcaacgaaacccagagcagcttgttccaggagttagaaagcagagatgtatttttctcggatccactggatctggatttcgcgatgctcaaagcgtttcccgatgcttttggtgccgagctttcagcccctacaccgcacgatcacgtaaccgtccttggcaagagccatttcaacccggggcagtacaatgctgaggaacagcaactcttcgcggcctaccacaagctgttcaagctcagcagtaaacctgcagctcacctggatgccttgggcaatctcactgacacggagctgctggcctcactaccaccatccctcaatcggctagcagaccgggtcaaagccaagcttgaggaatctcccgagtga

SEQ ID NO: 76047 - DNA, 1659 bp, Pseudomonas putida; identical to SEQ ID NO: 71685

SEQ ID NO: 76048 - DNA, 1917 bp, Acinetobacter baumannii; identical to SEQ ID NO: 74264

SEQ ID NO: 76049 - DNA, 1764 bp, Acinetobacter baumannii; identical to SEQ ID NO: 73253

SEQ ID NO: 76050 - DNA, 1698 bp, Acinetobacter baumannii; identical to SEQ ID NO: 75262

SEQ ID NO: 76051 - DNA, 1626 bp, Acinetobacter baumannii; identical to SEQ ID NO: 75263

SEQ ID NO: 76052 - DNA, 1698 bp, Acinetobacter baumannii
gtgaaaatctcaagtgtaagtttaaaaggttttcgtaattttaaagatagtattatcaaatttaatggtgatacattaatcattggagccaatgatgttggtaaaagtaatctacttcatgctttaagactcttattagataaaactttatctgactcagacattgaaccaacagagttagacttttatatctcaccttgtgaggctatgaatattctagaaataacaatttgctttgaagatatacaagaagatgctgttttatctattttaaaaggaaatgttagtagtgaagctaaaactttcttacgatatcaggctgttaaaaataatttaagttatcaaattttaataggaccttctttagaaaatcttgagctaataaacagccgtttttatttgaaatatgtcaatttaaaatatattcaatcccaaagggacttacagcgatttattcaaaaagaaaaacgtaagttacttaaactatctcaatcaaatttaaccgaaagtcaaagagaagaagacacggatttgttaaatgaaattggttttgacttaaaagaaataaatgaaaaaataacccaattatattatgtagatcatgcaactaaagaagtaaatgaagaactgaagaaattagcatatcatcattcggaatattcagttcaattggattctggagctattcaagttagtgactttatagacaatcttcaattgggtgcaaatgtacatggttcaaatattcttcttggaggggatggtagaaataatcaaattttattagctctctggaaagcaaaaagtattgcagaacatgatattaatcatgaagttgttttttatgctgtagaagaaccagaggctcatttacatccccatcaacaacgtaaattagctaactatttaatagaagaattaccaggtcaagctataatctcttcgcattcacctcatatagcatcacattttttacccgattcaattattcgtttattagtaaaaaattatagtacagtggctgctagcggaggatgctcagactgtatttctgaatgttgggatgaaatgggataccgtataagtataattccagcagaaagttttttctctaatggtgttttcttagttgaaggtccttcagaagttcttttgtatactgctttagccaaagctttagaaatagatttagattactataatatttctatcttatctgttgatggtattgcttttgaagtatatacaaatattctaaatgctttagaaattccttgggtaatgcgaactgataatgatgtgtctaaagtaccaagaaagaacgaatggcaatatgcggggatcaatcgctgcttaagagcaataggattagcagaatggccacacagtacaattagtattaatcatatagatgttataaatgataaaagatggaattcttttcatgcttcaataagagataaaggagtatttatctcaaacgttgatttagaaacagatttaataaattcattagaagcaagcattcttcctattttagataaagataataaacaagatgcaataaaatttatgcaacaaaaaaaagcaatacgaatgtctaatcttttaaaacaaattaaagaaaagttaattgacttagagaatgataatttaacagagcctttaaaatacttaaaatcattaataattggataa

SEQ ID NO: 76053 - DNA, 1626 bp, Acinetobacter baumannii; identical to SEQ ID NO: 75263

SEQ ID NO: 76054 - DNA, 1959 bp, Clostridium sp. 1_1_41A1FAA; identical to SEQ ID NO: 73532

SEQ ID NO: 76055 - DNA, 1335 bp, Clostridium sp. 1_1_41A1FAA
ttgaaaaatagtaaaaagagtcaagaaattttagaaaaattattagatgataatgaaaagagattggatgacttaaaaaaattaaaatgtaaattctttaaaaaaggattttatttatatgaagatattgaatttcttgtgtatatattactactgaaaaatagggatatagctaagtttatagctaaccgatttccaattattttaatagatgaatgtcaggatttatcttatatacaattaaagataattggattacttaataaacaaggttgtaaaattcatttaattggggatttaaatcaatctatctataagtttagaaatatagatccacaggatacattaaactttataaataaattagattttaaacaaatgaatttgaatcagaattatagaagttgtcaagaaatcgtagatatatcacaggttataataaatgaggatgatgatgtacaggcaatttcaaaaaaggtagttgagaaaccattattagctatattgtatgaaaaggataaagaaatagatgtatataataaatttaaagatttgataagagataatggtttagatttaaataaaagtaggataattgttagaaacaatacactaaaatataaactattaggtctgaaaaaacaagagggcaataataatagattagaaactttggctagagctatgtatatgtggaagaatgttaataatataagtgaatttagaatgacttttaatttatttgcaaaatcagtgcaatctatatatttttctggaattgagcataagggagaaaaatttttctataagccgtgtgaattagatatggacgaatggaaagggttagttaataaaataaaacaaaggcttttattgtatgataatttattagatttttcactgacatgggaaaagtggaaaaaagaattaaaaaaaattatagacgatgatataaatagtatttcagaattggagaatagagaatatgatttaggaagaataagatcaggaaataaaaataaaacactagaggaaatattatcagataaggaatctaatattatagattgtaaaatagaaactatacatagctgtaaaggaatgagtttagattcagtattatttatgtcttcatataaaaagtctaataatcaagattcagggacattttggagggaatggtttgatttagaatatataggtgagaagaatagactcgcatatgttgctttttcgagggcaagacatttacttgtattggggatacctaaatcaagtaaatttactgataaagacaaagagactttaattaattttggatttaaagttatttaa

SEQ ID NO: 76056 - DNA, 2058 bp, Clostridium bolteae WAL-14578; identical to SEQ ID NO: 72028

SEQ ID NO: 76057 - DNA, 1908 bp, Clostridium bolteae WAL-14578; identical to SEQ ID NO: 73309

SEQ ID NO: 76058 - DNA, 1950 bp, Sphingobium yanoikuyae; identical to SEQ ID NO: 74828

SEQ ID NO: 76059 - DNA, 1650 bp, Sphingobium yanoikuyae; identical to SEQ ID NO: 74829

SEQ ID NO: 76060 - DNA, 1824 bp, Salmonella enterica subsp. enterica serovar Typhi
atgaatattctgatagataaagtacgtatatctgggtttagaggaatatcaaatattgagataactctcccaagagtaactgttttattgggacaaaataatgcagggaaaacatcagtaataaaagcaatgcagttagcaatgggagactattcgcgttacttatcggatgaagattttcatataggtgaagatgaaaaacggcaagaggctatcactgtagatcttcgttttatagctgttgatggtgagactaggattaaagagttttcagaaaactggcagcaagtgtttggcgagaaaattcagtcagagcctgatggaagccaatttgtatgtatacgaactactgcaaaaccagatcgagtgaagggggggtacgttgttgagcggtttcatttggatatttggccagaacgtatgaactggcaagatgctagggttaataataagaatagattaggtaagcgattggagtttgtaccttttattccgattgatgcgcaaagagatatacatagtgaattgaaagagaaatcctcattcgtggggcgtgtgctatcaagtgttgagtatgacgataaagatgttgctgagctggaaaggatggtggctgaaataaataaagaagctatcgagaagagcgaaccactcaagcgtttgaaaaatcacctagataatttaaaccaatcatttgaaggttcagggcaaacagagcttaccccgtttccgaagaagatacgagatctgtcaaagagatttagtgttaattttggtgaatctgataagagttcgttttcgatggaatatcatggtatggggacacgtagttgggcatctatgttgacagtaaaagcctttactgaactcttagttaaaaatcacgaagaagaggcagaaccgtttttcccaataatggccgcagaggaaccagaggcacatttgcaccctaatgcacagaggactctatatagacagctcgtggatgctccagggcaagtgattatcagtacacactcaccttatattgctggtttggcagagttgcatgaaattagattcctaagtaagcaagggaattcggtatgtgtatatcagttaagggataaatttgatggtgatgatctaagaaaattaaggagagaagttgttcactctcgtggtgagttattgttttcaaaagcaatagtattatcagaaggagaaactgaagagcaagccttacctgaactttttgaagcctataccggaaaacatcccttctcgcttggtataaacttcgtaggagttaatggttccggagcgaaatatcgtccatttcttattttggcgaaagatttcaatatacctgtattcatatttagtgatggtgaagaacagacagttaaagatcttaaaaagaactatgaaaaagtgtttggggttactgatataatgaatgcagctaacatcaccatacttgaagggactgattttgagggctatttgttaagtcaaggtttcgatcagttgattgaaaagactatacatgaaatcgacggtgatgatgcaatcgataagtggattgaaaaaaagaatggaacatcgttaaagcggattcgaactgataagccaaactgtggcacttgtaatcaaccaatctttgaagatgtgctgaggaattacattggtgatgatggacgagttcgtgcaatcctcgaaatccttgattcaagtaagccgctttatgcaaaagcaatcacagataatttgattaaattaccgaaagaaaaatttcctcagaagataattgaattattcaaacaaattgagtcgggagtttga

SEQ ID NO: 76061 - DNA, 1893 bp, Salmonella enterica subsp. enterica serovar Typhi; identical to SEQ ID NO: 74431

SEQ ID NO: 76062 - DNA, 1824 bp, Salmonella enterica subsp. enterica serovar Typhi
atgaatattctgatagataaagtgcgtatatctgggtttagaggaatatcaaatattgagataactctcccaagagtaactgttttattgggacaaaataatgcagggaaaacatcagtaataaaagcaatgcagttagcaatgggagactattcgcgttacttatcggatgaagattttcatataggtgaagatgaaaaacggcaagaggctatcactgtagatcttcgttttatagctgttgatggtgagactaggattaaagagttttcagaaaactggcagcaagtgtttggcgagaaaattcagtcagagcctgatggaagccaatttgtatgtatacgaactactgcaaaaccagatcgagtgaagggggggtacgttgttgagcggtttcatttggatatttggccagaacgtatgaactggcaagatgctagggttaataataagaatagattaggtaagcgattggagtttgtaccttttattccgattgatgcgcaaagagatatacatagtgaattgaaagagaaatcctcattcgtggggcgtgtgctatcaagtgttgagtatgacgataaagatgttgctgagctggaaaggatggtggctgaaataaataaagaagctatcgagaagagcgaaccactcaagcgtttgaaaaatcacctagataatttaaaccaatcatttgaaggttcagggcaaacagagcttaccccgtttccgaagaagatacgagatctgtcaaagagatttagtgttaattttggtgaatctgataagagttcgttttcgatggaatatcatggtatggggacacgtagttgggcatctatgttgacagtaaaagcctttactgaactcttagttaaaaatcacgaagaagaggcagaaccgtttttcccaataatggccgcagaggaaccagaggcacatttgcaccctaatgcacagaggactctatatagacagctcgtggatgctccagggcaagtgattatcagtacacactcaccttatattgctggtttggcagagttgcatgaaattagattcctaagtaagcaagagaattcggtatgtgtatatcagttaagggataaatttgatggtgatgatctaagaaaattaaggagagaagttgttcactctcgtggtgagttattgttttcaaaagcaatagtattatcagaaggagaaactgaagagcaagccttacctgaactttttgaagcctataccggaaaacatcccttctcgcttggtataaacttcgtaggagttaatggttccggagcgaaatatcgtccatttcttattttggcgaaagatttcaatatacctgtattcatatttagtgatggtgaagaacagacagttaaagatcttaaaaagaactatgaaaaagtgtttggggttactgatataatgaatgcagctaacatcaccatacttgaagggactgattttgagggctatttgttaagtcaaggtttcgatcagttgattgaaaagactatacatgaaatcgacggtgatgatgcaatcgataagtggattgaaaaaaagaatggaacatcgttaaagcggattcgaactgataagccaaactgtggcacttgtaatcaaccaatctttgaagatgtgctgaggaattacattggtgatgatggacgagttcgtgcaatcctcgaaatccttgattcaagtaagccgctttatgcaaaagcaatcacagataatttgattaaattaccgaaagaaaaatttcctcagaagataattgaattattcaaacaaattgagtcgggagtttga

SEQ ID NO: 76063 - DNA, 1893 bp, Salmonella enterica subsp. enterica serovar Typhi; identical to SEQ ID NO: 71787

SEQ ID NO: 76064 - DNA, 1824 bp, Salmonella enterica subsp. enterica serovar Typhi; identical to SEQ ID NO: 76060

SEQ ID NO: 76065 - DNA, 1893 bp, Salmonella enterica subsp. enterica serovar Typhi; identical to SEQ ID NO: 74431

SEQ ID NO: 76066 - DNA, 1758 bp, Streptococcus pneumoniae
atggaatttaaaaaactagtaattgaaaattttcgtaattttagttctattgaggttgctttatcaaataaaaatgttatatttggaatgaatgattcagggaaaacaaaccttctatttgcaataagatacctcttggacagaactatacgaaataaaggttttattaaatcggattatcatagacatgatactagtagacctataaaaatacaacttgagcttgatttgtctgatagaaaaatggagggggatgaagaatcactaaaatcttcacattctcgtcttctaatttcaacggtagctggagcaagaaataactctagcttagatacattctttatctcattagaagcagtttataatgagaaagagttatttggaaatccggtattaagctggggctcaacactagataatttagtggaagttcctcaatatggtacaagaagtgacattgataaaatattccaaatagtttatgtaaatcccgctatagagttagattccttttttaagcgaaatagaaggatattgttctctgatgattctaaaactgatgaggatgtaaagcttgaggaagagattgagaataacattgaaaaattaaatgaaaatatttctaacttacatttgattactagtgttcaatcacagttgactgaagcctataaaagttatcgtaaagaaaatttagaaattaaaattcgatcagagatatctatttcaggatatttagacaatctcacaccatacattaactggaatgatgatactcacaattatccgacgtcaggagacggtcgtaaaaagcttttatcatatgctattaaccatttaatttcagagaaacaatacaacaagaaggtaattatttatttaattgaggagccagagaatagcttacatcgttccgttcaaatctctctttcaaagcaactttttgttcagaatatttatgaatacttttttctaacgactcattcagcagaagttctttatgaaatggataatactcagctcattaagataaccaatcaacaagatgcaacagggcaatcagtctattacacagttcctaatgaattttcaaacttaaagaaaaaattaaataaatcgttggctcagtcaatcttttatgataggattcttttggtcgaaggtccatcagaatattatctattttctgctatttttgaatatgtaagtcccaatttcgaggctgatggaaaatacttattacaagttgatggaataaattttaaaccttattcagagctatataaggcattagggattgatttttggattaaaactgataatgatttaaaagctagtcgtggagataaacatgtattttctcctattggcttaaataggtgtattgacttgcttgatcatagtgcgactcctatattagataattatcgtatagatttctcttcaaaagatgagagaaaacagaatataaagtctaaaaaagaagaattatatttgactaatcataatctagtattacaattaaatgcagatggaatctttatatcggaaattgatttagaaaatgatttagctcaggttttatccgatagcgagagaaatgaaatgagtaaattagattttgtgaattggttacaaagcagtaaacaatacaatatgctagaatatataagtaatcatcttactaaagagattgcgcttaagattgtggaatcaggatattttaaagttttggcggagtttttagactatgagtga

SEQ ID NO: 76067 - DNA, 1539 bp, Streptococcus pneumoniae; identical to SEQ ID NO: 72173

SEQ ID NO: 76068 - DNA, 2070 bp, Streptococcus pneumoniae; identical to SEQ ID NO: 71978

SEQ ID NO: 76069 - DNA, 1818 bp, Streptococcus pneumoniae; identical to SEQ ID NO: 71979

SEQ ID NO: 76070 - DNA, 2070 bp, Streptococcus pneumoniae; identical to SEQ ID NO: 71808

SEQ ID NO: 76071 - DNA, 1818 bp, Streptococcus pneumoniae; identical to SEQ ID NO: 71809

SEQ ID NO: 76072 - DNA, 2070 bp, Streptococcus pneumoniae; identical to SEQ ID NO: 71978

SEQ ID NO: 76073 - DNA, 1818 bp, Streptococcus pneumoniae; identical to SEQ ID NO: 71979

SEQ ID NO: 76074 - DNA, 2088 bp, Streptococcus pneumoniae; identical to SEQ ID NO: 73976

SEQ ID NO: 76075 - DNA, 1818 bp, Streptococcus pneumoniae
atggtgaagagtgatgattggcttcctaaaggagatattattttagagaatgcagctttagaagctgttaagaatgtaaacaattgtttagttattgctggaccaggtgcggggaaaactgaattactagctcaaaaattagactatcttttttctacaaatgaatgtatttctcccaaaaaaattttagctttaagttttaaaacagatgctgcagcaaatatgaaaaatagagttaaaaaacgttatggtgatgagtatgcttcgcgatttacatctttaacctattcagcatttgagaagatgattttagatcaatatataaatgctctcccagaagaaataagaccagatagagactatctggttgatgattgggatgttataaaagcaacacttattaaaaatggtattaatgttaatgggaggagaatgtcagatataagaaagtctgtcgaaaaaaccgtacttaatgatgaggctaatttaaagtttaaaaaggacttattaaaagggacacggaataataaggctgtgctcctttataaacaaataactaagctagctacgtatataatatatacaaataaatatattcggaaagcacttcaaatgacatatgaatttgtctttttagatgaatttcaggatactacgtatgaccagtataatttattaaaaacatgttttttaggttcgacgtgtaaattgactgcagttggagataataaacaagcaattatgagatgggcaggtgcaaatcctgatatttttcaagattataagctagacttcaaagcaaatgaatatcaattattgatgaatcaccgctctgtacctaaacttatagaatttcaaaaagaggttcatcagatattaaatagtaatcacagttctattcagtcaaattattatccagaatttcaagagggtgaaataacattatttgaatttgaaaatgaaagtttagaatctaagttaattgcaaatgatatagaatcaaaaattcaaggaggtatacgaccatcagaaatttgtatcctagcaaaacagaaggttgatgattatagttcaaaattgataattacattaagcagtaaagggattaaagcaagaattgaaaatgaatatcaagaacttttaaaagaccctacttgtaacttattattagatttaatatcatgcagtcaaggaaaacgagatcctttaatttgggaaaatattagtaatttttatggaaatatcaatggaatagatgaacttactgatgaattaattttagcaaaatcctataaggagattgacaatatagttagtgatattacttacctaatttcaaatgttattcccgataaagacaggatgctaaatttaattaattgtattatcgaaaaaatagatgaaaaaagaattatttcaaatttttcaacatacaatagaaaaagtgacctagatatcattgtcaagaacttttcaaagttattatacaaagaatattctcaaacacaaggtgaatggctagatacagtctctagtttcaagggtgaaaactcaattccaattatgactatccataagagtaaaggattagaatatgaggtagtctattttctaggcttggaggattctgcattctggagttttaatgatcaaccggaagaagataaaagtgcgttctttgtcgcactttcaagagcaaaaagtcacttaatattcacatactgtaaattgagaaataatagtccgcaaaataatagaaatattaatgagatatattcattgctgactcaatccaatttagttgatgttattaattaa

SEQ ID NO: 76076 - DNA, 2088 bp, Streptococcus pneumoniae; identical to SEQ ID NO: 73976

SEQ ID NO: 76077 - DNA, 1818 bp, Streptococcus pneumoniae; identical to SEQ ID NO: 76075

SEQ ID NO: 76078 - DNA, 2088 bp, Streptococcus pneumoniae; identical to SEQ ID NO: 73976

SEQ ID NO: 76079 - DNA, 1818 bp, Streptococcus pneumoniae; identical to SEQ ID NO: 73977

SEQ ID NO: 76080 - DNA, 2100 bp, Streptococcus pneumoniae; identical to SEQ ID NO: 73328

SEQ ID NO: 76081 - DNA, 1818 bp, Streptococcus pneumoniae; identical to SEQ ID NO: 73329

SEQ ID NO: 76082 - DNA, 2100 bp, Streptococcus pneumoniae; identical to SEQ ID NO: 73328

SEQ ID NO: 76083 - DNA, 1818 bp, Streptococcus pneumoniae; identical to SEQ ID NO: 73329

SEQ ID NO: 76084 - DNA, 1758 bp, Streptococcus pneumoniae; identical to SEQ ID NO: 72172

SEQ ID NO: 76085 - DNA, 1539 bp, Streptococcus pneumoniae; identical to SEQ ID NO: 72173

SEQ ID NO: 76086 - DNA, 1926 bp, Salmonella enterica; identical to SEQ ID NO: 72180
  subsp. enterica serovar Typhimurium str. DT104

SEQ ID NO: 76087 - DNA, 1662 bp, Salmonella enterica; identical to SEQ ID NO: 72181
  subsp. enterica serovar Typhimurium str. DT104

SEQ ID NO: 76088 - DNA, 2070 bp, Streptococcus pneumoniae; identical to SEQ ID NO: 71978

SEQ ID NO: 76089 - DNA, 1818 bp, Streptococcus pneumoniae; identical to SEQ ID NO: 71979

SEQ ID NO: 76090 - DNA, 2100 bp, Streptococcus pneumoniae; identical to SEQ ID NO: 73328

SEQ ID NO: 76091 - DNA, 1818 bp, Streptococcus pneumoniae; identical to SEQ ID NO: 73329

SEQ ID NO: 76092 - DNA, 2070 bp, Streptococcus pneumoniae; identical to SEQ ID NO: 71808

SEQ ID NO: 76093 - DNA, 1818 bp, Streptococcus pneumoniae; identical to SEQ ID NO: 71809

SEQ ID NO: 76094 - DNA, 2088 bp, Streptococcus pneumoniae; identical to SEQ ID NO: 73976

SEQ ID NO: 76095 - DNA, 1818 bp, Streptococcus pneumoniae; identical to SEQ ID NO: 73977

SEQ ID NO: 76096 - DNA, 2100 bp, Streptococcus pneumoniae; identical to SEQ ID NO: 73328

SEQ ID NO: 76097 - DNA, 1818 bp, Streptococcus pneumoniae; identical to SEQ ID NO: 73329

SEQ ID NO: 76098 - DNA, 2070 bp, Streptococcus pneumoniae; identical to SEQ ID NO: 71808

SEQ ID NO: 76099 - DNA, 1818 bp, Streptococcus pneumoniae; identical to SEQ ID NO: 71809

SEQ ID NO: 76100 - DNA, 1875 bp, Yersinia kristensenii
atgtatcttgcagagctcacgataaagaattttcgcaaactgcgtgaagccacgctgaaatttcaacccggtttaaatgttctggtaggcccaaacaacgtagggaaaagtgcagcaatcgatgcactccggacgcttcttgcaggtcatgatgagaattatcctcgcctcgatggttctgatagacaccgtccgcatgagggcgatccaactggtgatataaatttccattttgtcttccgagatcttagccttgaagatgaagcggactttattgctgccctcaagccaaatggggacaagacaatggaggcgcatatccatgtccagtataccgatatggataagacgggacgattcaaagtccggcgttggtgcggtgatcacccagaagtttcgcttacctcagatattatggagaaccttcggggggtctatctccagcctctccgcgatgccgcgcagggccttcgtcctaaccgtaacagccagctggctcgattacttcatttgcttaccgatgatgcaggtcgtgacacaataaatacggctttaaagcaacttgacgaaacacttaaacaagacaaatccattcagagtacccataaagcgatatcaaccagacatgattccatgatgggtgctcagctagcgcaggagcttgccgtcgggctcagcgttactgattttcagcgcctctcttcccgactgaccctgacggctgaagccatggagattgagaagaatggattgggcttcaataatctgatcttcatggcggtagtacttagtgaattggctaaaaatactgattctgctttcaggagtttgattattgaggaacctgaagcgcatttgcatccccaactgcagcgcgtattgctgcagtaccttgcagggattccaacgggtgaaggcgaaaagcctgtacaactatttgtcaccagccattccccaaattttgccagtaattcaaagctggactctcttgtatgcttgatcgagaacgaggttggcgttgagaccttctttccacgtgatatcaaatttgaaaaaggaaaacgtgaaaagctagagcggtatctggacgtaactagggctgaactattttttgcacgccgggtgattttcgttgagggcgcagcagaactcatgttgattgacgcgcttgctaagaagatgaactttgatctcagggaatatggggtcagcctgattagcgttgagggacttaattttgactccttcctcccgctttttggagagcaggggctgcgaatccccgtcgctgtagtaaccgatgcagatccatttgaagaagaagaagttgaagccgtggcagaggatgaacaggctgaagaggagattgacgacttactttctgaagctgcctaccaggaagaaactgacgctcctgacgatgaagagcttgctggcaatgctgagaaaaagaaaaaagttaaaaggaaagaggtgtacccagcgttgggagatcaggtgcggttgtcggcaaataccatcaagatgaagaatctggaggatgatttcgtgaaggtatttcatggattgaagacccttgaatatgatctggcactcattgaggcgaaccgcgacccaatgcttactgcattagccgacccacatccaaaaatctctaaagctctacgtaatatagttgatgcacagccagacaataccgcaaaaaccaaagcgttgttctgcggaatgtttgagcgaaaaggcaacggcaatattcagaaaggtcgattcgcccaggcattagcagaacagatttcgaaagaaaatggttttgaagtccctgagtacctcaaaaaagctattcaacacgtctgtcagggagtggttaagccttga

SEQ ID NO: 76101 - DNA, 1728 bp, Yersinia kristensenii
ttgaaaccatcaaaggaacagatagatatcatagaagcaccgttagggccaattgcggtcactgcgtgcgcaggaagcgggaagacagctacagccattcggcgcctgatcgccattcggcagaaaatgcaaaacagtcgcggccgcgttgtgctgttgtctttctccaatgttgctgtcaataccttcaatgcaggatatgcggaactcgctgctggcctaccagacgatgctaatcgtcgaagggtggaagtcgatacacttgacggtttttttaccaaacatgttttacgtccccatgcttacaggactatgaccgcacctcaggctgcatacttggtgtcaggtttggagccttttcttgccaggtttaaatattggcgtgaaggtcatccccctctgccattaaaagacataaaaataagcatactggatggggactttgtcttttattccgatgtaagaaatgaccttgaaattcttgataaaggtaaggttttaaagatcattcatgaccttggacgtttaggtgcttacactcacgagataggtcggtactgggtgtataggaccctggattctcaacctgcagtagtgagggcgctggcagcccgctacccgcaaatacttgtcgatgagtctcaggatttgggaacactgcatgaggaaatcttaaagctactcattgctgcaggggttcaggttacgcttattggagatgttaatcaggggatttatggcttcgctggtgctgacggtgagttcctgaatagctatgaggagcgtgcagaggtgaccggctacaagcttactcgcaattatcgttccctgcctccaatcataaatatcgccaaccttcttagtggccgccaagacgaaccataccgcctgggggaacaaggtggagcttattttattggatacaaggattcggaacttcccaaattaattgatgcattcaaggcccgtattgatgagttaggcatgcaacaccaggatgctgtgctcctctgccggggagcagatagagccgcagtaattgcgggtaggactgcccctccaggacaaggtatggtcaaggtgttagcagaagcatcgttgttaagggatcagcatagtaactaccatggatgctttaacttggtctgccgggctattctcagcttattggaggatataccccatggcctcagttctagacttcagggtgtatcacatgatgctgagatgaagggactaaagcgattactatggtgtttcagtcgcaacgctgatttgggactcccttcgtctgcgcttgtggctaagaccgactggcactccaagctattaacgaatgttaaagtgcttctcgcagagattgaaaagcactacggatataaagttgctggcaatgtaggtactaaactcactaagaaattattaccagatcagacactaaccagtgcagtgtcggctcaaggacacgggctaagagtcgagacggttcatcaggttaaaggggagtctattggtgcggttatgtatgtggctaagaaatccaatattaaagcactactttcaggtacaggtgatgaagaaggacgtatcgggtatgtcgcaataactcgggccaagaacttgttctggctggctgtaccacaatcatgccttaaagaattaaaagaagatctcattaaagccggttttcaggaatggatcaaacttgccgtcattgatcctgcctga

SEQ ID NO: 76102 - DNA, 2070 bp, Streptococcus pneumoniae; identical to SEQ ID NO: 71978

SEQ ID NO: 76103 - DNA, 1818 bp, Streptococcus pneumoniae; identical to SEQ ID NO: 71979

SEQ ID NO: 76104 - DNA, 2070 bp, Streptococcus pneumoniae; identical to SEQ ID NO: 71808

SEQ ID NO: 76105 - DNA, 1818 bp, Streptococcus pneumoniae; identical to SEQ ID NO: 71809

SEQ ID NO: 76106 - DNA, 2070 bp, Streptococcus pneumoniae; identical to SEQ ID NO: 71978

SEQ ID NO: 76107 - DNA, 1818 bp, Streptococcus pneumoniae; identical to SEQ ID NO: 71979

SEQ ID NO: 76108 - DNA, 2088 bp, Streptococcus pneumoniae; identical to SEQ ID NO: 73976

SEQ ID NO: 76109 - DNA, 1818 bp, Streptococcus pneumoniae; identical to SEQ ID NO: 73977

SEQ ID NO: 76110 - DNA, 2088 bp, Streptococcus pneumoniae; identical to SEQ ID NO: 73976

SEQ ID NO: 76111 - DNA, 1818 bp, Streptococcus pneumoniae; identical to SEQ ID NO: 73977

SEQ ID NO: 76112 - DNA, 2100 bp, Streptococcus pneumoniae; identical to SEQ ID NO: 73328

SEQ ID NO: 76113 - DNA, 1818 bp, Streptococcus pneumoniae; identical to SEQ ID NO: 73329

SEQ ID NO: 76114 - DNA, 2088 bp, Streptococcus pneumoniae; identical to SEQ ID NO: 73976

SEQ ID NO: 76115 - DNA, 1818 bp, Streptococcus pneumoniae; identical to SEQ ID NO: 73977

SEQ ID NO: 76116 - DNA, 2190 bp, Staphylococcus aureus; identical to SEQ ID NO: 71982

SEQ ID NO: 76117 - DNA, 1794 bp, Staphylococcus aureus; identical to SEQ ID NO: 75835

SEQ ID NO: 76118 - DNA, 2100 bp, Streptococcus pneumoniae; identical to SEQ ID NO: 73328

SEQ ID NO: 76119 - DNA, 1818 bp, Streptococcus pneumoniae; identical to SEQ ID NO: 73329

SEQ ID NO: 76120 - DNA, 2100 bp, Streptococcus pneumoniae; identical to SEQ ID NO: 73328

SEQ ID NO: 76121 - DNA, 1818 bp, Streptococcus pneumoniae; identical to SEQ ID NO: 73329

SEQ ID NO: 76122 - DNA, 2070 bp, Streptococcus pneumoniae; identical to SEQ ID NO: 71978

SEQ ID NO: 76123 - DNA, 1818 bp, Streptococcus pneumoniae; identical to SEQ ID NO: 71979

SEQ ID NO: 76124 - DNA, 2070 bp, Streptococcus pneumoniae; identical to SEQ ID NO: 71808

SEQ ID NO: 76125 - DNA, 1818 bp, Streptococcus pneumoniae; identical to SEQ ID NO: 71809

SEQ ID NO: 76126 - DNA, 2070 bp, Streptococcus pneumoniae; identical to SEQ ID NO: 71978

SEQ ID NO: 76127 - DNA, 1818 bp, Streptococcus pneumoniae; identical to SEQ ID NO: 71979

SEQ ID NO: 76128 - DNA, 1824 bp, Salmonella enterica subsp. enterica serovar Typhi
atgaatattctgatagataaagttcgtatatctgggtttagaggaatatcaaatgttgagataactctcccaagagtaactgttttactggggcaaaataatgcagggaaaacatcagtaataaaagcaatgcagttagcaatgggagactattcgcgttacttatcggatgaagattttcatataggtgaagatgaaaaacggcgagaggttatcactgtagatcttcgatttatagctgttgatggtgagagtaggactaaagagttttcagaaaattggcagcaagtgtttggcgataaaattcagtcagagcctgatggaaatcaatttgtatgtatacgaaccattgcgaagcctgatcgagttaaagggggttacgttgttgagcggtttcatttggatatttggccagaacgtactaactggcaagatgcccgggttaatagtaaaaatagattaggtaagcgattggagtttgtaccttttattccgattgatgcgcaaagagatatacatagtgaattgaaagagaaatcctcatttgtggggcgtgtgctatcaagtgttgagtatgacgataaagatgttgctgcgctggaaaggatggtggctgaaataaataaagaagctatcgagaagagcgaaccactcaagcgtttgaaaaatcacctggataatttaaaccaatcatttgaaggttcaggacaaacagagcttactccattcccgaaaaagatacgagatttatcaaagagattcagtgttaattttggtgaatctgataagagttcattttcgatggaatatcatggtatggggacacgtagttgggcatctatgttgacagtaaaagcctttactgaactcttagttaaaaatcacgaagaagaggcggagccattttttccaattatggccgcagaggaacctgaggcacatttgcaccctaatgcacagaggactctatatagacagcttgtagatgctccagggcaagtaattatcagtacacactcaccttatattgctggtttggcagagttgcatgaaattaggttcataagtaagcaagggcattcggtgtgtgtatatcagttaagggatgaatttgacggtgatgatctaagaaaattagggagagaagttgttcactctcgtggtgagctattattttcaaaagcaataatattatctgaaggagaaactgaagagcaagccttacctgaactttttgaatcctataccggaaaacatcccttctcgcttggtataaatttcgtaggagttaatggttccggagcgaaatatcgtccgtttcttattttggcaaaagatttcaacatacctgtatttatatttagtgatggtgaagataaaacggttaaagagctcaaaaagaactatgagaaagtgtttggggttactgatataatgaatgcagctaacatcaccatacttgaagggactgattttgaaggctatttgttaagtcaaggtttcgaacagttgattgaaaaaactatacttgaaatcgacggtgatggcgcaattgataagtggattgaaaaaaagaatggaacatcgttaaagcgtattcgaactgacaagccaaactgtggtacttgtaatcaaccaatttttgaagatgttctgagggattatattggtgatgatggacgagctcgtgcaatcctcgagattcttgattcgcggaagccgctttatgcaaaagcaatcacagataatctgattaaattgccgaaagaaaaatttcctcagaagatagttgaactattcaaaaaaattgaatcgggagtttga

SEQ ID NO: 76129 - DNA, 1893 bp, Salmonella enterica subsp. enterica serovar Typhi
atgaatctatcaaatgctcagcgccagatcgttgaagcccctatggatatagctattcaagtgcttgcctctgcaggttctggtaaaactcgagtcttaacagagcgtgttcgatatatattgaataatacaaagagagatgctgttatcgccctgacctttacaaataaagcagcggaagaaatgagtacgcgtttaagtgatttcgatccggatgaagatagggcttggattgctacgattcattctgttgcgcagcacattttagaaaaatacggacacaccgttggtttgccatcagatttgtatatatatgatagagataaggatcgtatggaagtctttatgcagtctttgcgtgaagatggcattgatatagatgaatatctctctattgcagattccaaggagttaaaaaatagggagcgaaatctgcaatcgtatatggatatattctcaaaaataaagagagagttgcttacagagttcgatgtatctgagttgtatccaaataataatatctggaaaatatataaggattatcaggcttcattgcttaatagcggaggtatcgattatgatgatattttagtatatgcacatcggattctactcacgcatgattggatagcaaaaatatatcgttcaaaatacaaacatatttgtgttgatgaagctcaagatcttaataaagcgcagtatgagtttattaaggtgctatgcggtgatgtaataaaaagcattctaatggtaggtgaccctaatcaaatgatttatggttttaatgggtcgtcaaaagactacttttgtgaaaattttattaatgatttttatcctaatcagtttgaattgaaggaaaattatcgtagtaccaaagctattattcgcgcagcaaataagttaagaccgggatcacaagcagagattgattatgccttggaggggggcgttagaatctcagaattcgcttcagaagaggatgaagctgagatggttgttgctactataaagcatcttttggaattgaaagttcacgatgagattgaggggaatatttcactgaacaatatggttgttattagtcgtaatcggtttgtttttggcaagcttgaaaactgccttaaaaataattcgattccttactctttgaggaaaggagagagagcgttagaaccgtcgactagatttggaaaagttttagactatgccattagactgaagttgaattcgaaggattgggttgatggaaaaaaattatgccaagtacttggcatatcagagccggctggctggacacctgatgtattgcgagagttggcggctcaaatttcatcatcaactgatgattactctgttgtatttgaaaaacttctcactactattgatagcttaaatattgaaaatcctaaaattcccaagctaataaaggaatttaatgaccttctaacatcgttagttgaaaatcataacggtatttcagatgataaaatagaagacgttaagctgagtattgaagagcttaaagagtttagtggtatgtggactcgatttaagcgtaaggggttaggtgattcattagttgcatttaggaacgcattggcattggggcaactagctgaaagtagtatggatgaaggcttaactttaagtacagtacatacaatgaagggactggaaaaggatattgtgtttttgataggtatgtgtgaaggggttttcccggattacagagctagaacaaccaaagagcttgaagaggaacgcaataacgcttttgttgcggtgacgagagcaaagcgttggctgtacgtttcttaccctaagcagagaatgatgccttggggtgaccttaggtttcagcggaaatcccgatttgtcagtgaaatagaataa

SEQ ID NO: 76130 - DNA, 2088 bp, Streptococcus pneumoniae; identical to SEQ ID NO: 73976

SEQ ID NO: 76131 - DNA, 1818 bp, Streptococcus pneumoniae; identical to SEQ ID NO: 73977

SEQ ID NO: 76132 - DNA, 2088 bp, Streptococcus pneumoniae; identical to SEQ ID NO: 73976

SEQ ID NO: 76133 - DNA, 1818 bp, Streptococcus pneumoniae; identical to SEQ ID NO: 76075

SEQ ID NO: 76134 - DNA, 2088 bp, Streptococcus pneumoniae; identical to SEQ ID NO: 73976

SEQ ID NO: 76135 - DNA, 1818 bp, Streptococcus pneumoniae; identical to SEQ ID NO: 73977

SEQ ID NO: 76136 - DNA, 2070 bp, Streptococcus pneumoniae; identical to SEQ ID NO: 71808

SEQ ID NO: 76137 - DNA, 1818 bp, Streptococcus pneumoniae; identical to SEQ ID NO: 71809

SEQ ID NO: 76138 - DNA, 1758 bp, Streptococcus pneumoniae; identical to SEQ ID NO: 72172

SEQ ID NO: 76139 - DNA, 1539 bp, Streptococcus pneumoniae; identical to SEQ ID NO: 72173

SEQ ID NO: 76140 - DNA, 2070 bp, Streptococcus pneumoniae; identical to SEQ ID NO: 71978

SEQ ID NO: 76141 - DNA, 1818 bp, Streptococcus pneumoniae; identical to SEQ ID NO: 71979

SEQ ID NO: 76142 - DNA, 2100 bp, Streptococcus pneumoniae; identical to SEQ ID NO: 73328

SEQ ID NO: 76143 - DNA, 1818 bp, Streptococcus pneumoniae; identical to SEQ ID NO: 73329

SEQ ID NO: 76144 - DNA, 2088 bp, Streptococcus pneumoniae; identical to SEQ ID NO: 73976

SEQ ID NO: 76145 - DNA, 1818 bp, Streptococcus pneumoniae; identical to SEQ ID NO: 73977

SEQ ID NO: 76146 - DNA, 2100 bp, Streptococcus pneumoniae; identical to SEQ ID NO: 73328

SEQ ID NO: 76147 - DNA, 1818 bp, Streptococcus pneumoniae; identical to SEQ ID NO: 73329

SEQ ID NO: 76148 - DNA, 2070 bp, Streptococcus pneumoniae; identical to SEQ ID NO: 71808

SEQ ID NO: 76149 - DNA, 1818 bp, Streptococcus pneumoniae; identical to SEQ ID NO: 71809

SEQ ID NO: 76150 - DNA, 2088 bp, Streptococcus pneumoniae; identical to SEQ ID NO: 73976

SEQ ID NO: 76151 - DNA, 1818 bp, Streptococcus pneumoniae; identical to SEQ ID NO: 76075

SEQ ID NO: 76152 - DNA, 2316 bp, Yersinia frederiksenii
atgcatttgagaaagctggcagtccgtaatttcagaaggctgcacgatgttgttatcgatcttgcgtcagacatttcaattttcgtaggggcgaataacagtggtaagacttctgtcggtcatgcacttcaactattcaccggtaaaagccgattcaatattcatgacttcaatgctgaatgttggactgacattgtcacatttggagaaggggcggatgctgcgtcgctaccttcactggaacttgatatttggtttgaagtaacaccgaatgatgttcatcgtgtagtcgatcttctccccagcctatcgtggtcaggttctctggttggaatgcgcgttgccttttcccccatcaatcctgaagaaatccgttcgcgtttcctcgcagtacgtcagcttgctatcgatgccacacctaaagatgaaaatggaactcccaaatacgatccttcacctcgtaatctttgggaatatcttcgcgatagactcaatgacgaatatgaattccgctattttgttcttgatcccgcacgtttcaatgcggaaatgatatccgaggaaggctatgagcctactccgctcacagggcgtgatcgaagtggtcgcgaaatactgaacagccttatccaaatcaactttttgaatgctcagcgtcatctttcagatggttctggaggttcccgttcggaagatctttctcgtgttctcagccgtttttacggacgaaatcttgaacaaaaaggtgaagattacgaagcattaattgctttagctgcgtctgaatcagctttcaatcagcatcttgaacgtgtttttgcacctacgctgaaaagtctggcgaaactcggataccctggactttcaaacccacgcatgatgattcgttcggccttagacccggcgcagatcatgaacaaccaaaatggggccgtaatacattacgcgctgggggaggatgacggtaatcctaccccaccaacactacccgatagttataacgggcttggatttaagaatctgatctttatggttgttgaattactcgacatccacaaccaatggttagcaatagaagagaatcgaccaccggttcacctgatttttattgaagagccggaagctcatctccacgcacagttacagcaggcttttatacgcaagataatggaccttcttgccatggagagtcaggagcttatgcactacaccactcaagtggtggtgacttctcattcaactcatattctttacgaacgtggttttcggccgatccgttactttcggcggaagcgttcatcaaatatgtcggcaacagatgtgctcaatctctctgttttttatgataatactgatcctgaaattcgagactttcttgagcgttacttgaagctgacccattgtgacttgttttttgccgacggggctgtacttgtagaaggcaatgttgagcggctactgctcccgcaaatgattgctaccgccgcacctagattaaaatcctcttacctaacagtccttgagattggcggtgctttttgctatcgattccaaaaactaattgaatatcttgggcttactacactcattattactgatctggatagtgtgtactgtacccctccggtacaagatgcaacagaagctcgagcagatgagttagatgctcttgcagaaaatccggctgcaaatgatgatggcgaggaacctgatgatgatgaggaagaacaggccaacacagaaacaccaggaaaggcttgtattgccagtcatcctggagctatgacctctaatcaaacacttcggcagtggttaccgaaatgtgacaccgttgctgctttatgggaagcaactgaggaaatgaaaatacaaagccgcacagctgagtgtgacgctttggttcgtgttgcttaccagtgccagacagatgttacatggaaagaggaaacactggcgcttgctggtcgtactttagaggaggcttttgcacttgaaaatctgtcctggtgtcaggatgtgagctgtaagccactcaagctacgcattgccagagctgtaagtatggatctactgcaactggcccagcgcattcacaagcgcgtgcaatcaaaaagcttcagtaaaactgattttgctctgaatttacttcttaaaaaaccggatgaatggtctgtcccaacatacattgctgaaggattaaaatggctcgaagctgaaatagccccgccggaactagaagttgcagaaggtcaggaagaggatgttgaagatatgtccgtcgttctggctgaaacagatggtgggagggttgcatga

SEQ ID NO: 76153 - DNA, 1878 bp, Yersinia frederiksenii
atgaccagtcgcattggcagccctgatacacaggcagatattgatgttcgtacttgcctggatagctcgccaccacgttcatttgtcatggtggctggtgctggttcaggtaaaacaacatctctcattaaagccctggcacatttggctgatacccgtggttctgctttacgtcgtgccgggcaaaaaatatcctgtataacgtatacagaagtagctgttggtgagattgccgctgacgttggtaactcacagttatttcatatttcaaccattcatagctttctttggtcggtcatccgcccttttcatttagatatcgcaaagtgggtcgtagcgcgaatacatgaaaaaatagctgaaaagcaagcccgttatgatagacccagaacacaagctaaaacaaaatcccgccttgaagatgaaattgcctatctctctgctcaacttgagtgcattgatgatgttgataaatttatctacgggacaggaagtaactatgcaaagggtattttagggcacgatgatattcttaaactcgtacccgcttgtattaaggctcatccacttttgagaaggattgtagccaagcgctttccatttgtttttgtcgatgaaagtcaggataccgatcctgatgtgatctatgcgcttcgaactattgctaatgacaatcctgacatgtgcataggattttttggtgatccgatgcagaaaatctatatgagcggagctggtgccattccgttaagtgatggatggtctgaaattacaaaaccagaaaatttcagatgtccgacgtctgtacttggtgttatcaattcgattcgtgcttctggggatggcctccaacaaattcgtggtcgaataactatcgtagatggtgttgaacaaacggtatcaggcacagtgaatcttttcatcttaccttcaaatgtggaacgaagtgcctatctcacatctgtcagacgttaccttgcaaatgaaactagcgatgaacaatggctaagtgatacacgcgaaagtgatgttcgtcttcttgttttggtacatcgtatggcagctaatcgactgggattccctaatttatttgctgctctcactgataaagcaccgatgagcttgagtgaaggggtgaacgatgggtcagcttggccgcttcgcccatttgtccagcatatccttccaatttttgctgcggctcaggcaagcgatcaatttcagattatgtcgattatgcgtaacgagtgcccaaagctggagccatcacgactgcatggtcaagctatagtggcagttttaaatgaactacaacaaggcatcaatggcctgcttacactgttggaagaaggatcgcaagcaacagttcgggatatattgctacacattagagactgtgaactgctacgtcttgatgatcgttttgataatcatttaagtgatgaacctgtgaatgatggtaatgatgacttcgaaaatgttcagaactatctaagatgcaatgcccacgaactttgggcgtaccgacgctacctttcagaggaatcaccttttgccactcaccatggtgtaaaaggcgcacaattcgagcgtgtattggttgttattgatgatgaagaggctcgcttcagccaatattcgtatgggaaatattttcagtacattcccatatccgacaatgatctagccaatcttgaagagggtaaagagtcagtactcgaccgcactcgtcgccttttttatgtatgttgctctcgtgcactgaaagacttggctgttgtcatctttgttcccgatgttgccgtagctcaatcggcaatcgttgggcaaaatttattcccagcgtcggtaattttaggagcgcacgatctggattag

SEQ ID NO: 76154 - DNA, 2070 bp, Streptococcus pneumoniae; identical to SEQ ID NO: 71978

SEQ ID NO: 76155 - DNA, 1818 bp, Streptococcus pneumoniae; identical to SEQ ID NO: 71979

SEQ ID NO: 76156 - DNA, 2070 bp, Streptococcus pneumoniae; identical to SEQ ID NO: 71808

SEQ ID NO: 76157 - DNA, 1818 bp, Streptococcus pneumoniae; identical to SEQ ID NO: 71809

SEQ ID NO: 76158 - DNA, 2100 bp, Streptococcus pneumoniae
atgaagttaacaaaaatggttattaataattttagatcttttggggagtatcaagcaattaactttaataatcaaactgtactgatagggaataatagttcaggaaagacaactgtattacaggcattgagtaagttgttttcagataaacaaagtgatagaatcattcgaaaaagtgattttcatttaccaaaagggttaagacctggtgaaaacacaagaaatttttttatagaaactatttttgagtttgatgaacttgatggaactgtctatggatcagccattccaacatttttcgagcactttacagtttctcaagatggtgcaaaaccttttttacgaatcagattagaatcttcctgggaagatgatggaacagttgaaggaagtattgatactcaaatttattatatttcatctgatgaagatactattagagatgaagacaaacatcgtgctcctagaaaggatttggataaaattagggtactttatgtaccagcttcaagaatgcctgagaaggagttgggtaatgcttcaggtagtatgttaagtaggttggtaaatagtataaattggactgaagatgagataaatgaaattaaagataaaattgatgagttgaataaaacttttttatctgaaaatggagcattaactcagatcaacaatgagattcagaaatcatgggaattatatcatgaagataaccgtttttctcaagcagagttgattattaattcttctgagatggcggcagcacttagacagattgccttaaaattttcaccaacaaccactgaagaagcatttacagtttcagatctaggagatggactgagatctattttttatttttcacttgttgattcgatacttgatattgagttagaaattaccaaagaccgtgaagagaatcctgataatccaagatttaagttggtacctccaatactaactatcttagcaatagaggaaccagaaaatcatattgctccacatcacattggaaaactgataaaaaggtttaagcaattaggcaataatgacaactctcaattaattttaacttcacattctccagttattgtaaaaagaattgacccagaagatttgaggtatttaagaatagaaaataatgacagtgttcttcaaaccattgtttctgatatacagttacctcaatcgagtgatgagtcttataaatacattaagggagcaattcaagcctatcctgaactatattttgcgaagttagtagtactgggtgaaggtgatagtgaggaactgctattaccaaagttttttgatttacttggactggaaattgatagttctcagatttcagtagttcctttaggaggtaggcacgttaattatttttggaaattattgaacgctctcaggattcctcatattaccttattagatctcgataacgaaagatatggaggtggctggggaagaattcaatatgcaataaaacaattgatactaaatggggttgctaaagaaaaacttgttactgtaacaaccgaatctcaaaaatcacgagttctagatgatgatgagattgatagaataaaggactggaagattgatagacctgataaccagtggcttgaggggtggattaaaatgttagaaaagtttaatgtgttcttttctgcaccgcttgatattgacttcttaatgttacagcattataagaattattatctggatatgttatcttcgaaagaaggaccagtcgtttcatatgctgattcaggtgggaatagtaaaaaagtaaaattaactgatttggattgtattgataaattgcagttagaaggtctcgaaaaacgtatagaagaagcaaagatagctactttaaaggataagagtggaccgggggatagttttactagagaagagaaagaattaatgatttggtatcaatatttctttttaggtagaggaaagccaacaactcatatgcaatttttattatctattagtgatgatgaattaacaagaaatctaccccctgtatttgaaaaaatagttaaccgtgctgaagaattacttggagatattgaacatggtaaagagtga

SEQ ID NO: 76159 - DNA, 1818 bp, Streptococcus pneumoniae
atggtaaagagtgaggagtggtttcctaaaggagatatcattttagaagagactgcattaggagctgtcaaagatgtgactaactgtttagtcattgctggaccaggtgcggggaaaactgaattactagctcaaaagttagactatctattctctacaaataaatgcgtttctccgaaaaaaattctagcattaagtttcaaaacggatgctgcatcaaatttgaaagaaagagttaagaaacgttatggtgatgaatatgcttctcgttttacctcattaacctattcggcttttgaaaagagaattttagaccaatttagagatgttctagctgaggatatacgaccatcaagagattatttgattgaagattgggatactataaaagaactactctctatgaatggaagtaatgttaatggatggagaatgtcatatataagaaattttgtcgaaaatattatacttaatgacgggaatgctcacaaattaaaaaaggatttactaaaaggaacacaagataataagccggtcctcttgtataggcaaataacaaagttgagtactcaaataatagctactaacgaatacatccgtaaagcacttcaaatgacatacgattttgtatttctagatgaatttcaggatactacatatgcccagtataatttattaaaaacttgttttttaggttcgtcttgtaaattaacagcagttggagataataagcaagccattatgagatgggcaggtgcaaatcctgatatttttccagactatattcgagactttaattcaaatgaatatcaattgttgatgagtcaccgctctgtacctaaacttgtagaatttcaaaaagaggttcatcagatattaaatagtaatcacagttctattcagacaaataattatccagaatttcaagagggtgaaataatattatttgaatttgaaaatgaaagtttagaagctgagttaattgcaagtgatatagaatcaaaaattcaaggaggtatacgaccatcagaaatttgtatcctagcaaaacagaaggttgatgattatagttcaaaattgataactacattaaacagtaaagggcttaaagcaagaattgaaaatgaatatcaagagcttttaaaagaccctacttgtaacctattattagatttaatatcatgcagtcaaggaaaacgagatcctttaatttgggaaaatattagtaatttttatggaaatatcaatggaatagatgaatttactgatgaattaattttagcaaaatcctataatgagattgacaatatagttagtgatattacttacctaatttcaaattttattcccaatgaagaaagtatgctagaattaattgattgtattattgaaaaaatagatgaaaaaagaattatttccaatttttcaacatacaatggaaaaagtgacctagatatcattgtcaagaacttttcaaagttattatacatagaatattctcaaacacaaggtgaatggctagatacagtctctagtttcaagggtgaaaactcaattccaattatgactatccataagagtaaaggattagaatatgaggtagtctattttctaggcttggaggattctgcattctggagttttaatgatcaaccggaagaagataaaagtgcgttctttgttgcactttcaagagcaaaaagtcacttaatattcacatactgtaaattaagaaataatagtccgcaaaataatagaaatattaatgagatatattcattgctgactcaatccaatttagttgatgttattaattaa

SEQ ID NO: 76160 - DNA, 2070 bp, Streptococcus pneumoniae; identical to SEQ ID NO: 71978

SEQ ID NO: 76161 - DNA, 1818 bp, Streptococcus pneumoniae; identical to SEQ ID NO: 71979

SEQ ID NO: 76162 - DNA, 2070 bp, Streptococcus pneumoniae; identical to SEQ ID NO: 71978

SEQ ID NO: 76163 - DNA, 1818 bp, Streptococcus pneumoniae; identical to SEQ ID NO: 71979

SEQ ID NO: 76164 - DNA, 1758 bp, Streptococcus pneumoniae; identical to SEQ ID NO: 76066

SEQ ID NO: 76165 - DNA, 1539 bp, Streptococcus pneumoniae; identical to SEQ ID NO: 72173

SEQ ID NO: 76166 - DNA, 2088 bp, Streptococcus pneumoniae; identical to SEQ ID NO: 73976

SEQ ID NO: 76167 - DNA, 1818 bp, Streptococcus pneumoniae; identical to SEQ ID NO: 76075

SEQ ID NO: 76168 - DNA, 2070 bp, Streptococcus pneumoniae; identical to SEQ ID NO: 71808

SEQ ID NO: 76169 - DNA, 1818 bp, Streptococcus pneumoniae; identical to SEQ ID NO: 71809

SEQ ID NO: 76170 - DNA, 2070 bp, Streptococcus pneumoniae; identical to SEQ ID NO: 71978

SEQ ID NO: 76171 - DNA, 1818 bp, Streptococcus pneumoniae; identical to SEQ ID NO: 71979

SEQ ID NO: 76172 - DNA, 1875 bp, Yersinia kristensenii
atgtatcttgcagagctcacgataaagaattttcgcaaactgcgtgaagccacgctgaaatttcaacccggtttaaatgttctggtaggcccaaacaacgtagggaaaagtgcagcaatcgatgcactccggacgcttcttgcaggtcatgatgagaattatcctcgcctcgatggttctgatagacaccgtccgcatgagggcgatccaactggtgatataagtttccattttgtcttccgagatcttagccttgaagatgaagcggactttattgctgccctcaagccaaatggggacaagacaatggaggcgcatatccatgtccagtataccgatatggataagacgggacgattcaaagtccggcgttggtgcggtgatcacccagaagtttcgcttacctcagatattatggagaaccttcggggggtctatctccagcctctccgcgatgccgcgcagggccttcgtcctaaccgtaacagccagctggctcgattacttcatttgcttaccgatgatgcaggtcgtgacacaataaatacggctttaaagcaacttgacgaaacacttaaacaagacaaatccattcagagtacccataaagcgatatcaaccagacatgattccatgatgggtgctcagctagcgcaggagcttgccgtcgggctcagcgttactgattttcagcgcctctcttcccgactgaccctgacggctgaagccatggagattgagaagaatggattgggcttcaataatctgatcttcatggcggtagtacttagtgaattggctaaaaatactgattctgctttcaggagtttgattattgaggaacctgaagcgcatttgcatccccaactgcagcgcgtattgctgcagtaccttgcagggattccaacgggtgaaggcgaaaagcctgtacaactatttgtcaccagccattccccaaattttgccagtaattcaaagctggactctcttgtatgcttgatcgagaacgaggttggcgttgagaccttctttccacgtgatatcaaatttgaaaaaggaaaacgtgaaaagctagagcggtatctggacgtaactagggctgaactattttttgcacgccgggtgattttcgttgagggcgcagcagaactcatgttgattgacgcgcttgctaagaagatgaactttgatctcagggaatatggggtcagcctgattagcgttgagggacttaattttgactccttcctcccgctttttggagagcaggggctgcgaatccccgtcgctgtagtaaccgatgcagatccatttgaagaagaagaagttgaagccgtggcagaggatgaacaggctgaagaggagattgacgacttactttctgaagctgcctaccaggaagaaactgacgctcctgacgatgaagagcttgctggcaatgctgagaaaaagaaaaaagttaaaaggaaagaggtgtacccagcgttgggagatcaggtgcggttgtcggcaaataccatcaagatgaagaatctggaggatgatttcgtgaaggtatttcatggattgaagacccttgaatatgatctggcactcattgaggcgaaccgcgacccaatgcttactgcattagccgacccacatccaaaaatctctaaagctctacgtaatatagttgatgcacagccagacaataccgcaaaaaccaaagcgttgttctgcggaatgtttgagcgaaaaggcaacggcaatattcagaaaggtcgattcgcccaggcattagcagaacagatttcgaaagaaaatggttttgaagtccctgagtacctcaaaaaagctattcaacacgtctgtcagggagtggttaagccttga

SEQ ID NO: 76173 - DNA, 1728 bp, Yersinia kristensenii; identical to SEQ ID NO: 76101

SEQ ID NO: 76174 - DNA, 2100 bp, Streptococcus pneumoniae; identical to SEQ ID NO: 73328

SEQ ID NO: 76175 - DNA, 1818 bp, Streptococcus pneumoniae; identical to SEQ ID NO: 73329

SEQ ID NO: 76176 - DNA, 2088 bp, Streptococcus pneumoniae; identical to SEQ ID NO: 73976

SEQ ID NO: 76177 - DNA, 1818 bp, Streptococcus pneumoniae; identical to SEQ ID NO: 76075

SEQ ID NO: 76178 - DNA, 2088 bp, Streptococcus pneumoniae
atgaagttaacaaaaatggttattaataattttagatcttttggggagtgtcaagcaattaactttaataatcaaactgcactgatagggaataatagttcaggaaagacaactgtattacaggcattgagtaagttgttttcagataaacaaagtgaaagaatcattcgaaaaagtgattttcatttaccaaaagggttaaaacctggtgaaaacacaagaaatctttttatagaaactatttttgagtttgatgaacttgctggaactgtctatggaccagccattccaacatttttcgagcactttacagtttctcaagatggtgcaaaaccttttttacgaatcagattagaatcttcctgggaagatgatggaacagttgaaggaagtattgatactcaaatttattatatttcatctgatgaagatactattagagatgaagacaaacatcgtgctcctagaaaggatttggataaaattagggtactttatgtaccagcttcaagaacacctgagaaggagttgggtaatgcttcaggtagtatgttaagtaggctggtaaatagtataaattggactaaagatgagataaatgaaattaaagataaaattgatgagttgaataacacctttttatctgaaaatggagcattaactcagattaacaatgagattcagaaatcatgggaattatatcatgaagataaccgtttttctcaagcagagttaattattaattcttctgagatggcggcagcacttagacagattgccttaaaattttcaccaacaaccactgaagaagcatttacagtttcagatctaggagatggactgagatctattttttatttttcacttgttgattcgatacttgatattgagttagaaattaccaaagaccgtgaagagaatcctgataatccaagatttaagttggtacctccaatactaactatcttagcaatagaggaaccagaaaatcatattgctccacatcacattggaaaactagtaaaaaggtttaagcaattaagtaataatgataactctcaagtaattttaacgtcacattccccagctattgtaaaaagaattgaaccagaagaattgaggtatttaagaattgaaagtaatggcagagttcttcaaaccattgtttctgatataaaactacctcaagatactgatgaatcttataaatatattaaaggagcaattcaagcatatcctgaactatattttgccaagttagtagttctaggtgaaggtgatagtgaggaactgctattaccaaagttttttgatttacttgggaatgagatagatagctctcagatttcaattgtgcctttaggaggaagacatgttaactatttttggaaattattaaattctctaaaaatacctcatattactttactagactttgataatgaaagatacggaggtggttgggggagagtacaatatgttatccaacagttactaaaaataggtattgcgcgtaatgatttagtgagaatgaaagatggtagaatattggacgatcaagacattgctagaattagttctaatcagatatctgatatcctctctcaaccattgttatcctggataaatcatttagaaaaattcaatgttttcttttctgcaccccttgatattgatttcttaatgttacagtattataaggattattatctggaaactttatctaccaatgagggacctgttgtttcttatactgacgaaaatagtgacaataaaaaaataaaaataactaaaatggacagaacaaatgattatcaattaattggttttaaaaatcgcatcagtgaagctatacaagcgactttaaaagataagagtggccctggtgatagcttcactgaagaagaaaaggaactcatgatttggtatcaatatttctttttaggtagaggcaaaccgacgactcatatgcaatttttattatctattcgtgatgaagaattaatcgaaagcctaccttctgtatttgagaaaatagttaaacgagctaaagaattacttggagatattgaatatggtgaagagtga

SEQ ID NO: 76179 - DNA, 1818 bp, Streptococcus pneumoniae; identical to SEQ ID NO: 76075

SEQ ID NO: 76180 - DNA, 2088 bp, Streptococcus pneumoniae; identical to SEQ ID NO: 73976

SEQ ID NO: 76181 - DNA, 1818 bp, Streptococcus pneumoniae; identical to SEQ ID NO: 76075

SEQ ID NO: 76182 - DNA, 2088 bp, Streptococcus pneumoniae; identical to SEQ ID NO: 73976

SEQ ID NO: 76183 - DNA, 1818 bp, Streptococcus pneumoniae; identical to SEQ ID NO: 76075

SEQ ID NO: 76184 - DNA, 1926 bp, Salmonella enterica; identical to SEQ ID NO: 72180
  subsp. enterica serovar Typhimurium str. DT104

SEQ ID NO: 76185 - DNA, 1662 bp, Salmonella enterica; identical to SEQ ID NO: 72181
  subsp. enterica serovar Typhimurium str. DT104

SEQ ID NO: 76186 - DNA, 2088 bp, Streptococcus pneumoniae; identical to SEQ ID NO: 73976

SEQ ID NO: 76187 - DNA, 1818 bp, Streptococcus pneumoniae; identical to SEQ ID NO: 73977

SEQ ID NO: 76188 - DNA, 2070 bp, Streptococcus pneumoniae; identical to SEQ ID NO: 71978

SEQ ID NO: 76189 - DNA, 741 bp, Streptococcus pneumoniae
ttgatatctatattaaatagcaaagggattaaagcaagaattgaaaatgaatatcaggatattttaaaagatcctacgtgtaacctattattagatttaatatcatgcagtcaaggaaaacgagatcctttaatttgggaaaatattagtaatttttatggaaatatcaatggaatagatgagttaactgatgaattaattttagcaaaatcctataaggagattgacaatatagttagtgatattacttacctaatttcaaattttattcccaatgaagaaagtatgctaaaattaattgattgtattattgaaaaaatagatgaaaaaagaattatttccaatttttcaacatacaatggaaaaagtgacctagatatcattgtcaagaacttttcaaagttattatacatagaatattctcaaacacaaggtgaatggctagatacagtctctagtttcaagggtgaaaactcaattccaattatgactatccataagagtaaaggattagaatatgaggtagtctattttctaggcttggaggattctgcattctggagttttaataatcagccggaagaagataaaagtgcattctttgtcgcactttcaagagcaaaaagtcacttaatattcacatattgtaaattgagaaataatagtccgcaaaataatagaaatattaatgagatatattcattgctgactcaatccaatttagttgatgttattaattaa

SEQ ID NO: 76190 - DNA, 2088 bp, Streptococcus pneumoniae; identical to SEQ ID NO: 73976

SEQ ID NO: 76191 - DNA, 1818 bp, Streptococcus pneumoniae; identical to SEQ ID NO: 76075

SEQ ID NO: 76192 - DNA, 2190 bp, Staphylococcus aureus; identical to SEQ ID NO: 71982

SEQ ID NO: 76193 - DNA, 1794 bp, Staphylococcus aureus; identical to SEQ ID NO: 75835

SEQ ID NO: 76194 - DNA, 2070 bp, Streptococcus pneumoniae; identical to SEQ ID NO: 71808

SEQ ID NO: 76195 - DNA, 1818 bp, Streptococcus pneumoniae; identical to SEQ ID NO: 71809

SEQ ID NO: 76196 - DNA, 2088 bp, Streptococcus pneumoniae; identical to SEQ ID NO: 73976

SEQ ID NO: 76197 - DNA, 1818 bp, Streptococcus pneumoniae; identical to SEQ ID NO: 76075

SEQ ID NO: 76198 - DNA, 2100 bp, Streptococcus pneumoniae; identical to SEQ ID NO: 73328

SEQ ID NO: 76199 - DNA, 1818 bp, Streptococcus pneumoniae; identical to SEQ ID NO: 73329

SEQ ID NO: 76200 - DNA, 2088 bp, Streptococcus pneumoniae; identical to SEQ ID NO: 73976

SEQ ID NO: 76201 - DNA, 1818 bp, Streptococcus pneumoniae; identical to SEQ ID NO: 73977

SEQ ID NO: 76202 - DNA, 2100 bp, Streptococcus pneumoniae; identical to SEQ ID NO: 73328

SEQ ID NO: 76203 - DNA, 1818 bp, Streptococcus pneumoniae; identical to SEQ ID NO: 73329

SEQ ID NO: 76204 - DNA, 2100 bp, Streptococcus pneumoniae; identical to SEQ ID NO: 73328

SEQ ID NO: 76205 - DNA, 1818 bp, Streptococcus pneumoniae; identical to SEQ ID NO: 73329

SEQ ID NO: 76206 - DNA, 2070 bp, Streptococcus pneumoniae; identical to SEQ ID NO: 71978

SEQ ID NO: 76207 - DNA, 1818 bp, Streptococcus pneumoniae; identical to SEQ ID NO: 71979

SEQ ID NO: 76208 - DNA, 2070 bp, Streptococcus pneumoniae; identical to SEQ ID NO: 71978

SEQ ID NO: 76209 - DNA, 1818 bp, Streptococcus pneumoniae; identical to SEQ ID NO: 71979

SEQ ID NO: 76210 - DNA, 2100 bp, Streptococcus pneumoniae; identical to SEQ ID NO: 73328

SEQ ID NO: 76211 - DNA, 1818 bp, Streptococcus pneumoniae; identical to SEQ ID NO: 73329

SEQ ID NO: 76212 - DNA, 2070 bp, Streptococcus pneumoniae; identical to SEQ ID NO: 71978

SEQ ID NO: 76213 - DNA, 1818 bp, Streptococcus pneumoniae; identical to SEQ ID NO: 71979

SEQ ID NO: 76214 - DNA, 1926 bp, Salmonella enterica; identical to SEQ ID NO: 72180
  subsp. enterica serovar Typhimurium str. DT104

SEQ ID NO: 76215 - DNA, 1662 bp, Salmonella enterica; identical to SEQ ID NO: 72181
  subsp. enterica serovar Typhimurium str. DT104

SEQ ID NO: 76216 - DNA, 2100 bp, Streptococcus pneumoniae; identical to SEQ ID NO: 73328

SEQ ID NO: 76217 - DNA, 1818 bp, Streptococcus pneumoniae; identical to SEQ ID NO: 73329

SEQ ID NO: 76218 - DNA, 2088 bp, Streptococcus pneumoniae; identical to SEQ ID NO: 73976

SEQ ID NO: 76219 - DNA, 1818 bp, Streptococcus pneumoniae; identical to SEQ ID NO: 76075

SEQ ID NO: 76220 - DNA, 1758 bp, Streptococcus pneumoniae; identical to SEQ ID NO: 72172

SEQ ID NO: 76221 - DNA, 1539 bp, Streptococcus pneumoniae; identical to SEQ ID NO: 72173

SEQ ID NO: 76222 - DNA, 2070 bp, Streptococcus pneumoniae; identical to SEQ ID NO: 71808

SEQ ID NO: 76223 - DNA, 1818 bp, Streptococcus pneumoniae; identical to SEQ ID NO: 71809

SEQ ID NO: 76224 - DNA, 2070 bp, Streptococcus pneumoniae; identical to SEQ ID NO: 71978

SEQ ID NO: 76225 - DNA, 1818 bp, Streptococcus pneumoniae; identical to SEQ ID NO: 71979

SEQ ID NO: 76226 - DNA, 2100 bp, Streptococcus pneumoniae; identical to SEQ ID NO: 73328

SEQ ID NO: 76227 - DNA, 1818 bp, Streptococcus pneumoniae; identical to SEQ ID NO: 73329

SEQ ID NO: 76228 - DNA, 2070 bp, Streptococcus pneumoniae; identical to SEQ ID NO: 71808

SEQ ID NO: 76229 - DNA, 1818 bp, Streptococcus pneumoniae; identical to SEQ ID NO: 71809

SEQ ID NO: 76230 - DNA, 2100 bp, Streptococcus pneumoniae; identical to SEQ ID NO: 73328

SEQ ID NO: 76231 - DNA, 1818 bp, Streptococcus pneumoniae; identical to SEQ ID NO: 73329

SEQ ID NO: 76232 - DNA, 2070 bp, Streptococcus pneumoniae; identical to SEQ ID NO: 71808

SEQ ID NO: 76233 - DNA, 1818 bp, Streptococcus pneumoniae; identical to SEQ ID NO: 71809

SEQ ID NO: 76234 - DNA, 2100 bp, Streptococcus pneumoniae; identical to SEQ ID NO: 73328

SEQ ID NO: 76235 - DNA, 1818 bp, Streptococcus pneumoniae; identical to SEQ ID NO: 73329

SEQ ID NO: 76236 - DNA, 2070 bp, Streptococcus pneumoniae; identical to SEQ ID NO: 71808

SEQ ID NO: 76237 - DNA, 1818 bp, Streptococcus pneumoniae; identical to SEQ ID NO: 71809

SEQ ID NO: 76238 - DNA, 1926 bp, Salmonella enterica; identical to SEQ ID NO: 72180
  subsp. enterica serovar Typhimurium str. DT104

SEQ ID NO: 76239 - DNA, 1662 bp, Salmonella enterica; identical to SEQ ID NO: 72181
  subsp. enterica serovar Typhimurium str. DT104

SEQ ID NO: 76240 - DNA, 1926 bp, Salmonella enterica; identical to SEQ ID NO: 72180
  subsp. enterica serovar Typhimurium str. DT104

SEQ ID NO: 76241 - DNA, 1662 bp, Salmonella enterica; identical to SEQ ID NO: 72181
  subsp. enterica serovar Typhimurium str. DT104

SEQ ID NO: 76242 - DNA, 2070 bp, Streptococcus pneumoniae; identical to SEQ ID NO: 71978

SEQ ID NO: 76243 - DNA, 1818 bp, Streptococcus pneumoniae; identical to SEQ ID NO: 71979

SEQ ID NO: 76244 - DNA, 2100 bp, Streptococcus pneumoniae; identical to SEQ ID NO: 73328

SEQ ID NO: 76245 - DNA, 1818 bp, Streptococcus pneumoniae; identical to SEQ ID NO: 73329

SEQ ID NO: 76246 - DNA, 2070 bp, Streptococcus pneumoniae
atgaagttaacaaaagtaattattaataattttagatcattcggtgaaagtcaaattattgaattaaacaatcaaactgtactgattgggaataatagttcgggaaaaacaactgtattacaagcattgagtaagctgttttcggacaaacaaaatgatagaataataaaaaaaagtgattttcaccttccaaaaggttcaaggcccggagaaaatactagaaacctctttatagaaactatttttgagtttgatgaacttgatggaactccctatagtcaagcaattccatcgtttttcgaacactttacagtttctaaagatggtgccaaaccatttctacgaatcaggttagaatctttttgggaagatgatggaacagttgaaggaagtattgatactcaattctattatatttcatctgatgaagatactattagagatgaagacaaacatcgtgctcctagaaaggatttggataaaattagggtactttatgtacctgcttcaagaacgcctgagaaggagttgggtaatgcttcaggtagtatgttaagtaggttggtaaatagtataaattggaccgaagatgagataaatgaaattacagataaaattgatgagttgaataacacctttttatctgaaaatggagcattgactcagatcaacaatgagattcagaagtcatgggaattatatcatgaagataaccgtttttctcaagcagagttgattattaattcttctgagatggcggcagcacttagacagattgccttaaaattttcaccaacaaccactgaagaagcatttacagtttcagatctaggagatggactgagatctattttttatttttcacttgttgattcgatacttgatattgagttagaaattaccaaagaccgtgaagaaaatcctgataatccaagatttaagttgattccaccagtactaactatcctagcaatagaagaaccagaaaatcatattgctccacatcacattggaaaactgataaaaaggtttaagcaattaggcaataatgacaactcccaagtaattttaacgtcacattctccagctattgtaaaaagaattgacccagaagatttgaagtatttaagaatagaaaataatgacagagttcttcaaaccattgtttctgatatacagctacctccagctatagatgaatcttataaatatattaaaggagcaattcaagcttatcctgaactatattttgcgaagttagtagttctaggtgaaggcgacagtgaggaactgctattaccaaagttttttgatttacttgggaaagaggtagatagctctcagatttcaattgtccctttagggggcagacatgtcaactatttttggaaattattgaatgctctcagaattcctcatattaccttgttggattttgataatgagagatacggaggtggttggggaagaataaaatacatttctcaacatctgtatgagctgaacacagagtttcaagaatggttccatactcagagacttgattttaatgaaattgggtcacgaggttgtgaatcgataggagctcaacgtctgattaattggtttaataaactcgaagaatttaatgtctacttttcatcgcctttagatattgatttcttgatgctacaacattataaagacaattatctgaatactttatccccaatagaaggaccagttgtttcatataatgattcggatggaagtagtaaaaaagtgaaattgagtgatttagactgtcttgatagattgcagttagaaggtttcaacaaacgtaaagaggaagcaataagagctactttaaaagataagagtggacatggcgatagtttcaatgaagaagaaaaagaattaatgatttggtatcaatatttctttttaggtagaggaaaaccaacaactcatatgcaatttttatcatctattagtgatgatgaattaacaagaaatctaccccctgtatttgaaaaaatagttaacagtgctgaagaattacttggagatattcaacatggtaaagagtga

SEQ ID NO: 76247 - DNA, 1818 bp, Streptococcus pneumoniae; identical to SEQ ID NO: 71809

SEQ ID NO: 76248 - DNA, 2088 bp, Streptococcus pneumoniae; identical to SEQ ID NO: 73976

SEQ ID NO: 76249 - DNA, 1818 bp, Streptococcus pneumoniae; identical to SEQ ID NO: 73977

SEQ ID NO: 76250 - DNA, 2070 bp, Streptococcus pneumoniae; identical to SEQ ID NO: 71978

SEQ ID NO: 76251 - DNA, 1818 bp, Streptococcus pneumoniae; identical to SEQ ID NO: 71979

SEQ ID NO: 76252 - DNA, 2100 bp, Streptococcus pneumoniae; identical to SEQ ID NO: 76158

SEQ ID NO: 76253 - DNA, 1818 bp, Streptococcus pneumoniae; identical to SEQ ID NO: 76159

SEQ ID NO: 76254 - DNA, 2070 bp, Streptococcus pneumoniae; identical to SEQ ID NO: 71978

SEQ ID NO: 76255 - DNA, 1818 bp, Streptococcus pneumoniae
atggtaaagagtgaggagtggtttcctaaaggagatatcattttagaagagactgcattaggagccgtcaaagatgtgactaactgtttagtcattgctggaccaggtgctgggaaaactgaattactagctcaaaagttagactatctattctctacaaataaatgcgtttctccgaaaaaaattctagcattaagtttcaaaacggatgctgcatcaaatttgaaagaaagagttaagaaacgttatggtgatgaatatgcttctcgttttacctcattaacctattcggcttttgaaaagagaattttagaccaatttagagatgttctacctgaggatatacgaccatcaagagattatttgattgaagattggtatactataaaagaactactctctatgaatggaattaatgttaatggatggagaatgtcagatataagaagatatgtcgaaaacatcatacttaacaatggggataatcacaagtttaaaactgacttactaaaaggaacacaagataataagccggtcctcttgtataggcaaataacaaagttgagtactcaaataatagatactaacgaatacatccgtaaagcacttcaaatgacatacgattttgtatttctagatgaatttcaggatactacatatgcccagtatgatttattaaaaacttgttttttaggttcgtcttgtaaattaacagcagttggagatgataagaaagccattatgagatgggcaggtgcaaagcctgatatttttccagactatattcgagactttaatccaaatgaatatcaattgttgatgaatcaccgctctgtacctaagcttgtagaatttcaaaaagaggttcatcagatattaaatagtaatcacagttctattcagacaaataattatccagaatttcaagagggtgaaataacattatttgaatttgaaaatgaaagtttagaagctaagttaattgcaaatgatatagaattaaaaattcaaggaggtatacgaccatcagaaatttgtatcctagcaaaacaaaaggttggtatttatagtttcgaattgatatctatattaaatagcaaagggattaaagcaagaattgaaaatgaatatcaggatattttaaaagatcctacgtgtaacctattattagatttaatatcatgcagtcaaggaaaacgagatcctttaatttgggaaaatattagtaatttttatggaaatatcaatggaatagatgagttaactgatgaattaattttagcaaaatcctataaggagattgacaatatagttagtgatattacttacctaatttcaaattttattcccaatgaagaaagtatgctaaaattaattgattgtattattgaaaaaatagatgaaaaaagaattatttccaatttttcaacatacaatggaaaaagtgacctagatatcattgtcaagaacttttcaaagttattatacatagaatattctcaaacacaaggtgaatggctagatacagtctctagtttcaagggtgaaaactcaattccaattatgactatccataagagtaaaggattagaatatgaggtagtctattttctaggcttggaggattctgcattctggagttttaataatcagccggaagaagataaaagtgcattctttgtcgcactttcaagagcaaaaagtcacttaatattcacatattgtaaattgagaaataatagtccgcaaaataatagaaatattaatgagatatattcattgctgactcaatccaatttagttgatgttattaattaa

SEQ ID NO: 76256 - DNA, 1758 bp, Streptococcus pneumoniae; identical to SEQ ID NO: 72172

SEQ ID NO: 76257 - DNA, 1539 bp, Streptococcus pneumoniae; identical to SEQ ID NO: 72173

SEQ ID NO: 76258 - DNA, 2088 bp, Streptococcus pneumoniae; identical to SEQ ID NO: 73976

SEQ ID NO: 76259 - DNA, 1818 bp, Streptococcus pneumoniae; identical to SEQ ID NO: 73977

SEQ ID NO: 76260 - DNA, 2088 bp, Streptococcus pneumoniae; identical to SEQ ID NO: 73976

SEQ ID NO: 76261 - DNA, 1818 bp, Streptococcus pneumoniae; identical to SEQ ID NO: 76075

SEQ ID NO: 76262 - DNA, 2088 bp, Streptococcus pneumoniae; identical to SEQ ID NO: 73976

SEQ ID NO: 76263 - DNA, 1818 bp, Streptococcus pneumoniae; identical to SEQ ID NO: 76075

SEQ ID NO: 76264 - DNA, 2070 bp, Streptococcus pneumoniae; identical to SEQ ID NO: 71808

SEQ ID NO: 76265 - DNA, 1818 bp, Streptococcus pneumoniae; identical to SEQ ID NO: 71809

SEQ ID NO: 76266 - DNA, 2070 bp, Streptococcus pneumoniae; identical to SEQ ID NO: 71978

SEQ ID NO: 76267 - DNA, 1818 bp, Streptococcus pneumoniae; identical to SEQ ID NO: 71979

SEQ ID NO: 76268 - DNA, 2070 bp, Streptococcus pneumoniae; identical to SEQ ID NO: 71808

SEQ ID NO: 76269 - DNA, 1818 bp, Streptococcus pneumoniae; identical to SEQ ID NO: 71809

SEQ ID NO: 76270 - DNA, 2070 bp, Streptococcus pneumoniae; identical to SEQ ID NO: 71978

SEQ ID NO: 76271 - DNA, 1818 bp, Streptococcus pneumoniae; identical to SEQ ID NO: 71979

SEQ ID NO: 76272 - DNA, 2070 bp, Streptococcus pneumoniae; identical to SEQ ID NO: 71808

SEQ ID NO: 76273 - DNA, 1818 bp, Streptococcus pneumoniae; identical to SEQ ID NO: 71809

SEQ ID NO: 76274 - DNA, 2241 bp, Streptococcus agalactiae; identical to SEQ ID NO: 72338

SEQ ID NO: 76275 - DNA, 2019 bp, Streptococcus agalactiae
atgacatatacaattagtacagagaataaacaattagagttagacattcagaaagatattaatgagtgtttagataactttgagagcttttgttttgatgccggtgctggtgcagggaaaacctatgcattacaaaagtcaattgaacatattttgaagacggagggagaaaatttaaaattacgaaatcaaaaaatcttatgtatcacttacactaatgctgctaaagatgagattcttagtcggattggtaaaaattctgcaatactggcctctacaatccatgaatttctatgggggtttatttctattcagcaagagttactgactatagaacatgagaaaaaaattaaagaggaacttaacggaattgaacaaaagataattgataatcctctttttggcagtgttaatctggttgatttccataatgcgattagtgatgaagaatttctgaaagtattctatagtacaccaattagtcctgcaggagattttaaatctatgattaaagggtacagtgaatactttagcccctatctaagtaatgttaataagtttagcagtttagttaagaatgttgataagaagtacaaacttgaagaaacattgaaagaaattaagaataagaaatctaaaaaaatcatctataatcctattcgaaaccgtgataaacttgaaaattatgtcattagccatgatacgttattgctttactgtaggaatatcattacgagtcagaatttattaaagagattgttttcagatagatatccatatgtcttagttgatgagtatcaggatacggatgaaaaagttgtcgatataatagatagtattagaaaatttacaatttgtaaaaaaaactttgtggtaggtttttttggtgatactctacaaaatatttatagttccggagtgggaaaacttccaaataaagaagaatataagagtataactaaaatttttaatcgtagatcgtcgaaccaaattgtagagttgattgaaaagattagaaatgataattttggtcaacaatctatatatactgattttgataacggatcctataatttttatatagctgatgacgattttgacttagatatttttttacaggaaaaaaacttagttagtaatactgcttgccttttaatgaagaatgatgatattgctagggtacgcggattcgatgtattattagcaattataaaaaaatttcctagatttggtggcaataactttgataatgtgaataatgaatttttgcagaaaaatttgcagcatatgggatggtttttaagagagattcttactttcatagactttattcaaaagtcatcagattataactcaactgttaaggaaattgttcagtttataggaccgtctaaatcaacaataacattcggagagatgaaacagtttattagtagtttgagaggaattaacttgtcaacattgacaattgatgaatgtattaataaaattgctaatatccaagaacgaatatcaggtgaagatattttaagaaaaatattctcgatagatgatactactgaaaatattttattgaacattaaaaatcgtgcctatgattatttttactatttgcaggattcggaggagtattccgaaagagaaatgatagttattgataatttttttaggttagatgttactcaatttatcaagtggtataaatatatttttgatgacttaaaaaatgaggaaattagttattatacattgcatggttcaaagggattagaatttgataatgtagttgttgtattacaagataactttgctgggaagagaaattattgtaaatatttttttgaaaattataataatttaattgattctgatttacaatttcaagaagttcgcaatcttctttatgtagcatgttcaagagcaaaaataaaactttgtgtaatctacatttctgatacactggaagatgcgttaaagaatattgaaagtatttttggtgagattcaatatttagcataa

SEQ ID NO: 76276 - DNA, 2070 bp, Streptococcus pneumoniae
atgaagttaacaaaagtaattattaataattttagatcattcggtgaaagtcaaattattgaattaaacaatcaaactgtactgattgggaataatagttcgggaaaaacaactgtattacaagcattgagtaagctgttttcggacaaacaaaatgatagaataattaaaaaaagtgattttcaccttccaaaaggttcaaggcccggagaaaatactagaaacctctttatagaaactatttttgagtttgatgaacttgatggaactccctatagtccagcaattccatcgtttttcgaacactttacagtttctaaagatggtgccaaaccatttctacgaatcaggttagaatcttcttgggaagatgatggaacagttgaaggaagtattgatactcaattctattatatttcatctgatgaagatactattagagatgaagacaaacatcgtgctcctagaaaggatttggataaaattagggtactttatgtacctgcttcaagaacgcctgagaaggagttgggtaatgcttcaggtagtatgttaagtaggttggtaaatagtataaattggaccgaagatgagataaatgaaattacagataaaattgatgagttgaataacacctttttatctgaaaatggagcattgaatcagatcaacaatgagattcagaagtcatgggaattatatcatgaagataaccgtttttctcaagcagagttgattattaattcttctgagatggcggcagcacttagacagattgccttaaaattttcaccaacaaccactgaagaagcatttacagtttcagatctaggagatggactgagatctattttttatttttcacttgttgattcgatacttgatattgagttagaaattaccaaagaccgtgaagaaaatcctaataatccaagatttaagttgattccaccagtactaactatcctagcaatagaagaaccagaaaatcatattgctccacaccacattggaaaactgataaaaaggtttaagcaattaggcaataatgacaactctcaagtaattttaacgtcacattctccagctattgtaaaaagaattgacccagaagatttgaagtatttaagaatagaaaataatgacagagttcttcaaaccattgtttctgatatacagctacctctagctatagatgaatcttataaatatattaaaggagcaattcaagcttatcctgaactatattttgcgaagttagtagttttaggtgaaggcgacagtgaggaactgctattaccaaagttttttgatttacttgggaaagaggtagatagctctcagatttcaattgtccctttagggggcagacatgtcaactatttttggaaattattgaatgctctcagaattcctcatattaccttgttggattttgataatgagagatacggaggtggttggggaagaataaaatacatttctcaacatctgtatgagctgaacacagagtttcaagaatggttcaatactcagagacttgattttaatgaaattgggtcacgaggttgtgaatcgataggagctcaacgtctgattaattggtttaataaactcgaagaatttaatgtctacttttcatcgcctttagatattgatttcttgatgctacaacattataaagacaattatctgaatactttatccccaatagaaggaccagttgtttcatataatgattcggatggaagtagtaaaaaagtgaaattgagtgatttagactgtcttgatagattgcagttagaaggtttcaacaaacgtaaagaggaagcaataagagctactttaaaagataagagtgggtcaggtgatagttttactgaagaggaaaagaaactcatgatttggtatcaatatttctttttaggtagaggaaaaccaacaactcatatgcaatttttatcatctattagcgatgatgaattaacaagaaatctacctcctgtgtttgaaaaaatggttaaacgtgctgaagaattacttggagatattgaacatgatgaggagtga

SEQ ID NO: 76277 - DNA, 1818 bp, Streptococcus pneumoniae
atgatgaggagtgaagagtggcatcctaaaggagatattgaattagagaaggctgctttaggagctgtcaaggatgtgaccaacagtctagtcattgctggaccaggttcggggaaaactgaattactagctcaaaagttagactatctattctctacaaataaatgcatttctccgaaaaaaattttagcattaagttttaagacagacgccgcatcaaacttgaaagaaagagtgaaaaaacggtatggtgaggagtatgcttctcgatttacctctttaacctattcagcatttgaaaagagaattttagatcagtttagagatgccctccctgaagatataagaccagcaagagactacctgattgatgattgggatgttataaaagaaacactttatgaaaatgacattaatgttcatgggatgagaatgtcagatataagaagatatgtcgaaaacatcatacttaacaatggggataatcacaagtttaaaactgacttactaaaaggaacacaagataataagccggtcctcttgtataggcaaataacaaagttgagtactcaaataatagatactaacgaatacatccgtaaagcacttcaaatgacatacgattttgtatttctagatgaatttcaggatactacatatgcccagtatgatttattaaaaacttgttttttaggttcgtcttgtaaattaacagcagttggagatgataagcaagccattatgagatgggcaggtgcaaagcctgatatttttccagactatattcgagactttaattcaaatgaatatcaattgttgatgaatcatcgctctgtacctaagcttgtagaatttcaaaaagaggttcatcagatattaaatagtaatcacagttctattcagacaaataattatccagaatttcaagagggtgaaataacattatttgaatttgaaaatgaaagtttagaagctaagttaattgcaaatgatatagaatcaaaaattcaaggaggtatacgaccatcagaaatttgtatcctagcaaaacaaaaggttggtatttatagtttcgaattgatatctatattaaatagcaaagggattaaagcaagaattgaaaatgaatatcaggatattttaaaagatcctacgtgtaacctattattagatttaatatcatgcagtcaaggaaaacgagatcctttaatttgggaaaatattagtaatttttatggaaatatcaatggaatagatgagttaactgatgaattaattttagcaaaatcctataaggagattgacaatatagttagtgatattacttacctaatttcaaattttattcccaatgaagaaagtatgctaaaattaattgattgtattattgaaaaaatagatgaaaaaagaattatttccaatttttcaacatacaatggaaaaagtgacctagatatcattgtcaagaacttttcaaagatattatacatagaatattctcaaacacaaggtgaatggctagatacagtctctagtttcaagggtgaaaactcaattccaattatgactatccataagagtaaaggattagaatatgaggtagtctattttctaggcttggaggattctgcattctggagttttaatgatcagccggaagaagataaaagtgcattctttgtcgcactttcaagagcaaaaagtcacttaatattcacatattgtaaattgagaaataatagtccgcaaaataatagaaatattaatgagatatattcattgctgactcaatccaatttagttaatgttattaattaa

SEQ ID NO: 76278 - DNA, 1758 bp, Streptococcus pneumoniae; identical to SEQ ID NO: 72172

SEQ ID NO: 76279 - DNA, 834 bp, Streptococcus pneumoniae
atgagtgatattgctacacaggacaagaatgtcaaaaaagaattgttagaataccaaggaaatattttaattttagcgaacgcaggttcgggaaaaacaacttttttaactaaaaagctaaaaagtgattctaaacgattaaataattatcaaaaattagcagcaataacttttactcgaaatgcaacggaggaaataaagcaaaaattagttgatattccggacaacgttgttgtatcgaccatagattcgtttttagataaagaaataatccttccttttcttaatcagaaatacgaaattcaaacatctgtacagtttagctttcggatagaccataattttagcgactatagcactggaataaaacaaatattgcaggatggtattttcgggacttacgactttcctacttctaaacacggcaagaatttcaaatgtgaagttgctttagatattttgaagacaatagattctgcgtcagaatatataaaatataaatttaatactttgtatattgatgaatttcaagattgtgaccagtctatgaatgatttatttctgtatctaaaaaatgagttagggattcctttatttattgtaggagatgataagcaatctatttatcagtggagaggagcatcacccaaatatataaataatttatggaaaaacaaaaatgattttagaaaaaagagatttattgggaattttagaagtttgcctagaatagtggatttctctttagctctgactcctgaagtgactgtcgataatattagagaagagggttcaattctatatttagaacctaatcaggattatccaaaataa

SEQ ID NO: 76280 - DNA, 2070 bp, Streptococcus pneumoniae; identical to SEQ ID NO: 71978

SEQ ID NO: 76281 - DNA, 1818 bp, Streptococcus pneumoniae
atggtaaagagtgaggagtggtttcctaaaggagatatcattttagaagagactgcattaggagccgtcaaagatgtgactaactgtttagtcattgctggaccaggtgctgggaaaactgaattactagctcaaaagttagactatctattctctacaaataaatgcgtttctccgaaaaaaattctagcattaagtttcaaaacggatgctgcatcaaatttgaaagaaagagttaagaaacgttatggtgatgaatatgcttctcgttttacctcattaacctattcggcttttgaaaagagaattttagaccaatttagagatgttctacctgaggatatacgaccatcaagagattatttgattgaagattggtatactataaaagaactactctctatgaatggaattaatgttaatggatggagaatgtcagatataagaagatatgtcgaaaacatcatacttaacaatggggataatcacaagtttaaaactgacttactaaaaggaacacaagataataagccggtcctcttgtataggcaaataacaaagttgagtactcaaataatagatactaacgaatacatccgtaaagcacttcaaatgacatacgattttgtatttctagatgaatttcaggatactacatatgcccagtatgatttattaaaaacttgttttttaggttcgtcttgtaaattaacagcagtgggagatgataaacaagccattatgagatgggcaggtgcaaagcctgatatttttccagactatattcgagactttaatccaaatgaatatcaattgttgatgaatcaccgctctgtacctaagcttgtagaatttcaaaaagaggttcatcagatattaaatagtaatcacagttctattcagacaaataattatccagaatttcaagagggtgaaataacattatttgaatttgaaaatgaaagtttagaagctaagttaattgcaaatgatatagaattaaaaattcaaggaggtatacgaccatcagaaatttgtatcctagcaaaacaaaaggttggtatttatagtttcgaattgatatctatattaaatagcaaagggattaaagcaagaattgaaaatgaatatcaggatattttaaaagatcctacgtgtaacctattattagatttaatatcatgcagtcaaggaaaacgagatcctttaatttgggaaaatattagtaatttttatggaaatatcaatggaatagatgagttaactgatgaattaattttagcaaaatcctataaggagattgacaatatagttagtgatattacttacctaatttcaaattttattcccaatgaagaaagtatgctaaaattaattgattgtattattgaaaaaatagatgaaaaaagaattatttccaatttttcaacatacaatggaaaaagtgacctagatatcattgtcaagaacttttcaaagttattatacatagaatattctcaaacacaaggtgaatggctagatacagtctctagtttcaagggtgaaaactcaattccaattatgactatccataagagtaaaggattagaatatgaggtagtctattttctaggcttggaggattctgcattctggagttttaataatcagccggaagaagataaaagtgcattctttgtcgcactttcaagagcaaaaagtcacttaatattcacatattgtaaattgagaaataatagtccgcaaaataatagaaatattaatgagatatattcattgctgactcaatccaatttagttgatgttattaattaa

SEQ ID NO: 76282 - DNA, 2070 bp, Streptococcus pneumoniae; identical to SEQ ID NO: 71978

SEQ ID NO: 76283 - DNA, 1818 bp, Streptococcus pneumoniae; identical to SEQ ID NO: 71979

SEQ ID NO: 76284 - DNA, 2070 bp, Streptococcus pneumoniae; identical to SEQ ID NO: 71808

SEQ ID NO: 76285 - DNA, 1818 bp, Streptococcus pneumoniae; identical to SEQ ID NO: 71809

SEQ ID NO: 76286 - DNA, 2100 bp, Streptococcus pneumoniae; identical to SEQ ID NO: 73328

SEQ ID NO: 76287 - DNA, 1818 bp, Streptococcus pneumoniae; identical to SEQ ID NO: 73329

SEQ ID NO: 76288 - DNA, 2070 bp, Streptococcus pneumoniae; identical to SEQ ID NO: 71978

SEQ ID NO: 76289 - DNA, 1818 bp, Streptococcus pneumoniae; identical to SEQ ID NO: 71979

SEQ ID NO: 76290 - DNA, 2088 bp, Streptococcus pneumoniae; identical to SEQ ID NO: 73976

SEQ ID NO: 76291 - DNA, 1818 bp, Streptococcus pneumoniae; identical to SEQ ID NO: 76075

SEQ ID NO: 76292 - DNA, 2088 bp, Streptococcus pneumoniae; identical to SEQ ID NO: 73976

SEQ ID NO: 76293 - DNA, 1818 bp, Streptococcus pneumoniae; identical to SEQ ID NO: 73977

SEQ ID NO: 76294 - DNA, 2088 bp, Streptococcus pneumoniae; identical to SEQ ID NO: 73976

SEQ ID NO: 76295 - DNA, 1818 bp, Streptococcus pneumoniae; identical to SEQ ID NO: 76075

SEQ ID NO: 76296 - DNA, 1758 bp, Streptococcus pneumoniae; identical to SEQ ID NO: 72172

SEQ ID NO: 76297 - DNA, 1539 bp, Streptococcus pneumoniae; identical to SEQ ID NO: 72173

SEQ ID NO: 76298 - DNA, 2070 bp, Streptococcus pneumoniae; identical to SEQ ID NO: 71978

SEQ ID NO: 76299 - DNA, 1818 bp, Streptococcus pneumoniae; identical to SEQ ID NO: 71979

SEQ ID NO: 76300 - DNA, 2088 bp, Streptococcus pneumoniae; identical to SEQ ID NO: 73976

SEQ ID NO: 76301 - DNA, 1818 bp, Streptococcus pneumoniae; identical to SEQ ID NO: 76075

SEQ ID NO: 76302 - DNA, 2070 bp, Streptococcus pneumoniae; identical to SEQ ID NO: 71978

SEQ ID NO: 76303 - DNA, 1818 bp, Streptococcus pneumoniae; identical to SEQ ID NO: 71979

SEQ ID NO: 76304 - DNA, 2070 bp, Streptococcus pneumoniae; identical to SEQ ID NO: 71978

SEQ ID NO: 76305 - DNA, 1818 bp, Streptococcus pneumoniae; identical to SEQ ID NO: 71979

SEQ ID NO: 76306 - DNA, 2070 bp, Streptococcus pneumoniae; identical to SEQ ID NO: 71978

SEQ ID NO: 76307 - DNA, 1818 bp, Streptococcus pneumoniae; identical to SEQ ID NO: 71979

SEQ ID NO: 76308 - DNA, 2070 bp, Streptococcus pneumoniae; identical to SEQ ID NO: 71808

SEQ ID NO: 76309 - DNA, 1818 bp, Streptococcus pneumoniae; identical to SEQ ID NO: 71809

SEQ ID NO: 76310 - DNA, 2088 bp, Streptococcus pneumoniae; identical to SEQ ID NO: 73976

SEQ ID NO: 76311 - DNA, 1818 bp, Streptococcus pneumoniae; identical to SEQ ID NO: 76075

SEQ ID NO: 76312 - DNA, 1926 bp, Salmonella enterica; identical to SEQ ID NO: 72180
  subsp. enterica serovar Typhimurium str. DT104

SEQ ID NO: 76313 - DNA, 1662 bp, Salmonella enterica; identical to SEQ ID NO: 72181
  subsp. enterica serovar Typhimurium str. DT104

SEQ ID NO: 76314 - DNA, 2070 bp, Streptococcus pneumoniae; identical to SEQ ID NO: 71808

SEQ ID NO: 76315 - DNA, 1818 bp, Streptococcus pneumoniae; identical to SEQ ID NO: 71809

SEQ ID NO: 76316 - DNA, 2211 bp, Yersinia enterocolitica
atgcatataacaaagctctccctagtaaattacagaaacttcaaaaacgtaaggttatgttttaataagggaataaatacaattattggtgagaatggttctggtaaaactaacttattccgagcgatgagattactgcttgataattcaatgcctcgctttgccactaagcttgctgaaggggatttttgtagggcattaggtaactggcggggtcattggatcattattagtattgagtttagtgacattgctagtgatgaagctagtcagtcgctattccttcatggtttaggaaatgctgaggatgaggttgttactagagcaacatacaatctgatattcagacctaaggcaaacatccgccaagcattgacacagatcccacaaggtaatgtagatgctttaaaaaactatttggacattataactattgatgactatgaaacagtccttactggcaaaagtgttgctgatttcaatgatccgattgtatacaaaagcatagttggtgacttcgaaagagtcatgtttccggaaagattaaataattctgatgccgggataaaattaccaaatattcttaatatgccaaatgaggtttcgtttacctttattaaagcattaagagatgtagtatctgactttcatagcaatagatccaaccccttgcttacgctattaaaacgtaaatcgggagggattagtcatgatgacttccagccgattgctgatttaattgggacattaaacagtaatattgaaggtctatcagagatctgtgatgttcgtgatgatattgttagtactatcggtgacacagtaggcgatacatactctcctgattctatttcgattcgttctggtttaacagacgattcagatcagctttttcagtcattaaaactttttgtaggtgaatcaaatgatggtcacgaaggaaccatcaatgaaatgagtttgggcggtgccaacctgttatttctcacgttaaagttacttgaattcaaataccagcatgctaatcaatcaattgcaaacttcttattaattgaggagccagaagcccacatacatactcatattcagaaatcccttttcgacaacatcagttatgaaaatacacagatcatatactcaactcactcatcacatatatctgaagtaagtaatattagcaatatgaatattattggatttgttgatggtgtctgtgaggtgtttcaaccggcagcggggcttattgaacagaaagttggattcgttcaacgttatcttgatgctatccggagtaacttactgtttgcccgaagtgttgttttagtcgaaggagatgccgaggagttccttattccaatactcctgaaaaaagttttaggattaagtttagatgagattggagtcactctagtcaacatcagaagtactggtttcgagaatattgcaatgttatttgataatgaaaggatcaaaaaacgttgcagcattataacggacctagataaggccttttttgatactacgatttttccgacagatagcgaccaagataaaaaaaagaaaggaaaagctatcggttctcaagaaacagggttcgctcggaaagtaagacttgatgtcttttgtcaaaataacccttggatttcgactttttatgcagagaatacgtttgaggttgatttcatcaaatcatcaaacagcaattatcttgagaaaatcgtaggagatgtttatacacagcaagctacgataaatacagctaaaagtgaactatcttcaactgatatcggaatctcaggttcaagagctttaactatggcaaactatcaaggtaaaggctggtttgcccttaatttaggtaaagttattgattttaaagtgactattcctgaatatatttttgatgctatcaaatttgcgcacggcgacttcaataaagcacttatttttaaaatacttaagcatcgttactactcaatcattgagcatgtcgcatttggcaaggaaaccatcgaaaggctgaatgtagaaggtaatgtggctctaaagcaggaatgggaaacgtacttgactccatatgtgagtggtttagcacgattcactccaaaatgggaagcatttagtccagttgatggtgatatagatgcactcaaggtcgatctgatgggcgatttgccatatgagaaaaacggtattttgacaaggatctaa

SEQ ID NO: 76317 - DNA, 1803 bp, Yersinia enterocolitica
atgtttctgtgggatgaaaatgatctaaataatgagcaggtagcagctgtttgcgagttgaataatgttttcttaattgcatgtccaggaagtggtaaaactaggacacttacttacaaaattgcttttgagctttcaagtttaaaggatcctaaaaagtgggtcgttgctattacctacacacatagagccgctgatgagattcgcgagcgaattgaaattcttgggattaactcatctcagctgtggatcggaactattcatgcgttttgtttagaatggatattgaagccttatggcctctatcatgacaagctgaaaaacggatttaaaatagttaactcttatgactccgaggaaataatatcccgaatatgctctagcatccgtaccgaacgtattaagtatgtggagtgcagtcattattacactccccgaggattaacattaacttgtgctggaagtaaaatatcactggtaagacaaatattagatgactatcactatcatcttgcagaaaatgctcaaatagattttgagcaaattctatatttttcttatgaaatcctatctagtaattcagctgttgctaagatattggcaaatttgttctcttatattcttattgatgaatatcaagacacgaaggaaatacagtattcaattgttgctagtattataaaagctagccagcgcctgctcagaagcttcattgttggagatccaaaccaagctatctacggctctcttggcggctacgcaattacacagttggaacttgagcagttagcagaagtgtcatttactccaatgtccttagataagaactatagaagctctagaaagattatagactattatcgtaattttaatgttacccctagtgcaactgtcgctgcaggtgagcattgtgatcatcctagcattattacttatgacaagattactcaaaaggataatttagttgagcaagtcagcaggcatattgagcatagcgttcaaaatctgggcatctttgagaaggaaatttgcgtcattgcaccttggtggatgcacttggcagcattaactcgtaacttggtaaacagattgcctgattatcatttcgatgggcctggtcttgtgcctttctcacgagacattgataacttttggttcaagttgactcaaattatcctaacagagccatcacctaatatgtatgtaaagcgtcttcggtgggcatctgatatcttaaatgacatggagcttgcgttggttgatgttcattctatactccccaaaaatttcctaaagacagtcaactctatttcgatagatgaatacgatggtatagcttatcttcgagcgttctttgaagcactgtttagcgagttagggatagatttcacactatacccaatgctaaaggaacatcacgaatcattcttcaaaagtacacagaatagaattgataggctaagaaacgagaatgcattttttgcgactggcattgatgcctttcgtaaagcgtttaaacccagaactggtatcaaagtgtcaacaatacatggagtgaagggcggtgaatatgatgttgttatttctttcggccttcttcaagagctggttccgaatttcaatgacctttctgttgaaagtgctaagaaattgctttatgtaattggctctagggctagaaagaacctacatcttatttctgaaacaggaaggtttagtggtagcggtcgatatagaagagagtatcagccaacagaaattttacaccagttgaatttttcatacgatccaaatttaatatga

SEQ ID NO: 76318 - DNA, 2070 bp, Streptococcus pneumoniae; identical to SEQ ID NO: 76246

SEQ ID NO: 76319 - DNA, 1818 bp, Streptococcus pneumoniae; identical to SEQ ID NO: 71809

SEQ ID NO: 76320 - DNA, 2070 bp, Streptococcus pneumoniae; identical to SEQ ID NO: 71808

SEQ ID NO: 76321 - DNA, 1818 bp, Streptococcus pneumoniae; identical to SEQ ID NO: 71809

SEQ ID NO: 76322 - DNA, 2088 bp, Streptococcus pneumoniae; identical to SEQ ID NO: 73976

SEQ ID NO: 76323 - DNA, 1818 bp, Streptococcus pneumoniae; identical to SEQ ID NO: 76075

SEQ ID NO: 76324 - DNA, 2088 bp, Streptococcus pneumoniae; identical to SEQ ID NO: 73976

SEQ ID NO: 76325 - DNA, 1818 bp, Streptococcus pneumoniae; identical to SEQ ID NO: 73977

SEQ ID NO: 76326 - DNA, 2088 bp, Streptococcus pneumoniae; identical to SEQ ID NO: 73976

SEQ ID NO: 76327 - DNA, 1818 bp, Streptococcus pneumoniae; identical to SEQ ID NO: 73977

SEQ ID NO: 76328 - DNA, 2070 bp, Streptococcus pneumoniae; identical to SEQ ID NO: 71808

SEQ ID NO: 76329 - DNA, 1818 bp, Streptococcus pneumoniae; identical to SEQ ID NO: 71809

SEQ ID NO: 76330 - DNA, 2070 bp, Streptococcus pneumoniae
atgaagttaacaaaagtaattattaataattttagatcattcggtgaaagtcaaattattgaattaaacaatcaaactgtactgattgggaataatagttcgggaaaaacaactgtattacaagcattgagtaagctgttttcggacaaacaaaatgatagaataataaaaaaaagtgattttcaccttccaaaaggttcaaggcccggagaaaatactagaaacctctttatagaaactatttttgagtttgatgaacttgatggaactccctatagtcaagcaattccatcgtttttcgaacactttacagtttctaaagatggtgccaaaccatttctacgaatcaggttagaatcttcttgggaagatgatggaacagttgaaggaagtattgatactcaattctattatatttcatctgatgaagatactattagagatgaagacaaacatcgtgctcctagaaaggatttggataaaattagggtactttatgtacctgcttcaagaacgcctgagaaggagttgggtaatgcttcaggtagtatgttaagtaggttggtaaatagtataaattggaccgaagatgagataaatgaaattacagataaaattgatgagttgaataacacctttttatctgaaaatggagcattgactcagatcaacaatgagattcagaagtcatgggaattatatcatgaagataaccgtttttctcaagcagagttgattattaattcttctgagatggcggcagcacttagacagattgccttaaaattttcaccaacaaccactgaagaagcatttacagtttcagatctaggagatggactgagatctattttttatttttcacttgttgattcgatacttgatattgagttagaaattaccaaagaccgtgaagaaaatcctgataatccaagatttaagttgattccaccagtactaactatcctagcaatagaagaaccagaaaatcatattgctccacatcacattggaaaactgataaaaaggtttaagcaattaggcaataatgacaactctcaagtaattttaacgtcacattctccagctattgtaaaaagaattgacccagaagatttgaagtatttaagaatagaaaataatgacagagttcttcaaaccattgtttctgatatacagctacctccagctatagatgaatcttataaatatattaaaggagcaattcaagcttatcctgaactatattttgcgaagttagtagttctaggtgaaggcgacagtgaggaactgctattaccaaagttttttgatttacttgggaaagaggtagatagctctcagatttcaattgtccctttagggggcagacatgtcaactatttttggaaattattgaatgctctcagaattcctcatattaccttgttggattttgataatgagagatacggaggtggttggggaagaataaaatacatttctcaacatctgtatgagctgaacacagagtttcaagaatggttccatactcagagacttgattttaatgaaattgggtcacgaggttgtgaatcgataggagctcaacgtctgattaattggtttaataaactcgaagaatttaatgtctacttttcatcgcctttagatattgatttcttgatgctacaacattataaagacaattatctgaatactttatccccaatagaaggaccagttgtttcatataatgattcggatggaagtagtaaaaaagtgaaattgagtgatttagactgtcttgatagattgcagttagaaggtttcaacaaacgtaaagaggaagcaataagagctactttaaaagataagagtggacatggcgatagtttcaatgaagaagaaaaagaattaatgatttggtatcaatatttctttttaggtagaggaaaaccaacaactcatatgcaatttttatcatctattagtgatgatgaattaacaagaaatctaccccctgtatttgaaaaaatagttaacagtactgaagaattacttggagatattcaacatggtaaagagtga

SEQ ID NO: 76331 - DNA, 1818 bp, Streptococcus pneumoniae; identical to SEQ ID NO: 71979

SEQ ID NO: 76332 - DNA, 2088 bp, Streptococcus pneumoniae; identical to SEQ ID NO: 73976

SEQ ID NO: 76333 - DNA, 1818 bp, Streptococcus pneumoniae; identical to SEQ ID NO: 73977

SEQ ID NO: 76334 - DNA, 2070 bp, Streptococcus pneumoniae; identical to SEQ ID NO: 71978

SEQ ID NO: 76335 - DNA, 1818 bp, Streptococcus pneumoniae; identical to SEQ ID NO: 71979

SEQ ID NO: 76336 - DNA, 1071 bp, Yersinia intermedia
atgctttacctttctcttgtcttatcgtctcaggctattggcagggctgttcttgcagaagaagatgtatcgtttgatcccgataaattacgtccaccagtcttcactctggtagcccttgaggagccagaaaacagcctttcaccacattacttgggccgcattgttagctccctaaatgtcatgacaaaaaacctggatgcgcaagctctcattgctacgcatgcgcccacaatgctgcgccgggtagcacctgagttcatacgttatcttcgactgaatgagtcacgagagacacaggtcacttgtattaaattgcctgatgaaactgatgaggcacataagtttgtgagggaagccgttcaggcgtttccggaagtctatttttcaaggctggtagtgcttggcgaaggtgatagcgaagagattgtgctgccacgcttgcttcaggccaagggtgcgcccgttgatgaatcagccatcacgatagcgcctttgggggggcggcatgtaaaccatttctggcgattacttacagcgttaaagattcccttttttacactgctcgatcttgatgtagcccgccatggggcaggatgggggcgaattaagtacgtaaatgaccagttttccaaacgtcaaaggcgttacaaacttcctgaatctcacggaattccaaaatgggatgatgaaaaacataaaattcggggcttcgaacattatctcgacatgcttgaagagcgcggcgtgtttttctcctacccgatggatttagactttgcaatgttacttgcgtacccagaagcctataacgttgaggaagagaagcccgacaatgcaactataaaagctgttcttggaaaaagtcattacgattcatctcagtacagggatgttgaattagcgctttttaatacctatcaccaacgtttcaagctcggcagtaaacccgcagctcacattgaggcgttaactcagctaaatgatgctgatctacttaaaagcatgccagattcactgaacaggctggctgatgcggttattgccaaactctcggaactgccagaatga

SEQ ID NO: 76337 - DNA, 1665 bp, Yersinia intermedia
atgattactgtcgaagaatggcagcccgcagatggattgacgctggaacctaatgcgaaacgtgcagcgaaagcgagtaaacgttgcctggcactgactgccggaccgggggcgggtaagacggaaatgcttgcacagcgtgctgacttccttttgcgaacaggaacatgtcgataccccaaaaggattctggcgatctcatttaaggttgatgccagcagaaaccttacagaacgcgttgaacgcaggtgtggacgggatctggcttctcgctttgacagttttaccttccacgcatttgccaagcgcatcatagatcgatttaggccggtactcacgggagaatatgccttagatgctggttacaccattgtagacaagaaaagcggggcatctcgtcacgaaatagcattcggcgatctggttccctgtgcaattaaaatattgcaaacgtcacaaatagcccgaaatgcaatccggcaaacttatagtgacattttccttgatgaatttcaggactgcacaaatttacaatatgacctagtaaagctcgcttttcagggaaccaaaattcgactgactgcagtcggtgacacaaaacagaaaattatggcttgggcaggtgctctggacggcattttccagtccttcacaaaggactttaatgcggtgccgctcaacatgtatcgcaatttccgctcaaaaccaacattgctacgtgttcagaacgaaattattcgtaagttagatcctgactctgtaatgcctgatgatcaactgaaaggggacgaaggggaggtttttgccttgaaatttgaagacagtcaaactgaagctatctatctggctgacctaattgatggatggataaataaagagcagctacccccagctgaaattgcagtcctggtttcaaggcaaccagatttgtatgctgatcacctcttcagagagttagagcagcgcggaattccctaccgcaatgagcagcaaatgcaggacatcacggtcgaaccattggctcgtttaatcgttgattacctgtcctgtctttatgcgcagcgggaacctaaagcctggattcgcctgatgaaccagctggttccctttgctgatgaagagattcagaccagcgtacgaaaaggtcttgatcaacttataagaaagcatcgtaaggaagtgtctgatgcaaaaaaaacggaaatgcccttttctgaatggtggagatttggtcgcgctcttttaaagcatataggtttacagacgcttgttgcattatctcctgattatgagtcccctgagcgtctgaaacaggttattcgcgatgccagagaacgtatcaaagatttattggaaatcgaatctgatttacccctcgcattaaaacgatttgcagatgatcaagctgtgcgaattttgaccattcacaaaagcaaaggattagagtttgattcggttgtcatcatggctgtagaaaatgagactttctttggtaaagaagaagaaaatcgctgcgcgttttttgtcggtgtttcgcgagcaaagagacgccttattttaactcatacgaacaagcgtgatgaaccggctaatgctaagcactggaaagttttacggactgctcgattagagtattttgattatgttcttccgtttgtgaggtaa

SEQ ID NO: 76338 - DNA, 2088 bp, Streptococcus pneumoniae; identical to SEQ ID NO: 73976

SEQ ID NO: 76339 - DNA, 1818 bp, Streptococcus pneumoniae; identical to SEQ ID NO: 73977

SEQ ID NO: 76340 - DNA, 2070 bp, Streptococcus pneumoniae; identical to SEQ ID NO: 76276

SEQ ID NO: 76341 - DNA, 1818 bp, Streptococcus pneumoniae; identical to SEQ ID NO: 76277

SEQ ID NO: 76342 - DNA, 2070 bp, Streptococcus pneumoniae; identical to SEQ ID NO: 71978

SEQ ID NO: 76343 - DNA, 1818 bp, Streptococcus pneumoniae; identical to SEQ ID NO: 71979

SEQ ID NO: 76344 - DNA, 2088 bp, Streptococcus pneumoniae; identical to SEQ ID NO: 73976

SEQ ID NO: 76345 - DNA, 1818 bp, Streptococcus pneumoniae; identical to SEQ ID NO: 76075

SEQ ID NO: 76346 - DNA, 2070 bp, Streptococcus pneumoniae; identical to SEQ ID NO: 71808

SEQ ID NO: 76347 - DNA, 1818 bp, Streptococcus pneumoniae; identical to SEQ ID NO: 71809

SEQ ID NO: 76348 - DNA, 2070 bp, Streptococcus pneumoniae; identical to SEQ ID NO: 71978

SEQ ID NO: 76349 - DNA, 1818 bp, Streptococcus pneumoniae; identical to SEQ ID NO: 71979

SEQ ID NO: 76350 - DNA, 1926 bp, Salmonella enterica; identical to SEQ ID NO: 72180
  subsp. enterica serovar Typhimurium str. DT104

SEQ ID NO: 76351 - DNA, 1662 bp, Salmonella enterica; identical to SEQ ID NO: 72181
  subsp. enterica serovar Typhimurium str. DT104

SEQ ID NO: 76352 - DNA, 2070 bp, Streptococcus pneumoniae; identical to SEQ ID NO: 71808

SEQ ID NO: 76353 - DNA, 1818 bp, Streptococcus pneumoniae; identical to SEQ ID NO: 71809

SEQ ID NO: 76354 - DNA, 1758 bp, Streptococcus pneumoniae; identical to SEQ ID NO: 72172

SEQ ID NO: 76355 - DNA, 1539 bp, Streptococcus pneumoniae
atgagtgatattgctacacaggacaagaatgtcaaaaaagaattgttagaataccaaggaaatattttaattttagcgaacgcaggttcgggaaaaacaacttttttaactaaaaagctaaaaagtgattctaaacgattaaataattatcaaaaattagcagcaataacttttactcgaaatgcaacggaggaaataaagcaaaaattagttgatattccggacaacgttgttgtatcgaccatagattcgtttttagataaagaaataatccttccttttcttaatcagaaatacgaaattcaaacatctgtacagtttagctttcggatagaccataattttagcgactatagcactggaataaaacaaatattgcaggatggtattttcgggacttacgactttcctacttctaaacacggcaagaatttcaaatgtgaagttgctttagatattttgaagacaatagattctgcgtcagaatatataaaatataaatttaatactttgtatattgatgaatttcaagattgtgaccagtctatgaatgatttatttctgtatctaaaaaatgagttagggattcctttatttattgtaggagatgataagcaatctatttatcagtggagaggagcatcacccaaatatataaataatttatggaaaaacaaaaatgattttagaaaaaagagatttattgggaattttagaagtttgcctagaatagtggatttctctttagctctgactcctgaagtgactgtcgataatattagagaagagggttcaattctatatttagaacctaatcaggattatccaaaagaagatattattaagtaccttattgataatggtgatataaatttacaagaaaagaattattttttaattggaattaataaagatattgaagaaactgcgacacatttgaatgatattctttcaaataaagttgattacgttagaaaaaatccatttatagattgtactaacagtaattttttgcaatctatggctcaatattattttcttgaagacttttctgagtatgatgtattgaataatctttttcctgaatataacgatgaatttaggaaagaacttttaaaaaaattaaagaggcttcgtcaacgacctacacagtcacttattgaggaaatagcttcgtatttagatgtttcaattacaaattatgaagataagttagaaagtcaaatactgttggaaattttgagtaatttggataataaaaaaatgtttgatacaaatttaatgagtaataatttattaatgactactcatgcatcaaaaggtttggctgcagacactgtagtaatttttgtagaatatctaattgattggcgcacaggattgaaatttgaagatcattgtgttgcaattactagagcaaaatcaaaagtcataattattgataatcgaacaatttatactagtgaaatcaatagattattaagtaacaacaatgggaatttttcttttgaagattttatagaaagaagatatatttga

SEQ ID NO: 76356 - DNA, 2070 bp, Streptococcus pneumoniae; identical to SEQ ID NO: 71808

SEQ ID NO: 76357 - DNA, 1818 bp, Streptococcus pneumoniae; identical to SEQ ID NO: 71809

SEQ ID NO: 76358 - DNA, 1758 bp, Streptococcus pneumoniae; identical to SEQ ID NO: 72172

SEQ ID NO: 76359 - DNA, 1539 bp, Streptococcus pneumoniae; identical to SEQ ID NO: 72173

SEQ ID NO: 76360 - DNA, 2070 bp, Streptococcus pneumoniae; identical to SEQ ID NO: 71808

SEQ ID NO: 76361 - DNA, 1818 bp, Streptococcus pneumoniae; identical to SEQ ID NO: 71809

SEQ ID NO: 76362 - DNA, 2082 bp, Yersinia frederiksenii
atgcgaattgaaaaagttcgagtcgaggggtttcgccttctccaggatgttgaaatcatgctggaagatacttctacagtaatcgtggggcgcaataacagtggaaaaacatccttcactgagatttttgagagatttgccagtgataacggagcacgattccgtcttgaagatttctcgcctgttcagcgtgataaatttctcagtgcaaaattactgagggagcaaggtgccaaagcggaggatgtccttgcgatgcttccgactctatctctcactcttaccttccgctacgacagtacatctccaaatcttgggccgctttccccgtttattattgatctggatacagagtcgacaactgcgattgtgtgtatagaatacaaaacgtctccagcggacctccatattttgtttgatatccaaccagcgcctgagggcgttgagccaagggcttacttcttccgttcattgcgagaaaccttgctcaaggcatatggcacttatgtttcggctatagacccaaccgatccaaaaaatagacgtagtttcgatggttgtgcggatttagcaacattgatgcaatgcaattttgttcgagcacaaagaactctcgatcatgcgaagaatggtgacgcagatgtgataggtaaattactcagtacactttttaagacagcatccactccgactgcggcctcgagagatcaggaacttgccggaaagctgagagaagctgttgaaggtgttgagcgcagtatgcagggcagtttcgatgagatgttaaaaaatctgcttcccgcaatggaagttctgggttttccgagtctcaatgacaccgagcttcgccctgaaacctcattgaacgttgaagctctcctcactggtcacacaaaagttgtctatacaggtactgatggggtgcatctcccggaaggttacaacggattaggaacacgtaacctcatttacatgctcttgcagctcgaaagttaccataagttatatcgagcaagacctgtctgcccggctacgcatcttattttcatcgaagaaccagaagcccatttgcaccctcagatgcaagaggtatttattgcccagcttaatgctgcgataaaaaaactatcggcaagttaccccaacgagccagtgtggaatgttcagttcattatctctacacactcaccccacgttgcaaatgcagcctccttcgaggctgttcggtattttctcaatgaagcgccaaccccaaagaaaccccgtcagacaaaagttaaagatttcaaaaagggattagacagcatttcagctgaagaccaaaacttcctgcaccagtatatgacgctgacaaaatgtgatttatattttgcagataaagccattttggtcgaggggacaaccgaacggttgctaatgcctaagttatgtgaattagtcgataagtcgcttgatgataaacacaagctggccaggcagtacataactaatgttgaagtgggtggtgcctatgcgcacattttttacccattattggatttcctcgaactcaaaacgttggtcataacggacatcgattcaatccagccggtggaaaaactaaatcaacgaggaaaaaaaattacttcctgggaaaaatgccctgtcgcagaggggcaacgcacatctaatgcagcaatcaaacgctggtttcgacctgaagagcacccggatgatgaacaatggcatatcacacccgctgagctgctttcaaaaacggctacagagaaactaaaaggatttcgccgcattgcttaccagatagctgaaaatccagaaacaggaatcagtgcgcgaagctatgaagatgcgcttgttctggcaaatccagaactgtttacatggactaaagagcaggatgcagcgattgaagcatgggaaatagctaagacactcgggaaagcggatacagccttgcagttcgctattcgtgaaaaagaatgggtggtgccacgttatattcatgagggcctggcctggctttcggaaccacttctcgtgcctgaacagacaaatgaacaagcagctctggaggctgtatga

SEQ ID NO: 76363 - DNA, 1731 bp, Yersinia frederiksenii
atgacaaagggcaaagacaatcccgcgctgatagccgcagagaaagcacaaagaaaaatcaatgatgcccttgatgcaggacaaagctttcgtctggaggcgggggccggtgcaggcaaaacctattcgcttgtagctgcactgaagcgtttgattgaagaacaaggagcgactctcgtacggcatgggcaaaaggtggcttgtattacctatactgaagttgcccgtaatgaaattgcacaggagatcgaagagcatccagccattctggtgaataccattcatggtttctcatgggcattcctgcgttcatttcagaaaacattgcgtgaactcttagaggaaatggacgataagaaagaaaagattgagcaaggcggtggtattggaacaaagcctgtggaatatgatatgggcttctttggggttgatgagaacaaaatttcgctgagtcatgatgacatccctaatatgatggcaaaacttttgcaaagggagaaatttcggcagattttcagtcagcagtttccagtgatatttatcgatgaatatcaggatacccatcgtcaatttatggaagcaattactgaatacttcctgaaaccagctacgggtcccttggtgggccttttcggcgaccactggcaaactatttacagaagtgagtacgaacttgccaaatatcccattaaagagatcgctaagggttctaactttcgttctgttccagcaattgtcaaagtattaaataatctacggcctgagctgcgtcaggaagtccataaccctgaagcaaaaggcgaggctcggttcttccacaccaataactacaaaggagagcggactaatgaccggcactccaaacaggatctatcctccgatctgactcgacagacacgtatagcgttgatggagcgactacaggctgaaggttggaacttaagtaaaacaaaagtgctcatgctcacccacaacgtacttgccgcggaacagggatatccaggcatcgtagaggtattcaatggaagaaatgatctatttgccaaaaaagaagatcctgttatcaaattctttgctgaaaacgtagaacctatgtgtgaagcctattgtgcatcccgctatggagatatgttcagaatatacgggtctgcaccagccataactcagcaccaggataaagccagctggcgaagagatatggacattttaaggactttacgtaaagaagggacgatcggacaagtcattgatcacctaaaaactacgaggcgtccagccccgccagaccgcgtattgcgtcgagatgaagagttaaattctttggatagtgctccggtgccagagggggcatctgcgcttaagagatatagtaaactcagagatgttccctataaggaagttattgagatcgctaaatttattgaaaagcaaacggcttttgcaacacagcacagcgttaagggggcggaatttgagaacgttctggttgttttaggcggtggatggaatcattacaactggccactctttctggagctcatcaagactaaagctctgactgaaaaaaataccaagggcttttatcgcgcacgtaatctattctatgtttccctctcccgaccgatggtaaggcttgctgtacttgccacgcaaactatgtcagataaagctttagagtcagcagaagagctttttggaagcgaaaatgtcgaagggttgatcatctcatag

SEQ ID NO: 76364 - DNA, 2088 bp, Streptococcus pneumoniae; identical to SEQ ID NO: 73976

SEQ ID NO: 76365 - DNA, 1818 bp, Streptococcus pneumoniae; identical to SEQ ID NO: 73977

SEQ ID NO: 76366 - DNA, 2070 bp, Streptococcus pneumoniae; identical to SEQ ID NO: 71808

SEQ ID NO: 76367 - DNA, 1818 bp, Streptococcus pneumoniae; identical to SEQ ID NO: 71809

SEQ ID NO: 76368 - DNA, 1938 bp, Yersinia enterocolitica
atgaaacttggaacaattcggttatccggtttccagtcttttggccaggaatcaaccgaacttagtctggaagatactacttatctgattggcccgaatggctcaggtaaaaccgcagtacttcaggccttatgtcggcttttcgcattcgatccagttttgcgtcgtatccaacgctcagatttccatgtcccatttgatgaaaatgaagcccctcaagagcgccaattgtggatagaagctgattttctttttcctgagcttgccgtagatgaagataacagtactgtagccccttattttggccatatgcggctggatgaacaggaaggtattccacgtgtgcgctttcgtcttacggctactatggggccggatggggatatcgaagaaactttagtgtatgtcctagatataaataccgatggctcacctcaaagctcggctcgagtaccacgagctgagcgtcataacatccaagttcactatttacctgctcgacgtgatccagcagatcatatagcttatggagcgaatgcattacttgggcgtttacttcgggctgttcgttgggatgatgaacgcgatacgattaagggattgaccgatcagataagcgatagccttgccgaaaacccttcagtcaatgcttttagtgaacgtttgaaaatgacttgggccactttacacaagggcaaatttttcgctgatcctaaaattacatttgtggcttcagagattgaagcgctgctgagacatttatcggtttcatttactcctagtcatgatggttcgcttgtcgacttctcgcgtttgagtgatggtcaaaagtcgatgctttatctttctctcgtactatcgtctcaggcgatcggcagagcggtgcttgctgaagaagatgtgtcttttgatcccgataagttgcgccctccggtcttcacattgattgcacttgaggaaccagaaaatagtctttctcctcattacctaggacgtatcgtcagtgtcttgaataccatggcgaaaaatgcggatgcgcaagcgcttattgctacacatgcacctacaatgttgcgtcgcgttgctccggaattaattcgttatctacggcttactgaagagcgaaaaacacgaatcacttgcatcaaattgccagctaaaacggatgaggcacacaagtttgtacgagaggctgttcaggcatttccggagatctatttctcgcgcttggttgtgcttggcgaaggtgatagtgaggagatcgtattacctcgtttgcttcaggctaaaggcgcgcctgttgatgagtcagcagttacaatagcgccactgggggggaggcatgtaaatcatttttggaggttgctttcagtattgcagattccatatctaacactgttagatcttgatgttgctcgctacgcagcgggttgggggcgaatcaagtacgttaatgatcagtttgccgtatttgaaccaaggaaattacttccagccgagtgggtgatttcaagatggaataatgatgagacgccaatacgaactcatcatttttttaataatgccgctcaaactgagctgttggatattttcattgagcttcaggatagaggtgtgtttttttcttcgccaatggatttggatttttctatgctcttggcatatcccgaagcctatggtgttgttgaagaagagccggatgagtcaattatcaaagctgtgcttggcaaaagctatttcgacgcatcccaatatagtgaagaagaaaaaaaattgttcgtcacttatcataagagtttcaaacttggtagtaaaccagcagcacacattgatgcgttagcgaagctaaatgacgcagagctacttgcagaaatgcctgagtcgctaagtagcctcgctgatgccgttattgccaaactggcggagttgcctgaatga

SEQ ID NO: 76369 - DNA, 1674 bp, Yersinia enterocolitica
atgattgccgttgaaaaatggcatcctgcaaatgggctgacgcttgaaccaaatgctttgcgtgcgacgaaggagcatgagcattgtcttgcgctcactgcagggcctggggctggtaaaactgaaatgcttgcgcaacgagctgacttccttttgcgcacaggaatatgtcggtatcctaagcggattctggcgatctccttcaagattgatgctagcagaaatctaaaagagcgtgtcgagcgacggtgtggtccaaatttcgcctcgcgttttgacagctataccttccatgcatttgccaagcgtatcattgaccgcttcagacctgtgctaacgggggaatatgccttggatgctgattatacaattgttgataagaaaatcagcccatctcgtactcaaatagagttcggcgatctggttccactggccatccaaatattgcagaactcgaaaatcgccaagaatgctattcgacagacttatagcgatatttttctcgatgagttccaagattgtacgaatatccagtacgacttggttaaacttgcttttcagaggactggtatccgtctcactgcagtgggtgatactaagcaaaaaatcatgggctgggcaggggcgctggatggaattttccaaacctttactaatgattttaatgcagtcccgcttaatatataccgcaatttccgttctaagccacaattgttgcgggttcagaacgaaattattcgtacgcttgatcctgcttctgtcatgtcagatgaacagctggatggtgatgagggggaagtttatgcttggcattttaaaaatagccaagaagaagccgtttgtttggcggatatgattaatggttggatcaatacagaaaaattaccacctgcagaaattgcggttctggtttctaaacaactagacctgtatgccgaccaccttatggtcgagctggaagcgcgtggaattccatatcgtaacgagcagcagatgcaggatattgctgttgaaccagctgcacgcttaatcgtagattatttatcatgcctctacggccaacgtgaacctaaagcttggatccgtctgatgaaccagttgattccttttgccgatgaggaagtccagtccagtgcgcgaaaggatcttgaccgcttgctaaaaaaacagcgcaaagaagcctccatcgctgaactatttgatttgccttactctgggtggtgggcgtttgtggaggctttcttaaagcatattggttcagaaacactcgtggctttgtcgcctgattatgaatcccgaaagcgcctgctggaagttgttcgcgataccaaaacacgagttgaagatttacttcagattgaaccagatttacctcaagcacttgagaggtttgcggatgaacaaactgttcgaattctgaccattcataaaagtaaagggctggaatttgactcggtgattatcatggcggttgaaaacgagattttctttggcaatcaggatgagaatcgctgtgcgtttttcgttggtgtttcgcgagcgaaaagacgattggttctgactcatgtcgatcagcgagaacgccctgctaattctaaacgttggaatgttcgtcgtaccgttcaatctgagtatgttggctatattacgccgtttgtaagggaacaaagatga

SEQ ID NO: 76370 - DNA, 2100 bp, Streptococcus pneumoniae; identical to SEQ ID NO: 73328

SEQ ID NO: 76371 - DNA, 1818 bp, Streptococcus pneumoniae; identical to SEQ ID NO: 73329

SEQ ID NO: 76372 - DNA, 2070 bp, Streptococcus pneumoniae; identical to SEQ ID NO: 71978

SEQ ID NO: 76373 - DNA, 1818 bp, Streptococcus pneumoniae; identical to SEQ ID NO: 71979

SEQ ID NO: 76374 - DNA, 2100 bp, Streptococcus pneumoniae; identical to SEQ ID NO: 73328

SEQ ID NO: 76375 - DNA, 1818 bp, Streptococcus pneumoniae; identical to SEQ ID NO: 73329

SEQ ID NO: 76376 - DNA, 2088 bp, Streptococcus pneumoniae; identical to SEQ ID NO: 73976

SEQ ID NO: 76377 - DNA, 1818 bp, Streptococcus pneumoniae; identical to SEQ ID NO: 76075

SEQ ID NO: 76378 - DNA, 2070 bp, Streptococcus pneumoniae; identical to SEQ ID NO: 71978

SEQ ID NO: 76379 - DNA, 1818 bp, Streptococcus pneumoniae; identical to SEQ ID NO: 71979

SEQ ID NO: 76380 - DNA, 2088 bp, Streptococcus pneumoniae; identical to SEQ ID NO: 73976

SEQ ID NO: 76381 - DNA, 1818 bp, Streptococcus pneumoniae; identical to SEQ ID NO: 73977

SEQ ID NO: 76382 - DNA, 2100 bp, Streptococcus pneumoniae; identical to SEQ ID NO: 73328

SEQ ID NO: 76383 - DNA, 1818 bp, Streptococcus pneumoniae; identical to SEQ ID NO: 73329

SEQ ID NO: 76384 - DNA, 2100 bp, Streptococcus pneumoniae; identical to SEQ ID NO: 73328

SEQ ID NO: 76385 - DNA, 1818 bp, Streptococcus pneumoniae; identical to SEQ ID NO: 73329

SEQ ID NO: 76386 - DNA, 2070 bp, Streptococcus pneumoniae; identical to SEQ ID NO: 71978

SEQ ID NO: 76387 - DNA, 1818 bp, Streptococcus pneumoniae; identical to SEQ ID NO: 71979

SEQ ID NO: 76388 - DNA, 1758 bp, Streptococcus pneumoniae; identical to SEQ ID NO: 72172

SEQ ID NO: 76389 - DNA, 1539 bp, Streptococcus pneumoniae; identical to SEQ ID NO: 72173

SEQ ID NO: 76390 - DNA, 2100 bp, Streptococcus pneumoniae; identical to SEQ ID NO: 73328

SEQ ID NO: 76391 - DNA, 1818 bp, Streptococcus pneumoniae; identical to SEQ ID NO: 73329

SEQ ID NO: 76392 - DNA, 2070 bp, Streptococcus pneumoniae; identical to SEQ ID NO: 71808

SEQ ID NO: 76393 - DNA, 1818 bp, Streptococcus pneumoniae; identical to SEQ ID NO: 71809

SEQ ID NO: 76394 - DNA, 2070 bp, Streptococcus pneumoniae; identical to SEQ ID NO: 76276

SEQ ID NO: 76395 - DNA, 1818 bp, Streptococcus pneumoniae; identical to SEQ ID NO: 76277

SEQ ID NO: 76396 - DNA, 2070 bp, Streptococcus pneumoniae; identical to SEQ ID NO: 71808

SEQ ID NO: 76397 - DNA, 1818 bp, Streptococcus pneumoniae; identical to SEQ ID NO: 71809

SEQ ID NO: 76398 - DNA, 2070 bp, Streptococcus pneumoniae; identical to SEQ ID NO: 71978

SEQ ID NO: 76399 - DNA, 1818 bp, Streptococcus pneumoniae; identical to SEQ ID NO: 71979

SEQ ID NO: 76400 - DNA, 2070 bp, Streptococcus pneumoniae; identical to SEQ ID NO: 71808

SEQ ID NO: 76401 - DNA, 1818 bp, Streptococcus pneumoniae; identical to SEQ ID NO: 71809

SEQ ID NO: 76402 - DNA, 2070 bp, Streptococcus pneumoniae; identical to SEQ ID NO: 71808

SEQ ID NO: 76403 - DNA, 1818 bp, Streptococcus pneumoniae; identical to SEQ ID NO: 71809

SEQ ID NO: 76404 - DNA, 2070 bp, Streptococcus pneumoniae; identical to SEQ ID NO: 71978

SEQ ID NO: 76405 - DNA, 1818 bp, Streptococcus pneumoniae; identical to SEQ ID NO: 71979

SEQ ID NO: 76406 - DNA, 2070 bp, Streptococcus pneumoniae; identical to SEQ ID NO: 71808

SEQ ID NO: 76407 - DNA, 1818 bp, Streptococcus pneumoniae; identical to SEQ ID NO: 71809

SEQ ID NO: 76408 - DNA, 2088 bp, Streptococcus pneumoniae; identical to SEQ ID NO: 73976

SEQ ID NO: 76409 - DNA, 1818 bp, Streptococcus pneumoniae; identical to SEQ ID NO: 76075

SEQ ID NO: 76410 - DNA, 2121 bp, Yersinia mollaretii
atgaaaatatgtagcatagagatcaagaattatcgtttgttaacagaatttcgattggatttagaagataatctttcgttagttattggaaaaaataacacaggtaaaacttctcttttatcagctttggagaagctttatgcagaaacgcgaaaaatctcatttgatgatttcaatgtcaagcttagggataggttaaaagcttttgttgggggagaaaaggctttacctaatgaagatgtgtacgagcctttaggggtggaattacggcttgtattagtatatgaggatgaagacgatcttgggcaagtatcacctttgatcatgagtctagatcctgatgataagtctatattgctcggatttgagtataaaatatctcacagtcaattagtatctttctgtaatgatttcctagaggagagggataattatgatgatgatgtgcttctctatatggcggaaaaacataaaaaatacttcggaggtatttccagaagaagttatctgagtaacgatctctctgtattcacagatttgattaaagaaaaaatttcactagatgaagtgatttcttttaaagctataagcgcaaaaagaaatgtcactaacagggagaatgacaaaactctatcaggacagacggccgatatatataaaataaccgaagagtctgaagaacagaaagatactgttaatcgcttcaagaaaactctacgtggggcagataagaatctaaatggaatatacgaggagatgttttctaaagttctgaaaagtgttgagcgcttcggaggtatttctcaatatgaaacctcaatcactatcgcttctacactgcagcaccaagagttgcttgatggcaatacaacggtgttttatcgtcatgaaactcatgatcttcctgagcattacaatggcttaggatacatgaatttgataagtatgatatttgaaatagagttattgatgacttcgttcagaagatcacttcttgaacgcccggcggctgttaatctgctcttcattgaagagcctgaggttcatacacatccacaaatgcagtatgtattcataaaaaatatcaaagatttgctagaggaaggagtcgtgcgtgaagatggattagttgtaaacttgcaaacagtgatttctacgcactcgtctcacattgtagctgaatgtaactttgatgatattaaatatatgaagcgtaaaggtggggtagttaactgcagtaacttgaaagatcttaaaaaagaatatgatcgagaagattctaaaggtattgatggtcattataaatttttgaagcaatatctgacgctgaaccgggccgaattattttttgccgataaagctattttcgtcgagggtgatacagagcgggttcttttgcctgcaatgatgaaaaaaatcgatgaagaatatcctgagaatgaagtcgcccccttaacttcccaaaacgtatctatcgtagaagtaggtgctcactctcaggtttttgaaaagttcataagttttcttggaatcaaaacattgatcctaacagatatcgacactggtaaaacagtgccggatttagatagtgcggggaaccacaagcgtacccaaaaagatgagcctaaatatacaacggaaaaatgttcgcctatggattctgatgttagtcacacttcgaataatgcgttgtgtttctttcacagcaaggaacgtgaagatattaagtattttctgagtttattcaaggatgacaagaaatttttatttgatggcgaaaaatgggttagagataaaatcggtcagattttcactgcatttcaaattgaagaagaaggttatcgagggcgaagtttcgaagatgctttttttcacgtaaataaagagtttttgggaacagactcggtcgtatttccgtcgcttatcgcaaagcattttgaactgtatgtagctggtcatacaacagcatatgagtttgctgagaaaggagtcgataaaaaaacgacacttgctatagatattttgctcaatagccaaactcaagaaacgccgaaacgaacattttccaattggaacacccctgcatatattcgggagggattggaatggctgcgcaaatga

SEQ ID NO: 76411 - DNA, 1716 bp, Yersinia mollaretii
atggctgcgcaaatgaaaaagaaaagttacagcgatgaaacagtgaagattttgaatgctgtatcagaaggtaagaattttcttttgagcggaggtgctggtagcggtaagacttattctctcatcgagagtatttctggtcttttagagaacaatcccctagcaaaagtcgcttgtataacatatacaaacacagcgacaaacgaaatcgaaaatagaatagacaatgaatgtttaaaagtatcaaccattcatgattttttatggtctagtattaagcactttcagaaagagttgaagactgttttgatcgatctgatcaatgacgaggagaaaaatttatttaatgtgatttcagccactggcgaaccggaaaagattttatgtatagctggagacattgagtataaagaatttgttaagcttcgagacgggatagtgtcacacgatcaaattcctgtcttggctcacgtgatgttctctaagtttcctaagctgtgtaggattttaaatgacagttttaaattcattcttgttgatgagtaccaagatacaagtccgttagttgtggatattttgttgaactgcctggcttcagttccaagaagaaatatagttggtttttttggtgattctatgcagtctatctttgagggtggtattgggaatcttgatgcttataaaggaaatggtcgcgctcaagttcacgaaatttataaacagcaaaatcgacgtaacccaacagcgataataaacttggcaaataaaattagaacagatggtctcattcaagtgccatccgatgacatcagcgccccaaacatgaataaaggcgtcgctaagctgggtagtgcggtatttttgtattcatcagacgagagcactcaagttgcgcgtgactatttgcgatgggatctctcaccattaaatactaaagagctaaatcttacacataatttgattgcggttaagggaggcttccctaaccttatgcgtatatacgatgcagacaagatccttgagtatgttaggagacttcgatcttatatcaagagctcagagccggaattcaatatttttgataaaagtctagaacaggtgtgctgcgaacttaaaattggtaaaagtgggaagctacttgacaaggtatgtccgactccaattcaggtagcttacatagaagcttatcatgaaaactttgaagcagcgctaaaactatcatttgagagcattgcttcaatttacatcgacaaggacatgttgattgatgatcaaaaggctgatcaaagcacgcttggggggagtggggcaaatagagaccatttaattaaacatctatacaagattcaaaaagttattcaactatatgaagagggtgacttcaattcattcttaggggcgacagacttaaagattaataatcacaaagataaagttataataaagagtgccattgaaggactgtcacaatccgatggtaagacgattggtgatgtaattagtgaagctcatcttaacgggctggttcgccgtgatgaccgtttggaagagtttgcccgtgtcaaagcatatgtttacaatcaagtatgcaaggtatcttacgacgagtttcggtatctgtacaaatacatcgatggtaagacgccatattctacacagcataaaacaaaggggcgcgagtatgataacgtcttagttataatggataatggataa

SEQ ID NO: 76412 - DNA, 1758 bp, Streptococcus pneumoniae; identical to SEQ ID NO: 72172

SEQ ID NO: 76413 - DNA, 1539 bp, Streptococcus pneumoniae; identical to SEQ ID NO: 72173

SEQ ID NO: 76414 - DNA, 2070 bp, Streptococcus pneumoniae; identical to SEQ ID NO: 71978

SEQ ID NO: 76415 - DNA, 1818 bp, Streptococcus pneumoniae; identical to SEQ ID NO: 71979

SEQ ID NO: 76416 - DNA, 2070 bp, Streptococcus pneumoniae; identical to SEQ ID NO: 71808

SEQ ID NO: 76417 - DNA, 1818 bp, Streptococcus pneumoniae; identical to SEQ ID NO: 71809

SEQ ID NO: 76418 - DNA, 2100 bp, Streptococcus pneumoniae; identical to SEQ ID NO: 73328

SEQ ID NO: 76419 - DNA, 1818 bp, Streptococcus pneumoniae; identical to SEQ ID NO: 73329

SEQ ID NO: 76420 - DNA, 2070 bp, Streptococcus pneumoniae; identical to SEQ ID NO: 71978

SEQ ID NO: 76421 - DNA, 1818 bp, Streptococcus pneumoniae; identical to SEQ ID NO: 71979

SEQ ID NO: 76422 - DNA, 2070 bp, Streptococcus pneumoniae; identical to SEQ ID NO: 71808

SEQ ID NO: 76423 - DNA, 1818 bp, Streptococcus pneumoniae; identical to SEQ ID NO: 71809

SEQ ID NO: 76424 - DNA, 2070 bp, Streptococcus pneumoniae; identical to SEQ ID NO: 71808

SEQ ID NO: 76425 - DNA, 1818 bp, Streptococcus pneumoniae; identical to SEQ ID NO: 71809

SEQ ID NO: 76426 - DNA, 2100 bp, Streptococcus pneumoniae; identical to SEQ ID NO: 73328

SEQ ID NO: 76427 - DNA, 1818 bp, Streptococcus pneumoniae; identical to SEQ ID NO: 73329

SEQ ID NO: 76428 - DNA, 2070 bp, Streptococcus pneumoniae; identical to SEQ ID NO: 71978

SEQ ID NO: 76429 - DNA, 1818 bp, Streptococcus pneumoniae; identical to SEQ ID NO: 71979

SEQ ID NO: 76430 - DNA, 1758 bp, Streptococcus pneumoniae; identical to SEQ ID NO: 72172

SEQ ID NO: 76431 - DNA, 1539 bp, Streptococcus pneumoniae; identical to SEQ ID NO: 72173

SEQ ID NO: 76432 - DNA, 2088 bp, Streptococcus pneumoniae; identical to SEQ ID NO: 73976

SEQ ID NO: 76433 - DNA, 1818 bp, Streptococcus pneumoniae; identical to SEQ ID NO: 76075

SEQ ID NO: 76434 - DNA, 2100 bp, Streptococcus pneumoniae; identical to SEQ ID NO: 73328

SEQ ID NO: 76435 - DNA, 1818 bp, Streptococcus pneumoniae; identical to SEQ ID NO: 73329

SEQ ID NO: 76436 - DNA, 2070 bp, Streptococcus pneumoniae; identical to SEQ ID NO: 71978

SEQ ID NO: 76437 - DNA, 1818 bp, Streptococcus pneumoniae; identical to SEQ ID NO: 71979

SEQ ID NO: 76438 - DNA, 2100 bp, Streptococcus pneumoniae; identical to SEQ ID NO: 73328

SEQ ID NO: 76439 - DNA, 1818 bp, Streptococcus pneumoniae; identical to SEQ ID NO: 73329

SEQ ID NO: 76440 - DNA, 2088 bp, Streptococcus pneumoniae; identical to SEQ ID NO: 73976

SEQ ID NO: 76441 - DNA, 1818 bp, Streptococcus pneumoniae; identical to SEQ ID NO: 73977

SEQ ID NO: 76442 - DNA, 2070 bp, Streptococcus pneumoniae; identical to SEQ ID NO: 71808

SEQ ID NO: 76443 - DNA, 1818 bp, Streptococcus pneumoniae; identical to SEQ ID NO: 71809

SEQ ID NO: 76444 - DNA, 1758 bp, Streptococcus pneumoniae; identical to SEQ ID NO: 73330

SEQ ID NO: 76445 - DNA, 1539 bp, Streptococcus pneumoniae; identical to SEQ ID NO: 72173

SEQ ID NO: 76446 - DNA, 2070 bp, Streptococcus pneumoniae; identical to SEQ ID NO: 71978

SEQ ID NO: 76447 - DNA, 1818 bp, Streptococcus pneumoniae; identical to SEQ ID NO: 71979

SEQ ID NO: 76448 - DNA, 2100 bp, Streptococcus pneumoniae; identical to SEQ ID NO: 73328

SEQ ID NO: 76449 - DNA, 1818 bp, Streptococcus pneumoniae; identical to SEQ ID NO: 73329

SEQ ID NO: 76450 - DNA, 2100 bp, Streptococcus pneumoniae; identical to SEQ ID NO: 73328

SEQ ID NO: 76451 - DNA, 1818 bp, Streptococcus pneumoniae; identical to SEQ ID NO: 73329

SEQ ID NO: 76452 - DNA, 1758 bp, Streptococcus pneumoniae; identical to SEQ ID NO: 72172

SEQ ID NO: 76453 - DNA, 1539 bp, Streptococcus pneumoniae; identical to SEQ ID NO: 72173

SEQ ID NO: 76454 - DNA, 2070 bp, Streptococcus pneumoniae; identical to SEQ ID NO: 71808

SEQ ID NO: 76455 - DNA, 1818 bp, Streptococcus pneumoniae; identical to SEQ ID NO: 71809

SEQ ID NO: 76456 - DNA, 2400 bp, Yersinia pseudotuberculosis
atgaaaattgaatatattggtatccagaattacagaaagttgaaaacctgcagaattcgcctgaccgaagaagaaaccttgctcgtcggggcaaataatagcggcaagacgtctgccatggatgcacttattttctttctggatcaacgggggagaacggctgcgagcatggtatcgggtaaatcaccgtcatcacgtaaattaggcgcggccgatttcaccctgtcaaactggcatcagctgaatcaatttggtctggcatgggcgaacgccgaacaagctggcgaaaaaatcagtgactggcagcctttatgcccgacgatggatatctggttaaaagtcgagaaaagtgagatccaccgggtacggcatctgatcccgacattaaaatgggatggcgggctcttgggcatcaggatgatttatcagcctaaaaatcttgatgctctcaaagccgactttattgaccgcttcaaagccgctgagcggcttaaaatcacggcagaagaaaatggcgaaaaagatccagacggttccgcgtctgagcccagtaatttcacattttcagtctggcctggctcaatgcgtgaataccttgaaagggaggtgtctagggtctttgagataaaatcctacatactggaccctgcaaagttaaacccggattcggttagtgaattccagccccaggtactggccgaggagcaattgccgctggacttttatcctttaaacgagctgttcaaagtcgacatcattgacgcaactcgcgggttttcagacccctatgtggcaaccggttctcagcatggcggctctaatctggccgggcagatgaaccagtactataacaggcatttaaatcctacagatctgccctgctatgaagatttgggtgccctcaaatccattgcctatgcacagcactcctttgatgaaaaactcaatgaggtatttaccaagccgctacaagaaattgagacgctgggatatccggggttcaccgatccccacatcaaattatcgagcagggttgatccgatcgacaatttagaccatgaagccgccattctttttgagatccagaaaaccagccacgccacaggggtgccgctgatgagtctgtcagagaaatacaacggacttggctataaaaacctgatctccatggtctttacaatgatgagtttcagggatcagtggatgcgcgtcggcaaagccgggctgaggaagccggaagaggatgtcattgtcgagcccctgcacctcattctgattgaagagccggaagctcatctgcacgcgcaggtgcagcaggtgttcatcaaaaaagcctattcagtgctgcgtaatcatgatgatttacgcacatccgcgcagttctcgagccagctggtagtcagtacgcattctagctacctcgcacatgaagtgggcttcgaaaagctcaggtatttcaaacgtaagcccgcgacaggcccgcatgacgtaccgacggcggacgtgattgatctgtcctgtacctttggtagcggtaagagccttccggatgatgtctcacaaacggctcagttcgtcgcgcgctatctcaaaaccacacactgcgatcttttttttgcaaacgggataattcttgtcgaaggagcggcagaacgtattctgatgccacatttcattcgaaataatcccaacgccaataccagcctagacaacagctacatttcgattcttgaagtgggaggagcccatgctcaccgcctgaaggcattgattgaaatactcgggcttcccacccttgtcattacggataccgacgcccagaatcctccccctgaattaccgggcgattaccaaaacggccgttcaagggctaagcccaaagccatccggccggagcttcgcaagggatacataactggcagccattccataaaaagctggctcaacgttgagggcgacctggataaggtccttagcatgcctgagcataaaaaagtccgcggtaaggtcaggattgcgtttcaatacggtatccccatcaaattcagaacagatgatgaggaagcagtggcttttccgtacacctttgaagatgcgatcgcattaacgaatcccgagttattcagggaagtagaaaagcccaccgggatgatgaagcaaatgcagaaggcacttaacctcgatacgcttgagcagtgctgtgaagcgctttacactgccctcgattatgacaaagccgagatggcacttgatttactgttctgtgtcgaccccgctgaactccacgcgccagcctacatccaggaagggctggaatggcttaaaaaagagctggatgaggcgagcagagacctcacgccggaagtgccggaagttaccaacgagtgggagggtgcatag

SEQ ID NO: 76457 - DNA, 1869 bp, Yersinia pseudotuberculosis
atggatacaccatccgcgaacgaccccatcgtcgatcagctcttcagctatctgaatctggacaatcccagaagcttcctgctctttgctggtgcggggtccgggaaaacccgcacgctggtcagcgtattggaacaaatgaaacaacggtattctactgaactgtctaaatccggaaaaagaatagggattattacgtatacaaacgcggcatgtgaggagatacaaagacggttattctttgatgccaactttatggtttcaaccatacacagcttttgctgggacttaatcaacccatttactgcagacatcaagctgtggcttaaaaaggaactcacagagagtattgatgaactcactcgcgacattaaaaaaagcactaaacctgagggcgttacggcgcaaaaaaacaggcggcgtttagccagcaaaaagaaacggttgcaaaatctcgatacgatacaaaaattcagctattcccccacaagcaacaggcctgaaaaagggacgttgaatcacagtgaagtgataaaagtcaccgcctgtcttctccagaatgaagccctgctaagagagattctcttcagcagataccctgtacttttgattgatgaaagtcaggacacgaataaactccttattgagtcgcttatcacgacgcagcaggaaaaccccacaaaattctgcttgggcttgtttggagatatgatgcagcagatcttcagcggggggaaatccgacctagcctctcctttacccccaggatgggaatcaccggagataaaaattaatcaccgctcaccggtgagaattgttacgctgattaacactatccggcaatacaatgacaaacacacgcagaagcctgctccagacgcccagcctggcaccgcacgcttatttgtggtcgacatgaacacggataaggtaagggctgatgttgagcgtcaggttgctcagcatatggcggcacacgcgggtgatacggaatggaaaaacaaaaatttagtcaaagtgctgacgcttgagcaccatatggctgccagacgcggtgagttcgaaaacttcctgctgccccttctggaggtagacagactgggtgatgcggcaatcaaaggggaaagccaggagataacgttcttatcctcacaactctggccatttattgacgcgattcgcagtgatgatgactttaaaattgccaacattatgcgtaagtattcccctgttttttccggttcatggcttgaaagtgcagccgatccgcttcaggttttccgggaagcacaatgccagatagacaaggtaaaagcactccttgacggggaaccaacgcattctattttggatgtgtgcagactgactcatgaaggggagttgctgatcctccctgaagctttactgcttcagctggcgcaggcgccgcagtgggatgatgaatccacaaagaaagaggacgtcaatgaggagtatgacgcctggggccagtcactgaacgcatccacccgggaactggagaattacatcagctatatttcatccacgtcgtcttacggcacccatcagggcgtgaagggactgcagtatccgcgggtcatggctattctggatgatgaagaggcccgcgggttcatgttcagttacgacaagttgctgggcgttaaaccactttctaaagcggatcatgataacgaaagcacgggcgctgattctgcacctaaaagatcgcgtcggcttttctatgttatctgcagcagggcacagcaaagcctggcagtcgtcgcgtacacgaaggccccatctgcagtggagcgtgccgtgatcgcgtcaggctggtttggtaaggaagaaatcacgcacatgtga

SEQ ID NO: 76458 - DNA, 1926 bp, Salmonella enterica; identical to SEQ ID NO: 72180
  subsp. enterica serovar Typhimurium str. DT104

SEQ ID NO: 76459 - DNA, 1662 bp, Salmonella enterica; identical to SEQ ID NO: 72181
  subsp. enterica serovar Typhimurium str. DT104

SEQ ID NO: 76460 - DNA, 1758 bp, Streptococcus pneumoniae; identical to SEQ ID NO: 72172

SEQ ID NO: 76461 - DNA, 1539 bp, Streptococcus pneumoniae; identical to SEQ ID NO: 72173

SEQ ID NO: 76462 - DNA, 2088 bp, Streptococcus pneumoniae; identical to SEQ ID NO: 73976

SEQ ID NO: 76463 - DNA, 1818 bp, Streptococcus pneumoniae; identical to SEQ ID NO: 73977

SEQ ID NO: 76464 - DNA, 2070 bp, Streptococcus pneumoniae; identical to SEQ ID NO: 71808

SEQ ID NO: 76465 - DNA, 1818 bp, Streptococcus pneumoniae; identical to SEQ ID NO: 71809

SEQ ID NO: 76466 - DNA, 2070 bp, Streptococcus pneumoniae; identical to SEQ ID NO: 71978

SEQ ID NO: 76467 - DNA, 1818 bp, Streptococcus pneumoniae; identical to SEQ ID NO: 71979

SEQ ID NO: 76468 - DNA, 2070 bp, Streptococcus pneumoniae; identical to SEQ ID NO: 71978

SEQ ID NO: 76469 - DNA, 1818 bp, Streptococcus pneumoniae; identical to SEQ ID NO: 71979

SEQ ID NO: 76470 - DNA, 2070 bp, Streptococcus pneumoniae; identical to SEQ ID NO: 71808

SEQ ID NO: 76471 - DNA, 1818 bp, Streptococcus pneumoniae; identical to SEQ ID NO: 71809

SEQ ID NO: 76472 - DNA, 2070 bp, Streptococcus pneumoniae; identical to SEQ ID NO: 71808

SEQ ID NO: 76473 - DNA, 1818 bp, Streptococcus pneumoniae; identical to SEQ ID NO: 71809

SEQ ID NO: 76474 - DNA, 1926 bp, Salmonella enterica; identical to SEQ ID NO: 72180
  subsp. enterica serovar Typhimurium str. DT104

SEQ ID NO: 76475 - DNA, 1662 bp, Salmonella enterica; identical to SEQ ID NO: 72181
  subsp. enterica serovar Typhimurium str. DT104

SEQ ID NO: 76476 - DNA, 2070 bp, Streptococcus pneumoniae; identical to SEQ ID NO: 71808

SEQ ID NO: 76477 - DNA, 1818 bp, Streptococcus pneumoniae; identical to SEQ ID NO: 71809

SEQ ID NO: 76478 - DNA, 2088 bp, Streptococcus pneumoniae; identical to SEQ ID NO: 73976

SEQ ID NO: 76479 - DNA, 1818 bp, Streptococcus pneumoniae; identical to SEQ ID NO: 73977

SEQ ID NO: 76480 - DNA, 2070 bp, Streptococcus pneumoniae; identical to SEQ ID NO: 71808

SEQ ID NO: 76481 - DNA, 1818 bp, Streptococcus pneumoniae; identical to SEQ ID NO: 71809

SEQ ID NO: 76482 - DNA, 2070 bp, Streptococcus pneumoniae; identical to SEQ ID NO: 71808

SEQ ID NO: 76483 - DNA, 1818 bp, Streptococcus pneumoniae; identical to SEQ ID NO: 71809

SEQ ID NO: 76484 - DNA, 2070 bp, Streptococcus pneumoniae; identical to SEQ ID NO: 71808

SEQ ID NO: 76485 - DNA, 1818 bp, Streptococcus pneumoniae; identical to SEQ ID NO: 71809

SEQ ID NO: 76486 - DNA, 2190 bp, Staphylococcus aureus; identical to SEQ ID NO: 71982

SEQ ID NO: 76487 - DNA, 1794 bp, Staphylococcus aureus; identical to SEQ ID NO: 75835

SEQ ID NO: 76488 - DNA, 2100 bp, Streptococcus pneumoniae; identical to SEQ ID NO: 73328

SEQ ID NO: 76489 - DNA, 1818 bp, Streptococcus pneumoniae; identical to SEQ ID NO: 73329

SEQ ID NO: 76490 - DNA, 2100 bp, Streptococcus pneumoniae; identical to SEQ ID NO: 73328

SEQ ID NO: 76491 - DNA, 1818 bp, Streptococcus pneumoniae; identical to SEQ ID NO: 73329

SEQ ID NO: 76492 - DNA, 2100 bp, Streptococcus pneumoniae; identical to SEQ ID NO: 73328

SEQ ID NO: 76493 - DNA, 1818 bp, Streptococcus pneumoniae; identical to SEQ ID NO: 73329

SEQ ID NO: 76494 - DNA, 2100 bp, Streptococcus pneumoniae; identical to SEQ ID NO: 73328

SEQ ID NO: 76495 - DNA, 1950 bp, Streptococcus pneumoniae
atggtaaagagtgaggagtggtttcctaaaggagatatcattttagaagagactgcattaggagccgtcaaagatgtgactaactgtttagtcattgctggaccaggtgcggggaaaactgaattactagctcaaaagttagactatctattctctacaaataaatgcgtttctccgaaaaaaattctagcattaagtttcaaaacggatgctgcatcaaatttgaaagaaagagttaagaaacgttatggtgatgaatatgcttcccgttttacctcattaacctattcggcttttgaaaagagaattctagaccaatttagagatgttctacctgaggatatacgaccatcaagagattatttgattgaagattgggatactataaaagaactactctctatgaatggaattaatgttaatggacggagaatgtcagatataagaaattttgtcgaaaatattatacttaatgacgggaatactcacaaatttaaaaagaatctactaaaaggaacacaagataataagccggtcctcttgtatagtcaaataacaaagttgagtactcaaataatagctactaacgaatacatccgtaaagcacttcaactgacatacgattttgtatttctagatgaatttcaggatactacatatgcccagtatagtttattaaaaacttgttttttaggttcgtcttgtaaattaacagcagttggagatgataagcaagccattatgagatgggcaggtgcaaagcctgatatttttccagactatattcgagactttaattcaaatgaatatcaattgttgatgaatcaccgctctgtacctaaacttgtagaatttcaaaaagaggttcatcagatattaaatagtaatcacagttctattcagacaaataattatccagaatttcaagagggtgaaataacattatttgaatttgaaaatgaaagtttagaagctaagttaattgcaaatgatatagaatcaaaaattcaaggaggtatacgaccatcagaaatttgtatcctagcaaaacaaaaggttggtatttatagtttcgaattgatatctatattaaatggcaaagggattaaagcaagaattgaaaatgaatatcaggatattttaaaagatcctacgtgtaacctattattagatttaatatcatgcagtcaaggaaaacgagatcctttaatttgggaaaatattagtaatttttatggaaatatcaatggaatagatgagttaactgatgaattaattttagcaaaatcctataaggagattgacaatatagttagtgatattacttacctaatttcaaatcctattcccgataaagacaggatgctaaatttaattaattgtattatcgaaaaaataggtgacaaaagaattatttccaactttccaatgtacaatgggaaaaatgacttgcttatcaccatcaataagttttcaaaactattagacttgttcggtaactgtaaaaagtgttatactatttttatggaaacagtatacgacaaagcacaaaaacttaactcaaaaaacttcaaactattgattggtgtcaaaaaggaaacctttcaactcatgctagaacacctgaattcagcctatcagattcagcaccgaaaaggtggacgtccacgtagtctgcccatggaagaccagctcattatgaccctccgttacttgcgatattatcccactcagcgtctgctggcctttgattttggcgtcggtgtagctacggtaaatgccatcatcacttgggtggaggatacacttcgtgcgtcaggtagctttgatttggaccatttagaagccccgagtgctgctgtggctattgacgtgaccgaaagtccgattcagcgtccaaaaaaaaccaaagcaaaaattattctggtaaaaagaaacgacacaccttaa

SEQ ID NO: 76496 - DNA, 2088 bp, Streptococcus pneumoniae; identical to SEQ ID NO: 73976

SEQ ID NO: 76497 - DNA, 1206 bp, Streptococcus pneumoniae
atggtgaagagtgatgattggcttcctaaaggagatattattttagagaatgcagctttagaagctgttaagaatgtaaacaattgtttagttattgctggaccaggtgcggggaaaactgaattactagctcaaaaattagactatcttttttctacaaatgaatgtatttctcccaaaaaaattttagctttaagttttaaaacagatgctgcagcaaatatgaaaaatagagttaaaaaacgttatggtgatgagtatgcttcgcgatttacatctttaacctattcagcatttgagaagatgattttagatcaatatataaatgctctcccagaagaaataagaccagatagagactatctggttgatgattgggatgttataaaagcaacacttattaaaaatggtattaatgttaatgggaggagaatgtcagatataagaaagtctgtcgaaaaaaccgtacttaatgatgaggctaatttaaagtttaaaaaggacttattaaaagggacacggaataataaggctgtgctcctttataaacaaataactaagctagctacgtatataatatatacaaataaatatattcggaaagcacttcaaatgacatatgaatttgtctttttagatgaatttcaggatactacgtatgaccagtataatttattaaaaacatgttttttaggttcgacgtgtaaattgactgcagttggagataataaacaagcaattatgagatgggcaggtgcaaatcctgatatttttcaagattataagctagacttcaaagcaaatgaatatcaattattgatgaatcaccgctctgtacctaaacttatagaatttcaaaaagaggttcatcagatattaaatagtaatcacagttctattcagtcaaattattatccagaatttcaagagggtgaaaactcaattccaattatgactatccataagagtaaaggattagaatatgaggtagtctattttctaggcttggaggattctgcattctggagttttaatgatcaaccggaagaagataaaagtgcgttctttgtcgcactttcaagagcaaaaagtcacttaatattcacatactgtaaattgagaaataatagtccgcaaaataatagaaatattaatgagatatattcattgctgactcaatccaatttagttgatgttattaattaa

SEQ ID NO: 76498 - DNA, 2190 bp, Staphylococcus aureus; identical to SEQ ID NO: 71982

SEQ ID NO: 76499 - DNA, 1794 bp, Staphylococcus aureus; identical to SEQ ID NO: 75835

SEQ ID NO: 76500 - DNA, 2100 bp, Streptococcus pneumoniae; identical to SEQ ID NO: 73328

SEQ ID NO: 76501 - DNA, 1818 bp, Streptococcus pneumoniae; identical to SEQ ID NO: 73329

SEQ ID NO: 76502 - DNA, 2088 bp, Streptococcus pneumoniae; identical to SEQ ID NO: 73976

SEQ ID NO: 76503 - DNA, 1818 bp, Streptococcus pneumoniae; identical to SEQ ID NO: 76075

SEQ ID NO: 76504 - DNA, 2070 bp, Streptococcus pneumoniae; identical to SEQ ID NO: 71978

SEQ ID NO: 76505 - DNA, 1818 bp, Streptococcus pneumoniae; identical to SEQ ID NO: 71979

SEQ ID NO: 76506 - DNA, 2100 bp, Streptococcus pneumoniae; identical to SEQ ID NO: 73328

SEQ ID NO: 76507 - DNA, 1818 bp, Streptococcus pneumoniae; identical to SEQ ID NO: 73329

SEQ ID NO: 76508 - DNA, 2088 bp, Streptococcus pneumoniae; identical to SEQ ID NO: 73976

SEQ ID NO: 76509 - DNA, 1818 bp, Streptococcus pneumoniae; identical to SEQ ID NO: 73977

SEQ ID NO: 76510 - DNA, 2100 bp, Streptococcus pneumoniae; identical to SEQ ID NO: 73328

SEQ ID NO: 76511 - DNA, 1818 bp, Streptococcus pneumoniae; identical to SEQ ID NO: 73329

SEQ ID NO: 76512 - DNA, 2070 bp, Streptococcus pneumoniae; identical to SEQ ID NO: 71808

SEQ ID NO: 76513 - DNA, 1818 bp, Streptococcus pneumoniae; identical to SEQ ID NO: 71809

SEQ ID NO: 76514 - DNA, 2100 bp, Streptococcus pneumoniae; identical to SEQ ID NO: 73328

SEQ ID NO: 76515 - DNA, 1818 bp, Streptococcus pneumoniae; identical to SEQ ID NO: 73329

SEQ ID NO: 76516 - DNA, 2070 bp, Streptococcus pneumoniae; identical to SEQ ID NO: 71978

SEQ ID NO: 76517 - DNA, 1818 bp, Streptococcus pneumoniae; identical to SEQ ID NO: 71979

SEQ ID NO: 76518 - DNA, 1824 bp, Salmonella enterica subsp. enterica serovar Typhi; identical to SEQ ID NO: 76128

SEQ ID NO: 76519 - DNA, 1893 bp, Salmonella enterica subsp. enterica serovar Typhi; identical to SEQ ID NO: 76129

SEQ ID NO: 76520 - DNA, 2070 bp, Streptococcus pneumoniae; identical to SEQ ID NO: 71978

SEQ ID NO: 76521 - DNA, 1818 bp, Streptococcus pneumoniae; identical to SEQ ID NO: 71979

SEQ ID NO: 76522 - DNA, 2088 bp, Streptococcus pneumoniae; identical to SEQ ID NO: 73976

SEQ ID NO: 76523 - DNA, 1818 bp, Streptococcus pneumoniae; identical to SEQ ID NO: 73977

SEQ ID NO: 76524 - DNA, 2088 bp, Streptococcus pneumoniae; identical to SEQ ID NO: 73976

SEQ ID NO: 76525 - DNA, 1818 bp, Streptococcus pneumoniae; identical to SEQ ID NO: 76075

SEQ ID NO: 76526 - DNA, 2100 bp, Streptococcus pneumoniae; identical to SEQ ID NO: 76158

SEQ ID NO: 76527 - DNA, 1818 bp, Streptococcus pneumoniae; identical to SEQ ID NO: 76159

SEQ ID NO: 76528 - DNA, 2100 bp, Streptococcus pneumoniae; identical to SEQ ID NO: 73328

SEQ ID NO: 76529 - DNA, 1818 bp, Streptococcus pneumoniae; identical to SEQ ID NO: 73329

SEQ ID NO: 76530 - DNA, 2070 bp, Streptococcus pneumoniae; identical to SEQ ID NO: 71978

SEQ ID NO: 76531 - DNA, 1818 bp, Streptococcus pneumoniae; identical to SEQ ID NO: 71979

SEQ ID NO: 76532 - DNA, 2100 bp, Streptococcus pneumoniae; identical to SEQ ID NO: 76158

SEQ ID NO: 76533 - DNA, 1818 bp, Streptococcus pneumoniae; identical to SEQ ID NO: 76159

SEQ ID NO: 76534 - DNA, 2088 bp, Streptococcus pneumoniae; identical to SEQ ID NO: 73976

SEQ ID NO: 76535 - DNA, 1818 bp, Streptococcus pneumoniae; identical to SEQ ID NO: 73977

SEQ ID NO: 76536 - DNA, 2088 bp, Streptococcus pneumoniae; identical to SEQ ID NO: 73976

SEQ ID NO: 76537 - DNA, 1818 bp, Streptococcus pneumoniae; identical to SEQ ID NO: 76075

SEQ ID NO: 76538 - DNA, 2070 bp, Streptococcus pneumoniae; identical to SEQ ID NO: 71808

SEQ ID NO: 76539 - DNA, 1818 bp, Streptococcus pneumoniae; identical to SEQ ID NO: 71809

SEQ ID NO: 76540 - DNA, 2100 bp, Streptococcus pneumoniae; identical to SEQ ID NO: 73328

SEQ ID NO: 76541 - DNA, 1818 bp, Streptococcus pneumoniae; identical to SEQ ID NO: 73329

SEQ ID NO: 76542 - DNA, 2070 bp, Streptococcus pneumoniae; identical to SEQ ID NO: 71978

SEQ ID NO: 76543 - DNA, 1818 bp, Streptococcus pneumoniae; identical to SEQ ID NO: 71979

SEQ ID NO: 76544 - DNA, 2070 bp, Streptococcus pneumoniae; identical to SEQ ID NO: 71808

SEQ ID NO: 76545 - DNA, 1818 bp, Streptococcus pneumoniae; identical to SEQ ID NO: 71809

SEQ ID NO: 76546 - DNA, 2070 bp, Streptococcus pneumoniae; identical to SEQ ID NO: 71978

SEQ ID NO: 76547 - DNA, 1818 bp, Streptococcus pneumoniae; identical to SEQ ID NO: 71979

SEQ ID NO: 76548 - DNA, 1833 bp, Streptococcus pneumoniae
atgaagttaacaaaaatggttattaataattttagatcttttggggagtatcaagcaattaactttaataatcaaactgtactgatagggaataatagttcaggaaagacaactgtattacaggcattgagtaagttgttttcagataaacaaagtgatagaatcattcgaaaaagtgattttcatttaccaaaagggttaagacctggtgaaaacacaagaaatttttttatagaaactatttttgagtttgatgaacttgatggaactgtctatggatcagccattccaacatttttcgagcactttacagtttctcaagatggtgcaaaaccttttttacgaatcagattagaatcttcctgggaagatgatggaacagttgaaggaagtattgatactcaaatttattatatttcatctgatgaagatactattagagatgaagacaaacatcgtgctcctagaaaggatttggataaaattagggtactttatgtaccagcttcaagaatgcctgagaaggagttgggtaatgcttcaggtagtatgttaagtaggttggtaaatagtataaattggactgaagatgagataaatgaaattaaagataaaattgatgagttgaataaaacttttttatctgaaaatggagcattaactcagatcaacaatgagattcagaaatcatgggaattatatcatgaagataaccgtttttctcaagcagagttgattattaattcttctgagatggcggcagcacttagacagattgccttaaaattttcaccaacaaccactgaagaagcatttacagtttcagatctaggagatggactgagatctattttttatttttcacttgttgattcgatacttgatattgagttagaaattaccaaagaccgtgaagagaatcctgataatccaagatttaagttggtacctccaatactaactatcttagcaatagaggaaccagaaaatcatattgctccacatcacattggaaaactgataaaaaggtttaagcaattaggcaataatgacaactctcaattaattttaacttcacattctccagttattgtaaaaagaattgacccagaagatttgaggtatttaagaatagaaaataatgacagtgttcttcaaaccattgtttctgatatacagttacctcaatcgagtgatgagtcttataaatacattaagggagcaattcaagcctatcctgaactatattttgcgaagttagtagtactgggtgaaggtgatagtgaggaactgctattaccaaagttttttgatttacttggactggaaattgatagttctcagatttcagtagttcctttaggaggtaggcacgttaattatttttggaaattattgaacgctctcaggattcctcatattaccttattagatctcgataacgaaagatatggaggtggctggggaagaattcaatatgcaataaaacaattgatactaaatggggttgctaaagaaaaacttgttactgtaacaaccgaatctcaaaaatcacgagttctagatgatgatgagattgatagaataaaggactggaagattgatagacctgataaccagtggcttgaggggtggattaaaatgttagaaaagtttaatgtgttcttttctgcaccgcttgatattgacttcttaatgttacagcattataagaattattatctggatatgttatcttcgaaagaaggaccagtcgtttcatatgctgattcaggtgggaatagtaaaaaagtaaaattaactgatttggattgtattgataaattgagttag

SEQ ID NO: 76549 - DNA, 1818 bp, Streptococcus pneumoniae; identical to SEQ ID NO: 76159

SEQ ID NO: 76550 - DNA, 2070 bp, Streptococcus pneumoniae; identical to SEQ ID NO: 71978

SEQ ID NO: 76551 - DNA, 1818 bp, Streptococcus pneumoniae; identical to SEQ ID NO: 71979

SEQ ID NO: 76552 - DNA, 2100 bp, Streptococcus pneumoniae; identical to SEQ ID NO: 73328

SEQ ID NO: 76553 - DNA, 1818 bp, Streptococcus pneumoniae; identical to SEQ ID NO: 73329

SEQ ID NO: 76554 - DNA, 2070 bp, Streptococcus pneumoniae; identical to SEQ ID NO: 71978

SEQ ID NO: 76555 - DNA, 1818 bp, Streptococcus pneumoniae; identical to SEQ ID NO: 71979

SEQ ID NO: 76556 - DNA, 2088 bp, Streptococcus pneumoniae; identical to SEQ ID NO: 76178

SEQ ID NO: 76557 - DNA, 1818 bp, Streptococcus pneumoniae; identical to SEQ ID NO: 76075

SEQ ID NO: 76558 - DNA, 2100 bp, Streptococcus pneumoniae; identical to SEQ ID NO: 73328

SEQ ID NO: 76559 - DNA, 1818 bp, Streptococcus pneumoniae; identical to SEQ ID NO: 73329

SEQ ID NO: 76560 - DNA, 2070 bp, Streptococcus pneumoniae; identical to SEQ ID NO: 71808

SEQ ID NO: 76561 - DNA, 1818 bp, Streptococcus pneumoniae; identical to SEQ ID NO: 71809

SEQ ID NO: 76562 - DNA, 2070 bp, Streptococcus pneumoniae; identical to SEQ ID NO: 76276

SEQ ID NO: 76563 - DNA, 1818 bp, Streptococcus pneumoniae; identical to SEQ ID NO: 76277

SEQ ID NO: 76564 - DNA, 1758 bp, Streptococcus pneumoniae; identical to SEQ ID NO: 76066

SEQ ID NO: 76565 - DNA, 1539 bp, Streptococcus pneumoniae; identical to SEQ ID NO: 72173

SEQ ID NO: 76566 - DNA, 2088 bp, Streptococcus pneumoniae; identical to SEQ ID NO: 73976

SEQ ID NO: 76567 - DNA, 1818 bp, Streptococcus pneumoniae; identical to SEQ ID NO: 73977

SEQ ID NO: 76568 - DNA, 1926 bp, Salmonella enterica; identical to SEQ ID NO: 72180
  subsp. enterica serovar Typhimurium str. DT104

SEQ ID NO: 76569 - DNA, 1662 bp, Salmonella enterica; identical to SEQ ID NO: 72181
  subsp. enterica serovar Typhimurium str. DT104

SEQ ID NO: 76570 - DNA, 1926 bp, Salmonella enterica; identical to SEQ ID NO: 72180
  subsp. enterica serovar Typhimurium str. DT104

SEQ ID NO: 76571 - DNA, 1662 bp, Salmonella enterica; identical to SEQ ID NO: 72181
  subsp. enterica serovar Typhimurium str. DT104

SEQ ID NO: 76572 - DNA, 2070 bp, Streptococcus pneumoniae; identical to SEQ ID NO: 71978

SEQ ID NO: 76573 - DNA, 1818 bp, Streptococcus pneumoniae; identical to SEQ ID NO: 71979

SEQ ID NO: 76574 - DNA, 2088 bp, Streptococcus pneumoniae; identical to SEQ ID NO: 73976

SEQ ID NO: 76575 - DNA, 1818 bp, Streptococcus pneumoniae; identical to SEQ ID NO: 76075

SEQ ID NO: 76576 - DNA, 2100 bp, Streptococcus pneumoniae; identical to SEQ ID NO: 76158

SEQ ID NO: 76577 - DNA, 1818 bp, Streptococcus pneumoniae; identical to SEQ ID NO: 76159

SEQ ID NO: 76578 - DNA, 2100 bp, Streptococcus pneumoniae; identical to SEQ ID NO: 73328

SEQ ID NO: 76579 - DNA, 1818 bp, Streptococcus pneumoniae; identical to SEQ ID NO: 73329

SEQ ID NO: 76580 - DNA, 1926 bp, Salmonella enterica; identical to SEQ ID NO: 72180
  subsp. enterica serovar Typhimurium str. DT104

SEQ ID NO: 76581 - DNA, 1662 bp, Salmonella enterica; identical to SEQ ID NO: 72181
  subsp. enterica serovar Typhimurium str. DT104

SEQ ID NO: 76582 - DNA, 2190 bp, Staphylococcus aureus; identical to SEQ ID NO: 71982

SEQ ID NO: 76583 - DNA, 1794 bp, Staphylococcus aureus; identical to SEQ ID NO: 75835

SEQ ID NO: 76584 - DNA, 2070 bp, Streptococcus pneumoniae; identical to SEQ ID NO: 71978

SEQ ID NO: 76585 - DNA, 1818 bp, Streptococcus pneumoniae; identical to SEQ ID NO: 71979

SEQ ID NO: 76586 - DNA, 2190 bp, Staphylococcus aureus; identical to SEQ ID NO: 71982

SEQ ID NO: 76587 - DNA, 1794 bp, Staphylococcus aureus; identical to SEQ ID NO: 75835

SEQ ID NO: 76588 - DNA, 2100 bp, Streptococcus pneumoniae; identical to SEQ ID NO: 73328

SEQ ID NO: 76589 - DNA, 1818 bp, Streptococcus pneumoniae; identical to SEQ ID NO: 73329

SEQ ID NO: 76590 - DNA, 2088 bp, Streptococcus pneumoniae; identical to SEQ ID NO: 73976

SEQ ID NO: 76591 - DNA, 1818 bp, Streptococcus pneumoniae; identical to SEQ ID NO: 73977

SEQ ID NO: 76592 - DNA, 2088 bp, Streptococcus pneumoniae; identical to SEQ ID NO: 73976

SEQ ID NO: 76593 - DNA, 1818 bp, Streptococcus pneumoniae; identical to SEQ ID NO: 73977

SEQ ID NO: 76594 - DNA, 2100 bp, Streptococcus pneumoniae; identical to SEQ ID NO: 73328

SEQ ID NO: 76595 - DNA, 1818 bp, Streptococcus pneumoniae; identical to SEQ ID NO: 73329

SEQ ID NO: 76596 - DNA, 1758 bp, Streptococcus pneumoniae; identical to SEQ ID NO: 72172

SEQ ID NO: 76597 - DNA, 1539 bp, Streptococcus pneumoniae; identical to SEQ ID NO: 72173

SEQ ID NO: 76598 - DNA, 2070 bp, Streptococcus pneumoniae; identical to SEQ ID NO: 71808

SEQ ID NO: 76599 - DNA, 1818 bp, Streptococcus pneumoniae; identical to SEQ ID NO: 71809

SEQ ID NO: 76600 - DNA, 2100 bp, Streptococcus pneumoniae; identical to SEQ ID NO: 73328

SEQ ID NO: 76601 - DNA, 1818 bp, Streptococcus pneumoniae; identical to SEQ ID NO: 73329

SEQ ID NO: 76602 - DNA, 2070 bp, Streptococcus pneumoniae; identical to SEQ ID NO: 71978

SEQ ID NO: 76603 - DNA, 1818 bp, Streptococcus pneumoniae
atggtaaagagtgaggagtggtttcctaaaggagatatcattttagaagagactgcattaggagccgtcaaagatgtgactaactgtttagtcattgctggaccaggtgctgggaaaactgaattactagctcaaaagttagactatctattctctacaaataaatgcgtttctccgaaaaaaattctagcattaagtttcaaaacggatgctgcatcaaatttgaaagaaagagttaagaaacgttatggtgatgaatatgcttctcgttttacctcattaacctattcggcttttgaaaagagaattttagaccaatttagagatgttctacctgaggatatacgaccatcaagagattatttgattgaagattggtatactataaaagaactactctctatgaatggaattaatgttaatggatggagaatgtcagatataagaagatatgtcgaaaacatcatacttaacaatggggataatcacaagtttaaaactgacttactaaaaggaacacaagataataagccggtcctcttgtataggcaaataacaaagttgagtactcaaataatagatactaacgaatacatccgtaaagcacttcaaatgacatacgattttgtatttctagatgaatttcaggatactacatatgcccagtatgatttattaaaaacttgttttttaggttcgtcttgtaaattaacagcagttggagatgataagcaagccattatgagatgggcaggtgcaaagcctgatatttttccagactatattcgagactttaatccaaatgaatatcaattgttgatgaatcaccgctctgtacctaagcttgtagaatttcaaaaagaggttcatcagatattaaatagtaatcacagttctattcagacaaataattatccagaatttcaagagggtgaaataacattatttgaatttgaaaatgaaagtttagaagctaagttaattgcaaatgatatagaattaaaaattcaaggaggtatacgaccatcagaaatttgtatcctagcaaaacaaaaggttggtatttatagtttcgaattgatatctatattaaatagcaaagggattaaagcaagaattgaaaatgaatatcaggatattttaaaagatcctacgtgtaacctattattagatttaatatcatgcagtcaaggaaaacgagatcctttaatttgggaaaatattagtaatttttatggaaatatcaatggaatagatgagttaactgatgaattaattttagcaaaatcctataaggagattgacaatatagttagtgatattacttacctaatttcaaattttattcccaatgaagaaagtatgctaaaattaattgattgtattattgaaaaaatagatgaaaaaagaattatttccaatttttcaacatacaatggaaaaagtgacctagatatcattgtcaagaacttttcaaagttattatacatagaatattctcaaacacaaggtgaatggctagatacagtctctagtttcaagggtgaaaactcaattccaattatgactatccataagagtaaaggattagaatatgaggtagtctattttctaggcttggaggattctgcattctggagttttaataatcagccggaagaagataaaagtgcattctttgtcgcactttcaagagcaaaaaatcacttaatattcacatattgtaaattgagaaataatagtccgcaaaataatagaaatattaatgagatatattcattgctgactcaatccaatttagttgatgttattaattaa

SEQ ID NO: 76604 - DNA, 2070 bp, Streptococcus pneumoniae; identical to SEQ ID NO: 71978

SEQ ID NO: 76605 - DNA, 1818 bp, Streptococcus pneumoniae; identical to SEQ ID NO: 71979

SEQ ID NO: 76606 - DNA, 2088 bp, Streptococcus pneumoniae; identical to SEQ ID NO: 73976

SEQ ID NO: 76607 - DNA, 1818 bp, Streptococcus pneumoniae; identical to SEQ ID NO: 73977

SEQ ID NO: 76608 - DNA, 2070 bp, Streptococcus pneumoniae; identical to SEQ ID NO: 71808

SEQ ID NO: 76609 - DNA, 1818 bp, Streptococcus pneumoniae; identical to SEQ ID NO: 71809

SEQ ID NO: 76610 - DNA, 1875 bp, Yersinia pseudotuberculosis
atgtatcttgcagagctcacgataaagaattttcgcaaactgcgtgaagccacgctgaaatttcaacccggtttaaatgttctggtaggcccaaacaacgtagggaaaagtgcagtagtcgatgcactccggacgcttcttgcaggtcatgatgagacttatcctcgcctcgatggttctgataggcaccgtccgcatgagggcgacccaactggtgatatcagtttccattttgtcttccgagatcttagccttgaagatgaagcggactttatagctgccctcaagccaaatggggacaagaacatggaggcgcatatccatgttcagtataccgatatggataagacgggacgattcaaagtccggcgctggtgcggtgatcacccagaagtatcgcttacctcagatatgatggagaaccttcggggggtctatctcccgcctctccgcgatgccgcgcagggccttcgccctaaccgtaacagccagctggctcgattacttcatttgctcaccgatgatgcaggtcgtgacacgataaacacggctttgaagcaacttgacgaaacccttaaacaagacaaatccattcagagtacccataaagcgatatcaaccagacatgattccatgatgggtgctcagttagcacaggagcttgctgtcgggctcagcgtgactgattttcagcgcctctcttcccgactgaccctgacggctgaaaccatggagattgagaagaatggattgggcttcaataatctgatcttcatggcggtagtactcagtgaattggctaaaaatactgattctgctttcaggagtttgattattgaggaaccagaagcgcatttgcatccccaactgcagcgcgtgttactgcagtaccttgcagggattccaacgggtgaaggcgaaaagcctgtacaactgtttgtcaccagccattccccaaattttgccagtaattcaaagctggactctcttgtatgcttgatcgagaacgaggctggcgttgagaccttctttccacgtgatatcaaatttgaaaagggaaaacgtgaaaagctagagcggtatctggacgtaactagggctgaactgttttttgcacgccgggtgattttcgttgagggcgcagcagaactaatgttaattgacgcacttgctaagaggatgaactttgatctcagggaatatggggtcagtctgattagcgttgagggacttaattttgactccttcctcccgctttttggagagcaggggctgcgaatccccgtcgctgtagtaaccgatgcagatccatttgaagaagaagaagttgaagccgtggcagagggtgaacaggctgaagaggaaattgacgacttactttctgaagctgcctaccaggaagaaacagatgctcctgacgacgaagaacctactggcgatgctgagaaaaagaaaaaagttaaaaggaaagaggtgtatccagcgttgggagatcaggtgcggctgtcggcaaataccatcaagatgaagaatctggaggatgatttcgtgaaggtttttcatggattgaaaaccctggaatatgatctggcactcattgaggcgaaccgcgacccaatgcttactgcattagccgacccgcatccaaaaatttctaaagctctgcgtaagatagttgatacccagccagacaatacagcaaaaaccaaagcgttgttctgcggtatgtttgagcgaaaaggcaacggcaatattcagaaaggtcgattcgcccaggcattagccgaacagatttcgaaagaaaatggttttgaagtccctgagtaccttaaaaaagctattcagcatgtctgtcagggagtggtcaagccgtga

SEQ ID NO: 76611 - DNA, 1728 bp, Yersinia pseudotuberculosis
gtgaaactatcaaaggaacagatagatattatagaagcgccgttagggccaattgctgtcactgcgtgcgcaggaagcgggaagacagctacagccattcggcgcctgattgccattcggcagaaaatgcaaaacagtcgcggccgcgttgtgctgttgtctttctccaatgttgctgtcaataccttcaatgcagggtatgcggagctcgctgctggcctaccggacgatgctaatcgtcgaagggtggaagtcgatacacttgacggtttttttaccaaacatattttacgtccccatgcctacaggactatggccgcgcctcaggctgcgtacttggtatcaggttcggaaccttttcttgccaggtttaaatattggcgtgaaggcaacccccctttgccattaaaagacataaaattaattatactggatggggatttcgtcttttattccgatacaagaaatgcccctgaaattcttgataaaggtaaggttttaaagatcattcatgaccttggatgtttaggcgcttacactcatgagattggtcggtactgggtgtataggaccctagattctcaacctgcagtattgagggcgctggcagcccgctacccgcaaatccttgtcgatgagtctcaggatttgggaacactgcataaggaaatcttaaagctactcatcactgcaggggttcaggttacgcttatcggggatgtaaatcaggggatttatggcttcgctggtgctgacggtgaattcctgaagagctacgaggatcgtgcagaggtgaccggatacaagcttactcgcaattatcgttccctgcctccaatcataaatatcgccaacattctctgtggccgtcatgacgaaccagaccggctggaagaacaaggcggagcatatttcattggatacaaggattcagaactttccaaattaactgaagcattcaaggctcatattgatgagttaggcatgcaacatcaggatgcggtgatcctctgccggggtgcagacagagccgcagtaattgcgggtaaaaccgcaccgccgggacaaggtatggtcaaggtgttagcagaagcatcgttgttaagggatcagcacagtaactatcatggatgctttaaattggtctgccgggctatcattaacttactggaggatgtacctcatggcctcagttccgggcttcagggattatcacatgatgacgagatgaaaggacttaagcggctactatggcgtttcagtcgcagcgctgatgtgggtctcccttcatctgccctaatcgcgaaaacagactggcactccaagctattaacgaatgtcagagtgcttctctcagagattgaaaaacactacggatataaagttgctggcaaggtaggcactaagctcacaaaaaaatcattaccagatcagccactggccaatgcagtttcggctcaaggacatgggctcagagtcgagacggttcaccaggttaagggggagtctatcgacgcggttatgtatgtggccaagaaagccaatatcaaagcgctgctttcaggtacaggtgatgaagaaggacgtatcgggtatgtcgcaatcactagggcaaagaacttgttctggctggctgtgccacaatcatgcctaaaagaattaaaggataatctcattaacgctggttttcaggaacggatcaaacctgccgtcattgaccctgcctga

SEQ ID NO: 76612 - DNA, 2070 bp, Streptococcus pneumoniae; identical to SEQ ID NO: 71978

SEQ ID NO: 76613 - DNA, 1818 bp, Streptococcus pneumoniae; identical to SEQ ID NO: 71979

SEQ ID NO: 76614 - DNA, 2070 bp, Streptococcus pneumoniae; identical to SEQ ID NO: 71978

SEQ ID NO: 76615 - DNA, 1818 bp, Streptococcus pneumoniae; identical to SEQ ID NO: 71979

SEQ ID NO: 76616 - DNA, 1758 bp, Streptococcus pneumoniae; identical to SEQ ID NO: 72172

SEQ ID NO: 76617 - DNA, 1539 bp, Streptococcus pneumoniae; identical to SEQ ID NO: 72173

SEQ ID NO: 76618 - DNA, 2100 bp, Streptococcus pneumoniae; identical to SEQ ID NO: 73328

SEQ ID NO: 76619 - DNA, 1818 bp, Streptococcus pneumoniae; identical to SEQ ID NO: 73329

SEQ ID NO: 76620 - DNA, 2070 bp, Streptococcus pneumoniae; identical to SEQ ID NO: 71978

SEQ ID NO: 76621 - DNA, 1818 bp, Streptococcus pneumoniae; identical to SEQ ID NO: 71979

SEQ ID NO: 76622 - DNA, 1905 bp, Yersinia pseudotuberculosis
atgaagcttgaaacaattcggttattaggttttcagtcttttggtcaggaaccaacagagctgagcctggaagatattacctatctaattggtcctaatggttcaggtaagaccgcagttcttcaggctttatgtcggctctttgcattcgatccgtcattgcgacgtgtccagcgttcagatttccatgtccattttgaagaggaggaggttcctcctgagcgtgagctgtggatagaagctgattttttatttcacgagcttgcagaagacgaagataacagtacagtagcacctcattttggccatatgcgactagatgagccggaaggtattccacgagtacgttttcgccttacggctactatggggctggatggtgatatcgacgaaaacttagtgtatgtcctggatatcaatgctgatggttcacctcaaaacacagctcaagtaccacgagcagagcgtaatcacatccaggttcattatttaccagccagacgtgacccagctgatcatattacttacggcgcgaatgcattactaggccgtttgctccgggccgtacgttgggatgctgagcgcgatacgatcaaggggctgaccgatcaaataagcgacagccttgcagcaaacccttcagtgaatgcatttagtgagagtttgaaaacaacttgggccactctacataaaggcaaatttttcgctgatccaaaaatcacatttgtagcttcggagattgaagcgctgttgcgacatttgtcggtttcttttaccccagggcacgatggttcacttgtcgatttctcgcggttgagtgatggtcaaaagtcaatgctttacctttcccttgtattatcgtctcaagcgattggaagagctgtactcgctgaggaagatgtctcttttgatcccgataagttacgtccaccggtctttacattgatcgctctggaggagccagaaaatagtctttctccacattacctgggacgtatcgtctgtgccttgaataccatgacgaaaaatgtagatgcacaagctctcattgctacacatgctcccacaatgttgcgtcgtgttgctccagagttaatacgttatctacggttaactgaggctcgaaagacacgggtcacctgtatcaaattgccagagaaaactgatgatgcacacaagtttgtccgggaagcagtccaggcatttcctgagatctatttctcgcgtctggtagtgctgggcgaaggtgatagtgaagagattgtattgccacgtttgcttcaggccaaaggtgcgcccgttgacgaatcggctatcacaatagctccattaggcggtagacatgttaatcacttctggcgtttactttctgctttgaaaatcccgtatttcactctgcttgatttggatgttgctcgtcatcaggctggctggggacggattaagtatgctaatgatcagttgggtgagcataggccgaagaagaaacttccggaagatcaccacattccaaaatggaattctgctaccaataaggttcgagaattctcaaactattgcgagttgctagaagaacgtggcgtttttttttcctccccaatggatttagacttttcaatgttattagcttatcccgaagcttatgatgttgataaagaaaaaccggacgagtcaacaatcaaggccgtcctcgggaaaagccattacgattcttctcaatacagtgaagacgaattaacgttgttcagcacctatcacaaacgctttaagcttggcagcaaacctgcagcacacattgaggcattaactcagctaacggatactgaattgcttgaaaacatgcctgagtcactaagcaggctagcagatgtggttattgccaaactcgaggagttgccagaatga

SEQ ID NO: 76623 - DNA, 1674 bp, Yersinia pseudotuberculosis
atgattgctgcagaagcatggcaacccgccgatggcctgacgctggaaccaaatgcaaaaagagcagcaaaagcacgtaagcgctgcttggcactcacagctggacctggtgcgggtaaaacggaaatgcttgcgcaacgagctgacttccttttacgtacaggaacatgtcggtatcctaagcggattctcgcgatctccttcaaggttgatgccagcagaaatctaaaagagcgtgtagaacggcggtgcgggtccaatcttgcctcgcgttttgacagctataccttccatgcatttgccaagcgtatcatcgatcgtttcaggccggtgctcacggggaaagatgccttggatgcgggttatacaattgtagataagaaaaatggcccctctcgtactcaaattgaattcggcgatctggtcccgttggcaatccaaatattgcaaacctcaaaaattgcccgtaatgcaattcagcaaacttacagcgatattttcttggatgagttccaggattgcacgaatttacagtatgagttagttaagcttgctttccaagggactagtcttcgccttactgcggtaggtgatactaaacaaaaaattatggcttgggctggagcgctggacggtattttccaaacctttgtcaatgattttaatgctgtaccacttaacatgtatcgcaatttccgttctaaaccacaattgctgcgggttcagaacgaaattattcgtacgcttgatcctgactctgttatgcctgatgaacaattggatggcgatgaaggagaggtttatgcctggcgttttgaagacagctgtaaagaagcagtctatttggctgatctaataaatgggtggataaatacagaacaattaccacctgcagaaattgcagtcttggtttctaaacagttggaactttatgctgaccaccttatgaccgagttggacgctcgcggtattccatatcgtaacgagcaacaattgcaggatatcactatagaacctgcagcacgtttgatcgtagattatttatcatgtctctacggtaagcgtgaacctaaggcttggattcgattgatgaatcaattgattccttttgccgatgaggaaatacagtcaagtgcgagaaaggatcttgacctattaattaaaaaacaacgcaaaaaagtatctgatgctaggagtacggattcgccgttttcggattgggtacaattggcgatagaatttataaagtatattggtaccaaaatgttggtcgctttatcacctgactatgaaactcgtgcacgtttaaaagatgttatacgcgaaacctttgcacggattaaagaattgctaaagtcagacccagatttgccaaaagcgttgggacgttttgcggatgatcaggctgtacgcattctgactattcataaaagtaagggactcgaatttgactcagttattattttaggcatcgagagtcaaacgttctggggaaaacctgatgcagagcgttgtgcattttttgtgggtatttcacgtgcgaaaaaacgtttggttcttactgtttctgatcgcagagaaacgccgccttcaaatccgtatcgatggcaagaaaatagaacacagcatgaagaatttatcggatatgttacgccatttttgagaatacagtaa

SEQ ID NO: 76624 - DNA, 2070 bp, Streptococcus pneumoniae; identical to SEQ ID NO: 71808

SEQ ID NO: 76625 - DNA, 1818 bp, Streptococcus pneumoniae; identical to SEQ ID NO: 71809

SEQ ID NO: 76626 - DNA, 2070 bp, Streptococcus pneumoniae; identical to SEQ ID NO: 71808

SEQ ID NO: 76627 - DNA, 1818 bp, Streptococcus pneumoniae; identical to SEQ ID NO: 71809

SEQ ID NO: 76628 - DNA, 2070 bp, Streptococcus pneumoniae; identical to SEQ ID NO: 71808

SEQ ID NO: 76629 - DNA, 1818 bp, Streptococcus pneumoniae; identical to SEQ ID NO: 71809

SEQ ID NO: 76630 - DNA, 2241 bp, Streptococcus agalactiae; identical to SEQ ID NO: 72338

SEQ ID NO: 76631 - DNA, 960 bp, Streptococcus agalactiae
atgacatatacaattagtacagagaataaacaattagagttagacattcagaaagatattaatgagtgtttagataactttgagagcttttgttttgatgccggtgctggtgcagggaaaacctatgcattacaaaagtcaattgaacatattttgaagacggagggagaaaatttaaaattacgaaatcaaaaaatcttatgtatcacttacactaatgctgctaaagatgagattcttagtcggattggtaaaaattctgcaatactggcctctacaatccatgaatttctatgggggtttatttctattcagcaagagttactgactatagaacatgagaaaaaaattaaagaggaacttaacggaattgaacaaaagataattgataatcctctttttggcagtgttaatctggttgatttccataatgcgattagtgatgaagaatttctgaaagtattctatagtacaccaattagtcctgcaggagattttaaatctatgattaaagggtacagtgaatactttagcccctatctaagtaatgttaataagtttagcagtttagttaagaatgttgataagaagtacaaacttgaagaaacattgaaagaaattaagaataagaaatctaaaaaaatcatctataatcctattcgaaaccgtgataaacttgaaaattatgtcattagccatgatacgttattgctttactgtaggaatatcattacgagtcagaatttattaaagagattgttttcagatagatatccatatgtcttagttgatgagtatcaggatacggatgaaaaagttgtcgatataatagatagtattagaaaatttacaatttgtaaaaaaaactttgtggtaggtttttttggtgatactctacaaaatatttatagttccggagtgggaaaacttccaaataaagaagaatacccgtggtgctag

SEQ ID NO: 76632 - DNA, 2100 bp, Streptococcus pneumoniae; identical to SEQ ID NO: 73328

SEQ ID NO: 76633 - DNA, 1818 bp, Streptococcus pneumoniae; identical to SEQ ID NO: 73329

SEQ ID NO: 76634 - DNA, 1980 bp, Yersinia pseudotuberculosis
atgaaaattacacaaatggagatcaaaggctttaagagctttgataatgtagggcaaactataaatattaattcattcacaagcttaattggagggaacggaacaggtaaaacggctgttctcctcgcgttaacaagaatgtttggtgttaaaagctccgatagaattgttcaagttgaggatttttatgttccccctggtgatgaaatcgaagatcagaatgaacgagaaatatcaattcgtgtaagattcgaattcgcagagctaaaagatggtgaggacgattcagttgcagacttctttaagcatttagtttcaagtgaagcggatgagataccatactgtatagcaaaattaaaagcaaaatggacaaagactaaccttgcagaaggggatatagaaagcgatctagtatgggaaattgggcagtatgaaaaaaatataacggcatatgaaagatcgaaaattcatgttcattatgtccctgcttaccgagatcctgcccaacaactgaaacaaacagccggaaccatcatgcaccgtttgataaatgcagtcgaatggtctgaacaaatgggaactacggttgaagaggttgcgctatcaatcggaaaacaatttcaagaagaagttggaattaagacaataacttcatcattaggaaaaaactggaaaactctttttagtgggggatatttcgaagagcttaaaattcagccggtgatgaatgggatagaagatgtattaaagcatatagatacagtatttatgcccactccagttactcaaccactacccactgagaggttgagtgatggaatgaaatcattgttctatctttcattggtaaaatcagcatttgatattgaagatgagataattaattcaaaagaaaaagaattatcaatatcagtagaagcattagatcctccaaacttaacgataatattgattgaagaaccagagaatcatctttcaccgcaatatttagggcgaatagttaagctgtgtgaagagatatctgagaatgatcgagcacaggttattttaactacacatgcaccagctttactgaatagagttgaacctgaagatattcgttattttcgactgcaagataataaaaatacaattgttaaagagattatattaccaaaaaaagttgaagatgatgttgataaagtagatacttttacatatgtaaaggaagctgtaaaagcctatccggaaatttattttgcaaaagttattattcttggtgaaggagatagtgaacaaattgtcataccaaaagttgcacaggtaaacggaatagagcttgatacttcattgataacatttgctcctttagggggaaggtttgttaatcatttctggaaattattgaacgagctttcaatacctcatgtaactctccttgattacgatttcagaagaggtggtggtggctggggaagaataaaatacatcattaatcaattgattgaagtggggtgtgatgaagatatagtacttcaaacagaaggaggaaaacttacttcaaaagaacttaaaggaatgcataaatgggacgaaaacgaaaaagatgaaaaatcatggttagatttatttgaaacctataatgtatatttttcatatccatatgatttagactggataatgttaaatgcattcccggcaagctaccattcttttatccctgataatggtggtccaaaaatcctcaaaaaaactgatgctgagtatattgacaaaacaaaaaatgctatcgcgtcagtattaaagaaagatgctgaagatatagatatcgactcttttgatgatcatgaacaatattattggtatcgatatttattccttggtagaggtaaacctctttcacataactatgttttgaataaactcgataatgattcattgaaaaataattcaccaattgtattgaaagatttgatcgaaaaagtgagagggcttctctaa

SEQ ID NO: 76635 - DNA, 1848 bp, Yersinia pseudotuberculosis
atgccaataataaaagatgataattgggttctaaaagacatccaagaagttgaagacgaggctatgagggtaatacggaatagtacaaatcataatctcgttcttgctggtcccggtgcaggtaaaaccgaattattggctcagaaagcatgttttttgatagaaactgggaaatgtagaaataaaaaaattatcgcattatcctttaaaaaagatgcggcaaaaaaccttcaggatcgtgttaactcccggcttgattcaaaatataggcataaatttgaatcaaccacgttcgatgcattctgtaaaagtattgttgatcgatttaagagtacacttccagtggcgtatcggccttcagatgattatgaaatatattttcctgaaaataaaaaattcgtagaagaggttaaacgagatgccgttggttttgagggactgactgcggaggaacttaagaaattaaaacataccaatttcgaaaataattatatcgttatgccttataaaaagggtgaagagcattcagtagatgctcgtattaaacgatttgtttggttccgtttactggaaggaaaatccagagtttcgtttaaaatgataaactttctttcaaattatatcataagaaataataaatttctttcgaatgctattaattcgacttacgaatatgctttcattgatgagtttcaagatactacttatcaacaatacgaaattttcaaaagtatctttttagataaaaaaataaaaataacagctgtaggtgatactaaacaaagaatcatggggtgggcgggagcattgcatagtgcatttgagttttttaaaaatgactttgcgattgaacatcataatgaattattgagtaatagaagatcgctaaaaaaccttataagttatcaacgcatgatggaggctttcatgaatcatgctgataataaacctgagatggagttaatcgagaatgaaggttcagcgaagttaatacaatttgatgaaagcaatatagaaggggcatacatagcattatgtatccaaaaatggattgaagaaggggttgatgaaagagaaatatgtatcttattcagaaatccgtctaagcattacacggataaaatcatctcatctctacagtacttggaaataaagtgccgcatcgaaaatacttatcaggaattactcaatgaagcaatagttcagttaatcttaaaaatgctaatgtttacctgcgataaaaagtcgattgaaggctggaattctacaatggaacttttatgcaacataagaggggtaaacaaaagcagagatattactcgtttggaaaaagagcttagtcgttttataaaatcgaacaaggacatcaatggaaatgttgttgattatatatatggattaataagtatatttggtatcgatgagatcaagtcttacttccctcaatatataagtggaaatggcttagaccatgctattaattctctttcacaaaatctagaaaccttaggtatcaaagataataaatcagcagctattgatatgttactcggaaataaaacgataccacttatgacgattcataaaagtaaaggtttggagtttaaaaaggtcatcatcgtcggtcttgaacctggtgcatattttggcgatgaagaagagcagatagaaaatcaaaaaacagtctttgtggggttttcaagagcgattgaagaggtcatattaactcgctgtgcaaaaagagttaactggtgggatgaactatgttctcaaaatttttctgagatcccattgataacggatatgctaagctactgtggtcttgaagctgagatttataaagattaa

SEQ ID NO: 76636 - DNA, 2139 bp, Yersinia enterocolitica; identical to SEQ ID NO: 72908

SEQ ID NO: 76637 - DNA, 1800 bp, Yersinia enterocolitica; identical to SEQ ID NO: 72909

SEQ ID NO: 76638 - DNA, 2070 bp, Streptococcus pneumoniae; identical to SEQ ID NO: 71978

SEQ ID NO: 76639 - DNA, 1818 bp, Streptococcus pneumoniae; identical to SEQ ID NO: 71979

SEQ ID NO: 76640 - DNA, 2088 bp, Streptococcus pneumoniae; identical to SEQ ID NO: 73976

SEQ ID NO: 76641 - DNA, 1818 bp, Streptococcus pneumoniae; identical to SEQ ID NO: 73977

SEQ ID NO: 76642 - DNA, 2088 bp, Streptococcus pneumoniae; identical to SEQ ID NO: 73976

SEQ ID NO: 76643 - DNA, 1818 bp, Streptococcus pneumoniae; identical to SEQ ID NO: 76075

SEQ ID NO: 76644 - DNA, 2070 bp, Streptococcus pneumoniae; identical to SEQ ID NO: 71808

SEQ ID NO: 76645 - DNA, 1818 bp, Streptococcus pneumoniae; identical to SEQ ID NO: 71809

SEQ ID NO: 76646 - DNA, 2088 bp, Streptococcus pneumoniae; identical to SEQ ID NO: 73976

SEQ ID NO: 76647 - DNA, 1818 bp, Streptococcus pneumoniae; identical to SEQ ID NO: 73977

SEQ ID NO: 76648 - DNA, 2070 bp, Streptococcus pneumoniae; identical to SEQ ID NO: 71978

SEQ ID NO: 76649 - DNA, 1818 bp, Streptococcus pneumoniae; identical to SEQ ID NO: 71979

SEQ ID NO: 76650 - DNA, 2070 bp, Streptococcus pneumoniae; identical to SEQ ID NO: 71978

SEQ ID NO: 76651 - DNA, 1818 bp, Streptococcus pneumoniae; identical to SEQ ID NO: 71979

SEQ ID NO: 76652 - DNA, 2190 bp, Staphylococcus aureus; identical to SEQ ID NO: 71982

SEQ ID NO: 76653 - DNA, 1794 bp, Staphylococcus aureus; identical to SEQ ID NO: 75835

SEQ ID NO: 76654 - DNA, 2070 bp, Streptococcus pneumoniae; identical to SEQ ID NO: 71978

SEQ ID NO: 76655 - DNA, 1818 bp, Streptococcus pneumoniae; identical to SEQ ID NO: 71979

SEQ ID NO: 76656 - DNA, 2088 bp, Streptococcus pneumoniae; identical to SEQ ID NO: 73976

SEQ ID NO: 76657 - DNA, 1818 bp, Streptococcus pneumoniae; identical to SEQ ID NO: 76075

SEQ ID NO: 76658 - DNA, 2088 bp, Streptococcus pneumoniae; identical to SEQ ID NO: 73976

SEQ ID NO: 76659 - DNA, 1818 bp, Streptococcus pneumoniae; identical to SEQ ID NO: 73977

SEQ ID NO: 76660 - DNA, 2070 bp, Streptococcus pneumoniae; identical to SEQ ID NO: 71978

SEQ ID NO: 76661 - DNA, 1818 bp, Streptococcus pneumoniae; identical to SEQ ID NO: 71979

SEQ ID NO: 76662 - DNA, 2121 bp, Yersinia mollaretii
atgaaaatatgtagcatagagatcaagaattatcgtttgttaacagaatttcgattggatttagaagataatctttcgttagttattggaaaaaataacacaggtaaaacttctcttttatcagctttggagaagctttatgcagaaacgcgaaaaatctcatttgatgatttcaatgtcaagcttagggataggttaaaagcttttgttgggggagaaaaggctttacctaatgaagatgtgtacgagcctttaggggtggaattacggcttgtattagtatatgaggatgaagacgatcttgggcaagtatcacctttgatcatgagtctagatcctgatgataagtctatattgctcggatttgagtataaaatatctcacagtcaattagtatctttccgtaatgatttcctagaggagagggataattatgatgatgatgtgcttctctatatggcggaaaaacataaaaaatacttcgtaggtatttccagaagaagttatctgagtaacgatctctctgtattcacagatttgattaaagaaaaaatttcactagatgaagtgatttcttttaaagctataagcgcaaaaagaaatgtcactaacagggagaatgacaaaactctatcaggacagacggccgatatatataaaataaccgaagagtctgaagaacagaaagatactgttaatcgcttcaagaaaactctacgtggggcagataagaatctaaatggaatatacgaggagatgttttctaaagttctgaaaagtgttgagcgcttcggaggtatttctcaatatgaaacctcaatcactatcgcttctacactgcagcaccaagagttgcttgatggcaatacaacggtgttttatcgtcatgaaactcatgatcttcctgagcattacaatggcttaggatacatgaatttgataagtatgatatttgaaatagagttattgatgacttcgttcagaagatcacttcttgaacgcccggcggctgttaatctgctcttcattgaagagcctgaggctcatacacatccacaaatgcagtatgtattcataaaaaatatcaaagatttgctagaggaaggagtcgtgcgtgaagatggattagttgtaaacttgcaaacagtgatttctacgcactcgtctcacattgtagctgaatgtaactttgatgatattaaatatatgaagcgtaaaggtggggtagttaactgcagtaacttgaaagatcttaaaaaagaatatgatcgagaagattctaaaggtattgatggtcattataaatttttgaagcaatatctgacgctgaaccgggccgaattattttttgccgataaagctattttcgtcgagggtgatacagagcgggttcttttgcctgcaatgatgaaaaaaatcgatgaagaatatcctgagaatgaagtcgcccccttaacttcccaaaacgtatctatcgtagaagtaggtgctcactctcaggtttttgaaaagttcataagttttcttggaatcaaaacattgatcctaacagatatcgacactggtaaaacagtgccggatttagatagtgcggggaaccacaagcgtacccaaaaagatgagcctaaatatacaacggaaaaatgttcgcctatggattctgatgttagtcacacttcgaataatgcgttgtgtttctttcacagcaaggaacgtgaagatattaagtattttctgagtttattcaaggatgacaagaaatttttatttgatggcgaaaaatgggttagagataaaatcggtcagattttcactgcatttcaaattgaagaagaaggttatcgagggcgaagtttcgaagatgctttttttcacgtaaataaagagtttttgggaacagactcggtcgtatttccgtcgcttatcgcaaagcattttgaactgtatgtagctggtcatacaacagcatatgagtttgctgagaaaggagtcgataaaaaaacgacacttgctatagatattttgctcaatagccaaactcaagaaacgccgaaacgaacattttccaattggaacacccctgcatatattcgggagggattggaatggctgcgcaaatga

SEQ ID NO: 76663 - DNA, 1911 bp, Yersinia mollaretii
atggctgcgcaaatgaaaaagaaaagttacagcgatgaaacagtgaagattttgaatgctgtatcagaaggtaagaattttcttttgagcggaggtgctggtagcggtaagacttattctctcatcgagagtatttctggtcttttagagaacaatcccctagcaaaagtcgcttgtataacatatacaaacacagcgacaaacgaaatcgaaaatagaatagacaatgaatgtttaaaagtatcaaccattcatgattttttatggtctagtattaagcactttcagaaagagttgaagactgttttgatcgatctgatcaatgacgaggagaaaaatttatttaatgtgatttcagccactggcgaaccggaaaagattttatgtatagctggagacattgagtataaagaatttgttaagcttcgagacgggatagtgtcacacgatcaaattcctgtcttggctcacgtgatgttctctaagtttcctaagctgtgtaggattttaaatgacagttttaaattcattcttgttgatgagtaccaagatacaagtccgttagttgtggatattttgttgaactgcctggcttcagttccaagaagaaatatagttggtttttttggtgattctatgcagtctatctttgagggtggtattgggaatcttgatgcttataaaggaaatggtcgcgctcaagttcacgaaatttataaacagcaaaatcgacgtaacccaacagcgataataaacttggcaaataaaattagaacagatggtctcattcaagtgccatccgatgacatcagcgccccaaacatgaataaaggcgtcgctaagctgggtagtgcggtatttttgtattcatcagacgagagcactcaagttgcgcgtgactatttgcgatgggatctctcaccattaaatactaaagagctaaatcttacacataatttgattgcggttaagggaggcttccctaaccttatgcgtatatacgatgcagacaagatccttgagtatgttaggagacttcgatcttatatcaagagctcagagccggaattcaatatttttgataaaagtctagaacaggtgtgctgcgaacttaaaattggtaaaagtgggaagctacttgacaaggtatgtccgactccaattcaggtagcttacatagaagcttatcatgaaaactttgaagcagcgctaaaactatcatttgagagcattgcttcaatttacatcgacaaggacatgttgattgatgatcaaaaggctgatcaaagcacgcttggggggagtggggcaaatagagaccatttaattaaacatctatacaagattcaaaaagttattcaactatatgaagagggtgacttcaattcattcttaggggcgacagacttaaagattaataatcacaaagataaagttataataaagagtgccattgaaggactgtcacaatccgatggtaagacgattggtgatgtgattagtgaagctcatcttaacgggctggttcgccgtgatgaccgtttggaagagtttgcccgtgtcaaagcatatgtttacaatcaagtatgcaaggtatcttacgacgagtttcggtatctgtacaaatacatcgatggtaagacgccatattctacacagcataaaacaaaggggcgcgagtatgataacgtcttagttataatggataatgggaaatggaatcactataacttcgaagaattttttcttggtggaggaaaagatagtgtgctttcgagaactaggaaactggtatatgtatgctgcacgcgagcccgtgataatttagcaatgttttatccgcagccatctggaaaggttatagaaaaagcgaaagatttgtttggtgctgacaatgttattgaactgtag

SEQ ID NO: 76664 - DNA, 2070 bp, Streptococcus pneumoniae; identical to SEQ ID NO: 71808

SEQ ID NO: 76665 - DNA, 1818 bp, Streptococcus pneumoniae; identical to SEQ ID NO: 71809

SEQ ID NO: 76666 - DNA, 1758 bp, Streptococcus pneumoniae; identical to SEQ ID NO: 76066

SEQ ID NO: 76667 - DNA, 1539 bp, Streptococcus pneumoniae; identical to SEQ ID NO: 72173

SEQ ID NO: 76668 - DNA, 2070 bp, Streptococcus pneumoniae; identical to SEQ ID NO: 71978

SEQ ID NO: 76669 - DNA, 1818 bp, Streptococcus pneumoniae; identical to SEQ ID NO: 71979

SEQ ID NO: 76670 - DNA, 2070 bp, Streptococcus pneumoniae; identical to SEQ ID NO: 71808

SEQ ID NO: 76671 - DNA, 1818 bp, Streptococcus pneumoniae; identical to SEQ ID NO: 71809

SEQ ID NO: 76672 - DNA, 2088 bp, Streptococcus pneumoniae; identical to SEQ ID NO: 73976

SEQ ID NO: 76673 - DNA, 1818 bp, Streptococcus pneumoniae; identical to SEQ ID NO: 73977

SEQ ID NO: 76674 - DNA, 1938 bp, Streptococcus pneumoniae; identical to SEQ ID NO: 72598

SEQ ID NO: 76675 - DNA, 1818 bp, Streptococcus pneumoniae; identical to SEQ ID NO: 72387

SEQ ID NO: 76676 - DNA, 1776 bp, Streptococcus pneumoniae
atgaaattcacaaagttatccattgaaaattttagaaatttcgagagtgctactatcaatatagataataaaaatgtgattttcggtatgaatgatattggtaagacaaactttttgtatgcgttaagattcttatttgatccggaactgcgcagaaatggttttgggccttcggattataacaatcataatgtagacaaaaacatatcaataactataacaattgatcttagtgactttaatcaaagtgaagatacaaaaaaacttgttgccgcaatacacggtgcacacacctcgcctccgttagaagaggatttgttttatatccaactaaaatccgagtttaataaaaaagaggaatatggaaatattgttctgttttggggtagcgattacgaaaatttagttgagattccgtctagaggtaatgttagtgctttggataaagcatttaaagttttttacgttaatcctttagtaaacttggaccgcttattcaataagaacaagaaactcttctttgaacaatcagaaggacaaagtgccgatcaagatataatcgatacgataaaaggtttaacttgtaatgtgaatgatgaaatcggaaaattgactacgattaaaaaattccaagaagaaataactaaagaatataaaacattaagaagagaaaatgttagcgtcgagttaaaatctgaaatggcgattaaaggatttttctcagatgtaatcccttatatcaagaaagatgatgacaatgatcgttattatccgacttctggcgatggtcggaggaagatgctctcctattcaatttttaattatttagccaagaataaatatgaggacaagattattatatttttaattgaggaacctgagataagtttacatagatctatgcaaatatctctttctaaaaagctatttgaaaacgacacttataattacttctttctttctacgcattctccagagatgctctatgaaatgaataatacaaggcttattagagttcattctccagagaaaattaattgttgctcgtatctatataacgtagaggaaccgtatacaagtgttaagagaaagctaaatagatccttagcatccgcattatttgcggaaagagtattattagttgagggaccgtcagaattaacattatttgaaaaggtactctctatggtgaagcctgattatgaactagaaggtggatttatactacaagttggcggtatctattttaaacactacacaaacgcgctgaaagaattaaatatacattatatagttaaaactgataacgatttaaagaggaagaaaaaaaagaaaggagaatatgaactaataggtctgaatagatgcttatctctaattgatgagacgaagttagataatgaatttattgatataccagaaggaatgccagataaagaagaaaagatttttatcaaagaagaagttcaacgaaaaaaagaagaattatactgtaaacatagtgacatcatagaaactctaaaacaaaatagcatttacttgtctaggatagatttagagaatgacctatataaagtaatagaagataagatgaaagaagtatttggtgaaaaccctgttaagcagttacaggatagcaaattgtttaatatggtagatttagttttagagctagataaacaagagtgtgaggatatatataatgatgaaaatttttattgtctcgtagaattaaccaattctactaagcaagaaggtgaagataatgttatctga

SEQ ID NO: 76677 - DNA, 1518 bp, Streptococcus pneumoniae
atgttatctgataaggaaattagagaacaaattttaaaggacaatggaaatgtaattgtctctgctggagcaggttcaggtaaaaccacgttacttgttaaaaaaattcttgaagagggaaaggcaaaaaatagccactatggtatagctgcaattacgttcactaataaatctgctgctgacataaaagaaaagttagggagttatgatcggtttaaaaactttgtaggtactgctgactcttttgttgaatctgaagtgataagaccctttattgtagatgcattcgggaaacattattctgacaattttaaggtagattattatcgaaacaaatttagatctgcaaaaaagggtttagagatcttaagaaataagaatgtcttaggcacctttgaaagagatagggatcaggataatcattttaataaaatgaactttaaatttcaagtagcggtattaatattagaaaactctttagctgctcgtcaatatataaaagctaaatatcgtagattgtatgttgatgagtatcaagatacagatttagatatgaataagttttacctgtatttgaaggataaactagggattaaattattttttgtgggtgatttaaagcaatcaatatataaatggagaggtgccgaaccggaaaattttagaaatttactttcggacgatagtgattttaataagtatgaactaactgtaaattttagatgtgctcaagatatccaaaattattcaaagttatttattgaaaacgaggttattgaagaaaaagacgaaattactagtgttttaggaatttattctgattttgacttgccagatgtagttaacaatataatgtataacaaattgttaaagaaaaagactttcgctatattagtacgtaataatagccaggcaaaacaatataaagaggaattaacggcattgggtaaagattttacatatataccgcccaacccacttgatgttactactccaaatgttgttttcttaagagagctcgttaaatatataaaaaatgagaattactcattatacgaactgcagaataatatttatagggaattaagtaaggatgagcgtaccacactaaagacaatggttgaaaaacttgagacctgtaaagataaggactctatcgatgattgcttaatagagatatatggacttcttggaatgggaatctatgaaggagaactcgataacttttcaagcgtattacttacggacgaatacgattctgcctttgacactcgagagaagtcctattatataatgactatacattctgcaaagggattagaatttgataatgttttatatgctgcgggggatctaaatctctgggaagatgatttctctaatttacattatgtagcaattacccgggcgatagaaaagttatttgtcattattgatagtagagagtacgagagggaagtaaataagttaattagagaaaaagaaatagaaaaaataatgaatgtgattcaaatatag

SEQ ID NO: 76678 - DNA, 1926 bp, Salmonella enterica; identical to SEQ ID NO: 72180
  subsp. enterica serovar Typhimurium str. DT104

SEQ ID NO: 76679 - DNA, 1662 bp, Salmonella enterica; identical to SEQ ID NO: 72181
  subsp. enterica serovar Typhimurium str. DT104

SEQ ID NO: 76680 - DNA, 2070 bp, Streptococcus pneumoniae; identical to SEQ ID NO: 71808

SEQ ID NO: 76681 - DNA, 1818 bp, Streptococcus pneumoniae; identical to SEQ ID NO: 71809

SEQ ID NO: 76682 - DNA, 2088 bp, Streptococcus pneumoniae; identical to SEQ ID NO: 73976

SEQ ID NO: 76683 - DNA, 1818 bp, Streptococcus pneumoniae; identical to SEQ ID NO: 73977

SEQ ID NO: 76684 - DNA, 2100 bp, Streptococcus pneumoniae; identical to SEQ ID NO: 73328

SEQ ID NO: 76685 - DNA, 1818 bp, Streptococcus pneumoniae; identical to SEQ ID NO: 73329

SEQ ID NO: 76686 - DNA, 2088 bp, Streptococcus pneumoniae; identical to SEQ ID NO: 73976

SEQ ID NO: 76687 - DNA, 1818 bp, Streptococcus pneumoniae; identical to SEQ ID NO: 73977

SEQ ID NO: 76688 - DNA, 2088 bp, Streptococcus pneumoniae; identical to SEQ ID NO: 73976

SEQ ID NO: 76689 - DNA, 1818 bp, Streptococcus pneumoniae; identical to SEQ ID NO: 73977

SEQ ID NO: 76690 - DNA, 1824 bp, Salmonella enterica subsp. enterica serovar Typhi; identical to SEQ ID NO: 76060

SEQ ID NO: 76691 - DNA, 1893 bp, Salmonella enterica subsp. enterica serovar Typhi; identical to SEQ ID NO: 74431

SEQ ID NO: 76692 - DNA, 1758 bp, Streptococcus pneumoniae; identical to SEQ ID NO: 72172

SEQ ID NO: 76693 - DNA, 1539 bp, Streptococcus pneumoniae; identical to SEQ ID NO: 72173

SEQ ID NO: 76694 - DNA, 2070 bp, Streptococcus pneumoniae; identical to SEQ ID NO: 76276

SEQ ID NO: 76695 - DNA, 1818 bp, Streptococcus pneumoniae; identical to SEQ ID NO: 76277

SEQ ID NO: 76696 - DNA, 2070 bp, Streptococcus pneumoniae; identical to SEQ ID NO: 71978

SEQ ID NO: 76697 - DNA, 1818 bp, Streptococcus pneumoniae; identical to SEQ ID NO: 71979

SEQ ID NO: 76698 - DNA, 2070 bp, Streptococcus pneumoniae; identical to SEQ ID NO: 71808

SEQ ID NO: 76699 - DNA, 1818 bp, Streptococcus pneumoniae; identical to SEQ ID NO: 71809

SEQ ID NO: 76700 - DNA, 2070 bp, Streptococcus pneumoniae; identical to SEQ ID NO: 71808

SEQ ID NO: 76701 - DNA, 1818 bp, Streptococcus pneumoniae; identical to SEQ ID NO: 71809

SEQ ID NO: 76702 - DNA, 2070 bp, Streptococcus pneumoniae; identical to SEQ ID NO: 71978

SEQ ID NO: 76703 - DNA, 1818 bp, Streptococcus pneumoniae; identical to SEQ ID NO: 71979

SEQ ID NO: 76704 - DNA, 1926 bp, Salmonella enterica; identical to SEQ ID NO: 72180
  subsp. enterica serovar Typhimurium str. DT104

SEQ ID NO: 76705 - DNA, 1662 bp, Salmonella enterica; identical to SEQ ID NO: 72181
  subsp. enterica serovar Typhimurium str. DT104

SEQ ID NO: 76706 - DNA, 2088 bp, Streptococcus pneumoniae; identical to SEQ ID NO: 73976

SEQ ID NO: 76707 - DNA, 1818 bp, Streptococcus pneumoniae; identical to SEQ ID NO: 76075

SEQ ID NO: 76708 - DNA, 2070 bp, Streptococcus pneumoniae; identical to SEQ ID NO: 71978

SEQ ID NO: 76709 - DNA, 1818 bp, Streptococcus pneumoniae; identical to SEQ ID NO: 71979

SEQ ID NO: 76710 - DNA, 2070 bp, Streptococcus pneumoniae; identical to SEQ ID NO: 71808

SEQ ID NO: 76711 - DNA, 1818 bp, Streptococcus pneumoniae; identical to SEQ ID NO: 71809

SEQ ID NO: 76712 - DNA, 2190 bp, Staphylococcus aureus; identical to SEQ ID NO: 71982

SEQ ID NO: 76713 - DNA, 1794 bp, Staphylococcus aureus; identical to SEQ ID NO: 75835

SEQ ID NO: 76714 - DNA, 2100 bp, Streptococcus pneumoniae; identical to SEQ ID NO: 76158

SEQ ID NO: 76715 - DNA, 1818 bp, Streptococcus pneumoniae; identical to SEQ ID NO: 76159

SEQ ID NO: 76716 - DNA, 2070 bp, Streptococcus pneumoniae; identical to SEQ ID NO: 71978

SEQ ID NO: 76717 - DNA, 1818 bp, Streptococcus pneumoniae; identical to SEQ ID NO: 71979

SEQ ID NO: 76718 - DNA, 2100 bp, Streptococcus pneumoniae; identical to SEQ ID NO: 73328

SEQ ID NO: 76719 - DNA, 1818 bp, Streptococcus pneumoniae; identical to SEQ ID NO: 73329

SEQ ID NO: 76720 - DNA, 2100 bp, Streptococcus pneumoniae; identical to SEQ ID NO: 73328

SEQ ID NO: 76721 - DNA, 1818 bp, Streptococcus pneumoniae; identical to SEQ ID NO: 73329

SEQ ID NO: 76722 - DNA, 2100 bp, Streptococcus pneumoniae; identical to SEQ ID NO: 73328

SEQ ID NO: 76723 - DNA, 1818 bp, Streptococcus pneumoniae; identical to SEQ ID NO: 73329

SEQ ID NO: 76724 - DNA, 2070 bp, Streptococcus pneumoniae; identical to SEQ ID NO: 71978

SEQ ID NO: 76725 - DNA, 1818 bp, Streptococcus pneumoniae; identical to SEQ ID NO: 71979

SEQ ID NO: 76726 - DNA, 1926 bp, Salmonella enterica; identical to SEQ ID NO: 72180
  subsp. enterica serovar Typhimurium str. DT104

SEQ ID NO: 76727 - DNA, 1662 bp, Salmonella enterica; identical to SEQ ID NO: 72181
  subsp. enterica serovar Typhimurium str. DT104

SEQ ID NO: 76728 - DNA, 2070 bp, Streptococcus pneumoniae; identical to SEQ ID NO: 76276

SEQ ID NO: 76729 - DNA, 1818 bp, Streptococcus pneumoniae; identical to SEQ ID NO: 76277

SEQ ID NO: 76730 - DNA, 2070 bp, Streptococcus pneumoniae; identical to SEQ ID NO: 71978

SEQ ID NO: 76731 - DNA, 1818 bp, Streptococcus pneumoniae; identical to SEQ ID NO: 71979

SEQ ID NO: 76732 - DNA, 2070 bp, Streptococcus pneumoniae; identical to SEQ ID NO: 71808

SEQ ID NO: 76733 - DNA, 1818 bp, Streptococcus pneumoniae; identical to SEQ ID NO: 71809

SEQ ID NO: 76734 - DNA, 1926 bp, Salmonella enterica; identical to SEQ ID NO: 72180
  subsp. enterica serovar Typhimurium str. DT104

SEQ ID NO: 76735 - DNA, 1662 bp, Salmonella enterica; identical to SEQ ID NO: 72181
  subsp. enterica serovar Typhimurium str. DT104

SEQ ID NO: 76736 - DNA, 2070 bp, Streptococcus pneumoniae; identical to SEQ ID NO: 71808

SEQ ID NO: 76737 - DNA, 1818 bp, Streptococcus pneumoniae; identical to SEQ ID NO: 71809

SEQ ID NO: 76738 - DNA, 2070 bp, Streptococcus pneumoniae; identical to SEQ ID NO: 71978

SEQ ID NO: 76739 - DNA, 1818 bp, Streptococcus pneumoniae; identical to SEQ ID NO: 71979

SEQ ID NO: 76740 - DNA, 2070 bp, Streptococcus pneumoniae; identical to SEQ ID NO: 71978

SEQ ID NO: 76741 - DNA, 1818 bp, Streptococcus pneumoniae; identical to SEQ ID NO: 71979

SEQ ID NO: 76742 - DNA, 2070 bp, Streptococcus pneumoniae; identical to SEQ ID NO: 71978

SEQ ID NO: 76743 - DNA, 1818 bp, Streptococcus pneumoniae; identical to SEQ ID NO: 71979

SEQ ID NO: 76744 - DNA, 2070 bp, Streptococcus pneumoniae; identical to SEQ ID NO: 71808

SEQ ID NO: 76745 - DNA, 1818 bp, Streptococcus pneumoniae; identical to SEQ ID NO: 71809

SEQ ID NO: 76746 - DNA, 2070 bp, Streptococcus pneumoniae; identical to SEQ ID NO: 71978

SEQ ID NO: 76747 - DNA, 1818 bp, Streptococcus pneumoniae; identical to SEQ ID NO: 71979

SEQ ID NO: 76748 - DNA, 2070 bp, Streptococcus pneumoniae; identical to SEQ ID NO: 71978

SEQ ID NO: 76749 - DNA, 1818 bp, Streptococcus pneumoniae; identical to SEQ ID NO: 71979

SEQ ID NO: 76750 - DNA, 2088 bp, Streptococcus pneumoniae; identical to SEQ ID NO: 73976

SEQ ID NO: 76751 - DNA, 1818 bp, Streptococcus pneumoniae; identical to SEQ ID NO: 73977

SEQ ID NO: 76752 - DNA, 1758 bp, Streptococcus pneumoniae; identical to SEQ ID NO: 72172

SEQ ID NO: 76753 - DNA, 1539 bp, Streptococcus pneumoniae; identical to SEQ ID NO: 72173

SEQ ID NO: 76754 - DNA, 2070 bp, Streptococcus pneumoniae; identical to SEQ ID NO: 71978

SEQ ID NO: 76755 - DNA, 1818 bp, Streptococcus pneumoniae; identical to SEQ ID NO: 71979

SEQ ID NO: 76756 - DNA, 2190 bp, Staphylococcus aureus; identical to SEQ ID NO: 71982

SEQ ID NO: 76757 - DNA, 1794 bp, Staphylococcus aureus; identical to SEQ ID NO: 75835

SEQ ID NO: 76758 - DNA, 2070 bp, Streptococcus pneumoniae; identical to SEQ ID NO: 71978

SEQ ID NO: 76759 - DNA, 1818 bp, Streptococcus pneumoniae; identical to SEQ ID NO: 71979

SEQ ID NO: 76760 - DNA, 1758 bp, Streptococcus pneumoniae; identical to SEQ ID NO: 72172

SEQ ID NO: 76761 - DNA, 1539 bp, Streptococcus pneumoniae; identical to SEQ ID NO: 72173

SEQ ID NO: 76762 - DNA, 2088 bp, Streptococcus pneumoniae; identical to SEQ ID NO: 73976

SEQ ID NO: 76763 - DNA, 1818 bp, Streptococcus pneumoniae; identical to SEQ ID NO: 73977

SEQ ID NO: 76764 - DNA, 2070 bp, Streptococcus pneumoniae; identical to SEQ ID NO: 71808

SEQ ID NO: 76765 - DNA, 1818 bp, Streptococcus pneumoniae; identical to SEQ ID NO: 71809

SEQ ID NO: 76766 - DNA, 2100 bp, Streptococcus pneumoniae; identical to SEQ ID NO: 73328

SEQ ID NO: 76767 - DNA, 1818 bp, Streptococcus pneumoniae; identical to SEQ ID NO: 73329

SEQ ID NO: 76768 - DNA, 2100 bp, Streptococcus pneumoniae; identical to SEQ ID NO: 73328

SEQ ID NO: 76769 - DNA, 1818 bp, Streptococcus pneumoniae; identical to SEQ ID NO: 73329

SEQ ID NO: 76770 - DNA, 2088 bp, Streptococcus pneumoniae; identical to SEQ ID NO: 73976

SEQ ID NO: 76771 - DNA, 1818 bp, Streptococcus pneumoniae; identical to SEQ ID NO: 73977

SEQ ID NO: 76772 - DNA, 2070 bp, Streptococcus pneumoniae; identical to SEQ ID NO: 71808

SEQ ID NO: 76773 - DNA, 1818 bp, Streptococcus pneumoniae; identical to SEQ ID NO: 71809

SEQ ID NO: 76774 - DNA, 1926 bp, Salmonella enterica; identical to SEQ ID NO: 72180
  subsp. enterica serovar Typhimurium str. DT104

SEQ ID NO: 76775 - DNA, 1662 bp, Salmonella enterica; identical to SEQ ID NO: 72181
  subsp. enterica serovar Typhimurium str. DT104

SEQ ID NO: 76776 - DNA, 2100 bp, Streptococcus pneumoniae; identical to SEQ ID NO: 73328

SEQ ID NO: 76777 - DNA, 1818 bp, Streptococcus pneumoniae; identical to SEQ ID NO: 73329

SEQ ID NO: 76778 - DNA, 2070 bp, Streptococcus pneumoniae; identical to SEQ ID NO: 71978

SEQ ID NO: 76779 - DNA, 1818 bp, Streptococcus pneumoniae; identical to SEQ ID NO: 71979

SEQ ID NO: 76780 - DNA, 2070 bp, Streptococcus pneumoniae; identical to SEQ ID NO: 71978

SEQ ID NO: 76781 - DNA, 1818 bp, Streptococcus pneumoniae; identical to SEQ ID NO: 71979

SEQ ID NO: 76782 - DNA, 2100 bp, Streptococcus pneumoniae; identical to SEQ ID NO: 73328

SEQ ID NO: 76783 - DNA, 1818 bp, Streptococcus pneumoniae; identical to SEQ ID NO: 73329

SEQ ID NO: 76784 - DNA, 2088 bp, Streptococcus pneumoniae; identical to SEQ ID NO: 73976

SEQ ID NO: 76785 - DNA, 1818 bp, Streptococcus pneumoniae; identical to SEQ ID NO: 76075

SEQ ID NO: 76786 - DNA, 2100 bp, Streptococcus pneumoniae; identical to SEQ ID NO: 73328

SEQ ID NO: 76787 - DNA, 1818 bp, Streptococcus pneumoniae; identical to SEQ ID NO: 73329

SEQ ID NO: 76788 - DNA, 2088 bp, Streptococcus pneumoniae; identical to SEQ ID NO: 73976

SEQ ID NO: 76789 - DNA, 1818 bp, Streptococcus pneumoniae; identical to SEQ ID NO: 76075

SEQ ID NO: 76790 - DNA, 2070 bp, Streptococcus pneumoniae; identical to SEQ ID NO: 71808

SEQ ID NO: 76791 - DNA, 1818 bp, Streptococcus pneumoniae; identical to SEQ ID NO: 71809

SEQ ID NO: 76792 - DNA, 2070 bp, Streptococcus pneumoniae; identical to SEQ ID NO: 71808

SEQ ID NO: 76793 - DNA, 1818 bp, Streptococcus pneumoniae; identical to SEQ ID NO: 71809

SEQ ID NO: 76794 - DNA, 2070 bp, Streptococcus pneumoniae; identical to SEQ ID NO: 71808

SEQ ID NO: 76795 - DNA, 1818 bp, Streptococcus pneumoniae; identical to SEQ ID NO: 71809

SEQ ID NO: 76796 - DNA, 2070 bp, Streptococcus pneumoniae; identical to SEQ ID NO: 71808

SEQ ID NO: 76797 - DNA, 1818 bp, Streptococcus pneumoniae; identical to SEQ ID NO: 71809

SEQ ID NO: 76798 - DNA, 2088 bp, Streptococcus pneumoniae; identical to SEQ ID NO: 73976

SEQ ID NO: 76799 - DNA, 1818 bp, Streptococcus pneumoniae; identical to SEQ ID NO: 73977

SEQ ID NO: 76800 - DNA, 2070 bp, Streptococcus pneumoniae; identical to SEQ ID NO: 71978

SEQ ID NO: 76801 - DNA, 1818 bp, Streptococcus pneumoniae; identical to SEQ ID NO: 71979

SEQ ID NO: 76802 - DNA, 2070 bp, Streptococcus pneumoniae; identical to SEQ ID NO: 71808

SEQ ID NO: 76803 - DNA, 1818 bp, Streptococcus pneumoniae; identical to SEQ ID NO: 71809

SEQ ID NO: 76804 - DNA, 1926 bp, Salmonella enterica; identical to SEQ ID NO: 72180
  subsp. enterica serovar Typhimurium str. DT104

SEQ ID NO: 76805 - DNA, 1662 bp, Salmonella enterica; identical to SEQ ID NO: 72181
  subsp. enterica serovar Typhimurium str. DT104

SEQ ID NO: 76806 - DNA, 2070 bp, Streptococcus pneumoniae; identical to SEQ ID NO: 76276

SEQ ID NO: 76807 - DNA, 1818 bp, Streptococcus pneumoniae; identical to SEQ ID NO: 76277

SEQ ID NO: 76808 - DNA, 1758 bp, Streptococcus pneumoniae; identical to SEQ ID NO: 72172

SEQ ID NO: 76809 - DNA, 1539 bp, Streptococcus pneumoniae; identical to SEQ ID NO: 72173

SEQ ID NO: 76810 - DNA, 2190 bp, Streptococcus pneumoniae; identical to SEQ ID NO: 71982

SEQ ID NO: 76811 - DNA, 1794 bp, Streptococcus pneumoniae; identical to SEQ ID NO: 71697

SEQ ID NO: 76812 - DNA, 2070 bp, Streptococcus pneumoniae; identical to SEQ ID NO: 71808

SEQ ID NO: 76813 - DNA, 1818 bp, Streptococcus pneumoniae; identical to SEQ ID NO: 71809

SEQ ID NO: 76814 - DNA, 1542 bp, Streptococcus pneumoniae
ttgggtaatgcttcaggtagtatgttaagtaggttggtaaatagtataaattggaccgaagatgagataaatgaaattacagataaaattgatgagttgaataacacctttttatctgaaaatggagcattgactcagatcaacaatgagattcagaagtcatgggaattatatcatgaagataaccgtttttctcaagcagagttgattattaattcttctgagatggcggcagcacttagacagattgccttaaaattttcaccaacaaccactgaagaagcatttacagtttcagatctaggagatggactgagatctattttttatttttcacttgttgattcgatacttgatattgagttagaaattaccaaagaccgtgaagaaaatcctgataatccaagatttaagttgattccaccagtactaactatcctagcaatagaagaaccagaaaatcatattgctccacatcacattggaaaactgataaaaaggtttaagcaattaggcaataatgacaactctcaagtaattttaacgtcacattctccagctattgtaaaaagaattgacccagaagatttgaagtatttaagaatagaaaataatgacagagttcttcaaaccattgtttctgatatacagctacctccagctatagatgaatcttataaatatattaaaggagcaattcaagcttatcctgaactatattttgcgaagttagtagttctaggtgaaggcgacagtgaggaactgctattaccaaagttttttgatttacttgggaaagaggtagatagctctcagatttcaattgtccctttagggggcagacatgtcaactatttttggaaattattgaatgctctcagaattcctcatattaccttgttggattttgataatgagagatacggaggtggttggggaagaataaaatacatttctcaacatctgtatgagctgaacacagagtttcaagaatggttccatactcagagacttgattttaatgaaattgggtcacgaggttgtgaatcgataggagctcaacgtctgattaattggtttaataaactcgaagaatttaatgtctacttttcatcgcctttagatattgatttcttgatgctacaacattataaagacaattatctgaatactttatccccaatagaaggaccagttgtttcatataatgattcggatggaagtagtaaaaaagtgaaattgagtgatttagactgtcttgatagattgcagttagaaggtttcaacaaacgtaaagaggaagcaataagagctactttaaaagataagagtggacatggcgatagtttcaatgaagaagaaaaagaattaatgatttggtatcaatatttctttttaggtagaggaaaaccaacaactcatatgcaatttttatcatctattagtgatgatgaattaacaagaaatctaccccctgtatttgaaaaaatagttaacagtgctgaagaattacttggagatattcaacatggtaaagagtga

SEQ ID NO: 76815 - DNA, 1818 bp, Streptococcus pneumoniae; identical to SEQ ID NO: 71979

SEQ ID NO: 76816 - DNA, 2088 bp, Streptococcus pneumoniae; identical to SEQ ID NO: 73976

SEQ ID NO: 76817 - DNA, 1818 bp, Streptococcus pneumoniae; identical to SEQ ID NO: 76075

SEQ ID NO: 76818 - DNA, 2190 bp, Staphylococcus aureus; identical to SEQ ID NO: 71982

SEQ ID NO: 76819 - DNA, 1794 bp, Staphylococcus aureus; identical to SEQ ID NO: 75835

SEQ ID NO: 76820 - DNA, 2100 bp, Streptococcus pneumoniae; identical to SEQ ID NO: 73328

SEQ ID NO: 76821 - DNA, 1818 bp, Streptococcus pneumoniae; identical to SEQ ID NO: 73329

SEQ ID NO: 76822 - DNA, 2100 bp, Streptococcus pneumoniae; identical to SEQ ID NO: 73328

SEQ ID NO: 76823 - DNA, 1818 bp, Streptococcus pneumoniae; identical to SEQ ID NO: 73329

SEQ ID NO: 76824 - DNA, 2070 bp, Streptococcus pneumoniae; identical to SEQ ID NO: 71978

SEQ ID NO: 76825 - DNA, 1818 bp, Streptococcus pneumoniae; identical to SEQ ID NO: 71979

SEQ ID NO: 76826 - DNA, 2070 bp, Streptococcus pneumoniae; identical to SEQ ID NO: 71978

SEQ ID NO: 76827 - DNA, 1818 bp, Streptococcus pneumoniae; identical to SEQ ID NO: 71979

SEQ ID NO: 76828 - DNA, 2100 bp, Streptococcus pneumoniae; identical to SEQ ID NO: 73328

SEQ ID NO: 76829 - DNA, 1818 bp, Streptococcus pneumoniae; identical to SEQ ID NO: 73329

SEQ ID NO: 76830 - DNA, 2070 bp, Streptococcus pneumoniae; identical to SEQ ID NO: 71978

SEQ ID NO: 76831 - DNA, 1818 bp, Streptococcus pneumoniae; identical to SEQ ID NO: 71979

SEQ ID NO: 76832 - DNA, 2088 bp, Streptococcus pneumoniae; identical to SEQ ID NO: 73976

SEQ ID NO: 76833 - DNA, 1818 bp, Streptococcus pneumoniae; identical to SEQ ID NO: 76075

SEQ ID NO: 76834 - DNA, 2070 bp, Streptococcus pneumoniae; identical to SEQ ID NO: 71978

SEQ ID NO: 76835 - DNA, 1818 bp, Streptococcus pneumoniae; identical to SEQ ID NO: 71979

SEQ ID NO: 76836 - DNA, 1926 bp, Salmonella enterica; identical to SEQ ID NO: 72180
  subsp. enterica serovar Typhimurium str. DT104

SEQ ID NO: 76837 - DNA, 1662 bp, Salmonella enterica; identical to SEQ ID NO: 72181
  subsp. enterica serovar Typhimurium str. DT104

SEQ ID NO: 76838 - DNA, 2088 bp, Streptococcus pneumoniae; identical to SEQ ID NO: 73976

SEQ ID NO: 76839 - DNA, 1818 bp, Streptococcus pneumoniae; identical to SEQ ID NO: 73977

SEQ ID NO: 76840 - DNA, 1596 bp, Streptococcus pneumoniae
ttggataaaattagggtactttatgtacctgcttcaagaacgcctgagaaggagttgggtaatgcttcaggtagtatgttaagtaggttggtaaatagtataaattggaccgaagatgagataaatgaaattacagataaaattgatgagttgaataacacctttttatctgaaaatggagcattgactcagatcaacaatgagattcagaagtcatgggaattatatcatgaagataaccgtttttctcaagcagagttgattattaattcttctgagatggcggcagcacttagacagattgccttaaaattttcaccaacaaccactgaagaagcatttacagtttcagatctaggagatggactgagatctattttttatttttcacttgttgattcgatacttgatattgagttagaaattaccaaagaccgtgaagaaaatcctgataatccaagatttaagttgattccaccagtactaactatcctagcaatagaagaaccagaaaatcatattgctccacatcacattggaaaactgataaaaaggtttaagcaattaggcaataatgacaactctcaagtaattttaacgtcacattctccagctattgtaaaaagaattgacccagaagatttgaagtatttaagaatagaaaataatgacagagttcttcaaaccattgtttctgatatacagctacctccagctatagatgaatcttataaatatattaaaggagcaattcaagcttatcctgaactatattttgcgaagttagtagttctaggtgaaggcgacagtgaggaactgctattaccaaagttttttgatttacttgggaaagaggtagatagctctcagatttcaattgtccctttagggggcagacatgtcaactatttttggaaattattgaatgctctcagaattcctcatattaccttgttggattttgataatgagagatacggaggtggttggggaagaataaaatacatttctcaacatctgtatgagctgaacacagagtttcaagaatggttccatactcagagacttgattttaatgaaattgggtcacgaggttgtgaatcgataggagctcaacgtctgattaattggtttaataaactcgaagaatttaatgtctacttttcatcgcctttagatattgatttcttgatgctacaacattataaagacaattatctgaatactttatccccaatagaaggaccagttgtttcatataatgattcggatggaagtagtaaaaaagtgaaattgagtgatttagactgtcttgatagattgcagttagaaggtttcaacaaacgtaaagaggaagcaataagagctactttaaaagataagagtggacatggcgatagtttcaatgaagaagaaaaagaattaatgatttggtatcaatatttctttttaggtagaggaaaaccaacaactcatatgcaatttttatcatctattagtgatgatgaattaacaagaaatctaccccctgtatttgaaaaaatagttaacagtgctgaagaattacttggagatattcaacatggtaaagagtga

SEQ ID NO: 76841 - DNA, 1818 bp, Streptococcus pneumoniae; identical to SEQ ID NO: 71979

SEQ ID NO: 76842 - DNA, 2100 bp, Streptococcus pneumoniae; identical to SEQ ID NO: 73328

SEQ ID NO: 76843 - DNA, 1818 bp, Streptococcus pneumoniae; identical to SEQ ID NO: 73329

SEQ ID NO: 76844 - DNA, 2070 bp, Streptococcus pneumoniae; identical to SEQ ID NO: 71978

SEQ ID NO: 76845 - DNA, 1818 bp, Streptococcus pneumoniae; identical to SEQ ID NO: 71979

SEQ ID NO: 76846 - DNA, 2088 bp, Streptococcus pneumoniae; identical to SEQ ID NO: 73976

SEQ ID NO: 76847 - DNA, 1818 bp, Streptococcus pneumoniae; identical to SEQ ID NO: 73977

SEQ ID NO: 76848 - DNA, 2088 bp, Streptococcus pneumoniae; identical to SEQ ID NO: 73976

SEQ ID NO: 76849 - DNA, 1818 bp, Streptococcus pneumoniae; identical to SEQ ID NO: 76075

SEQ ID NO: 76850 - DNA, 2070 bp, Streptococcus pneumoniae; identical to SEQ ID NO: 71978

SEQ ID NO: 76851 - DNA, 1818 bp, Streptococcus pneumoniae
atggtaaagagtgaggagtggtttcctaaaggagatatcattttagaagagactgcattaggagccgtcaaagatgtgactaactgtttagtcattgctggaccaggtgctgggaaaactgaattactagctcaaaagttagactatctattctctacaaataaatgcgtttctccgaaaaaaattctagcattaagtttcaaaacggatgctgcatcaaatttgaaagaaagagttaagaaacgttatggtgatgaatatgcttctcgttttacctcattaacctattcggcttttgaaaagagaattttagaccaatttagagatgttctacctgaggatatacgaccatcaagagattatttgattgaagattggtatactataaaagaactactctctatgaatggaattaatgttaatggatggagaatgtcagatataagaagatatgtcgaaaacatcatacttaacaatggggataatcacaagtttaaaactgacttactaaaaggaacacaagataataagccggtcctcttgtataggcaaataacaaagttgagtactcaaataatagatactaacgaatacatccgtaaagcacttcaaatgacatacgattttgtatttctagatgaatttcaggatactacatatgcccagtatgatttattaaaaacttgttttttaggttcgtcttgtaaattaacagcagttggagatgataagcaagccattatgagatgggcaggtgcaaagcctgatatttttccagactatattcgagactttaatccaaatgaatatcaattgttgatgaatcaccgctctgtacctaagcttgtagaatttcaaaaagaggttcatcagatattaaatagtaatcacagttctattcagacaaataattatccagaatttcaagagggtgaaataacattatttgaatttgaaaatgaaagtttagaagctaagttaattgcaaatgatatagaattaaaaattcaaggaggtatacgaccatcagaaatttgtatcctagcaaaacaaaaggttggtatttatagtttcgaattgatatctatattaaatagcaaagggattaaagcaagaattgaaaatgaatatcaggatattttaaaagatcctacgtgtaacctattattagatttaatatcatgcagtcaaggaaaacgagatcctttaatttgggaaaatattagtaatttttatggaaatatcaatggaatagatgagttaactgatgaattaattttagcaaaatcctataaggagattgacaatatagttagtgatattacttacctaatttcaaattttactcccaatgaagaaagtatgctaaaattaattgattgtattattgaaaaaatagatgaaaaaagaattatttccaatttttcaacatacaatggaaaaagtgacctagatatcattgtcaagaacttttcaaagttattatacatagaatattctcaaacacaaggtgaatggctagatacagtctctagtttcaagggtgaaaactcaattccaattatgactatccataagagtaaaggattagaatatgaggtagtctattttctaggcttggaggattctgcattctggagttttaataatcagccggaagaagataaaagtgcattctttgtcgcactttcaagagcaaaaagtcacttaatattcacatattgtaaattgagaaataatagtccgcaaaataatagaaatattaatgagatatattcattgctgactcaatccaatttagttgatgttattaattaa

SEQ ID NO: 76852 - DNA, 1926 bp, Salmonella enterica; identical to SEQ ID NO: 72180
  subsp. enterica serovar Typhimurium str. DT104

SEQ ID NO: 76853 - DNA, 1662 bp, Salmonella enterica; identical to SEQ ID NO: 72181
  subsp. enterica serovar Typhimurium str. DT104

SEQ ID NO: 76854 - DNA, 2070 bp, Streptococcus pneumoniae; identical to SEQ ID NO: 71978

SEQ ID NO: 76855 - DNA, 1818 bp, Streptococcus pneumoniae; identical to SEQ ID NO: 71979

SEQ ID NO: 76856 - DNA, 2088 bp, Streptococcus pneumoniae; identical to SEQ ID NO: 73976

SEQ ID NO: 76857 - DNA, 1818 bp, Streptococcus pneumoniae; identical to SEQ ID NO: 73977

SEQ ID NO: 76858 - DNA, 2088 bp, Streptococcus pneumoniae; identical to SEQ ID NO: 73976

SEQ ID NO: 76859 - DNA, 1818 bp, Streptococcus pneumoniae; identical to SEQ ID NO: 76075

SEQ ID NO: 76860 - DNA, 2070 bp, Streptococcus pneumoniae; identical to SEQ ID NO: 71808

SEQ ID NO: 76861 - DNA, 1818 bp, Streptococcus pneumoniae; identical to SEQ ID NO: 71809

SEQ ID NO: 76862 - DNA, 2088 bp, Streptococcus pneumoniae; identical to SEQ ID NO: 73976

SEQ ID NO: 76863 - DNA, 1818 bp, Streptococcus pneumoniae; identical to SEQ ID NO: 73977

SEQ ID NO: 76864 - DNA, 2190 bp, Staphylococcus aureus; identical to SEQ ID NO: 71982

SEQ ID NO: 76865 - DNA, 1794 bp, Staphylococcus aureus; identical to SEQ ID NO: 75835

SEQ ID NO: 76866 - DNA, 1758 bp, Streptococcus pneumoniae; identical to SEQ ID NO: 72172

SEQ ID NO: 76867 - DNA, 1539 bp, Streptococcus pneumoniae; identical to SEQ ID NO: 72173

SEQ ID NO: 76868 - DNA, 2100 bp, Streptococcus pneumoniae; identical to SEQ ID NO: 73328

SEQ ID NO: 76869 - DNA, 1818 bp, Streptococcus pneumoniae; identical to SEQ ID NO: 73329

SEQ ID NO: 76870 - DNA, 1911 bp, Yersinia massiliensis
atgtttttaagcaaattaaaaataaaaggctttagatgttttaatgatgaatttaatatttcattaaatgaaggccttagtgttattgtaggtgaaaatggggctgggaaatctgctattataaactcaataaggcaattatttattgattcagaatcagagcgatataacataacagaaaatgattttcatagcccattcagtaatcctccaaaagcaagtgattcatttacaattaatgcggagttttctaatttagatgcaaaggagataattgccttacttccttggactgggaattcagatgtagctaaattaaatttacacgttgagaataaagaaataagagggagatataaaaaatcactttggggtggtgattcgcaaaattctcaatttgattatgaattattagacctgatttattgcatatatctccctccattaagagatgcagaatcaaaactgaccaacggtcggcagtcaagattatcgaaacttttaaaagctataaatagaaaaaatctaaaaacacttaaaaaaagtggaggagtgcatcctttagtagataaagttaatacattcaatgatgaattatcaaatagtaatttatacagtattaaagccgcaaaccaattaataaaaaaccagttacagaatgctatagggcttaattttgggcagaacacagcaattcaatttgcagaaagtgactttactagaattgtagaaagcttacggcttgtatttttccctgacttaaaagagaatgacaccaaactttttagaaacttagagcaaaacagcttaggttataataacctcctttatattgcatctatattagccgagcttactctaggcaacgaacaagactcatctacttgtagagtattattaatagaagaacccgaagctcatttgcaccctcaacttcaaataagattacttgagcatttaaaaaaagtatccgaagacaaagaaaataatgttcaagtaattgtcacaactcattcgacaactcttgcttcttcagtcagtgttgattctatcattcacttatccaaatcaacttccccagtagcaacacgtataaaagactgcggattggcaaaaaaaagtaaagagttcattgatagatggatggatgtaactaaatccaacttgcttttcgcaagtggtgtaattctcgttgagggtatagccgagcaaatgctattgcctattttagcaaaagaggcattagcttgtagagatgcagggaaaaactccttatcagatttaggtgtttctgttataaatcttaatggtatctattttagacacttcatgggaatatattgtaactttgcaatcccaagtgaaaagacaaagcatgaaggattaaacatacctgttcgctgtgcagggttaacagaccttgaccctcccaaaaagataaaagaatgtgtagaagaaaataagttcattgaaaaaatagttatcccccatgatgatgaaatgtatgatggaactaatcatgctatcaagctcgtaggagagataaatatttctaaatatgcaaggctttatgtaagtaaatacaaaacacttgaatacgatctagcaatgacagggaataacattgctgttatgtcaactgtactttatgaaatttggcctacagatggggaaataaagaagaagataaaagaaattatggatgtaaatgacgattggtcgaaaaaaaaatctagcgaacgagctgtaattgcaaatgagttattacaatatatcgagaacaatgagttaggaaaaggatatttcgcacaaagtctttcagataaaatattaaataataaagttaaatttgaaacgccagaatatattaaaaatgctattctctgggtatgccaagatggagaggcataa

SEQ ID NO: 76871 - DNA, 1761 bp, Yersinia massiliensis
atgaagcattttaactctcaacagatggattatatcgaatcctctattgcctctagtatttatcttgaggcgtgtcctggtagtggaaaaactgaagtcattgcagcgaaagttgcaaaggagataaataattgggcacttagtcctagtggtatagctttattatccttttctaatagcgctacagatgaacttttctcacgggttaaaaagtactcccccgatacggtcagtagattcccacacttcatcggaacttttgatagttttatatttaagtttttaattagtcccaacgcaaaaagtttgactcattttgagggggaatgtaataacaatactttaaggattatagagtctgcgtcaccattattcattcaaacaaaatatgcttacaataaaagaggaaagatcaaagcacaccattatacttttgatagaagaaatgattccatactgttcaactcagatagcccagaacttgacagaatgagaaacgccataaacctgcaggaatggcaaattaaagatttaatagaaacaaaatataaattatttaaatctggattaatgactcacgatgattcactatttcttgctgctgaaatcttcagtaatgaacagtataaaaattatgcttcattactctccaaaagatttccactaattattattgatgagtgccaagatttatcatacgagcacttatttatattacaggggcttcatgatttaggagttaaacttcactttgtcggtgatttagatcaatccatttatggtttccgtgctgtagatcctaaagatacaataaaattcattgctgacaatgaattcgaaagaatgccattaaaaattaattatcgaagctgtcagcaaataattgatctttgttcaaaattaacagcacatgatggtgttaatggccaatttagttcaattgaatctccctgtatcgttttgcagtataatgaaacgcctctagaattaatcgataaaattggacagctatgtctcggatacagtaataatgtaatcgtagctcgtgggcactctattttggaaaagttcacatttaatggtgtagaagataatattgtgaaaaatcttgttaacgcaataaatattttctcattacatggaactcaaaatataaaaaactcactgcagttattttcaacagtaatacgcgcgagatcaaatcatccaattagagaatctaagtataattgtcctaatgagattgagtcatccgtgcaatggcgagcatttcttttctatacattggaatacttcatcgagaataagctcaacaattttgaattaacatggagtaagtggtgtaaaaatgcaaatgtaatccttatcaatcttcatcaacaaccgttcataactgatgaattaaaacctatagtagaggaagtattttccttatctataaaagctccttcaggacttgcaaaaattaatgtttcggagttcactgcaatagaaaaagtaaatactgaaaattataaatatgctacaattcatagcgttaaaggtgaaactcatgatgtaacaattctactatcatcgccttcaaactccggaaataatggttcacactggaaacagtggataagtaatcaaaagtcagaatcgaccagatttgcctatgttgcaagctcaagacctagatatcgattagtctggggtgtcaaaaaattaaaagacagtgaggctgatacattaagaaaacttggtttcactattgaatga

SEQ ID NO: 76872 - DNA, 2070 bp, Streptococcus pneumoniae; identical to SEQ ID NO: 71978

SEQ ID NO: 76873 - DNA, 1818 bp, Streptococcus pneumoniae; identical to SEQ ID NO: 71979

SEQ ID NO: 76874 - DNA, 2070 bp, Streptococcus pneumoniae; identical to SEQ ID NO: 76276

SEQ ID NO: 76875 - DNA, 1818 bp, Streptococcus pneumoniae; identical to SEQ ID NO: 76277

SEQ ID NO: 76876 - DNA, 2070 bp, Streptococcus pneumoniae; identical to SEQ ID NO: 71978

SEQ ID NO: 76877 - DNA, 1818 bp, Streptococcus pneumoniae; identical to SEQ ID NO: 71979

SEQ ID NO: 76878 - DNA, 1824 bp, Salmonella enterica subsp. enterica serovar Typhi; identical to SEQ ID NO: 76062

SEQ ID NO: 76879 - DNA, 1893 bp, Salmonella enterica subsp. enterica serovar Typhi; identical to SEQ ID NO: 71787

SEQ ID NO: 76880 - DNA, 2100 bp, Streptococcus pneumoniae; identical to SEQ ID NO: 73328

SEQ ID NO: 76881 - DNA, 1818 bp, Streptococcus pneumoniae; identical to SEQ ID NO: 73329

SEQ ID NO: 76882 - DNA, 1758 bp, Streptococcus pneumoniae; identical to SEQ ID NO: 72172

SEQ ID NO: 76883 - DNA, 1539 bp, Streptococcus pneumoniae; identical to SEQ ID NO: 72173

SEQ ID NO: 76884 - DNA, 2088 bp, Streptococcus pneumoniae; identical to SEQ ID NO: 73976

SEQ ID NO: 76885 - DNA, 1818 bp, Streptococcus pneumoniae; identical to SEQ ID NO: 76075

SEQ ID NO: 76886 - DNA, 2100 bp, Streptococcus pneumoniae; identical to SEQ ID NO: 73328

SEQ ID NO: 76887 - DNA, 1818 bp, Streptococcus pneumoniae; identical to SEQ ID NO: 73329

SEQ ID NO: 76888 - DNA, 2070 bp, Streptococcus pneumoniae; identical to SEQ ID NO: 71978

SEQ ID NO: 76889 - DNA, 1818 bp, Streptococcus pneumoniae; identical to SEQ ID NO: 71979

SEQ ID NO: 76890 - DNA, 1758 bp, Streptococcus pneumoniae; identical to SEQ ID NO: 72172

SEQ ID NO: 76891 - DNA, 1539 bp, Streptococcus pneumoniae; identical to SEQ ID NO: 72173

SEQ ID NO: 76892 - DNA, 2190 bp, Staphylococcus aureus; identical to SEQ ID NO: 71982

SEQ ID NO: 76893 - DNA, 1794 bp, Staphylococcus aureus; identical to SEQ ID NO: 75835

SEQ ID NO: 76894 - DNA, 2100 bp, Streptococcus pneumoniae; identical to SEQ ID NO: 73328

SEQ ID NO: 76895 - DNA, 1818 bp, Streptococcus pneumoniae; identical to SEQ ID NO: 73329

SEQ ID NO: 76896 - DNA, 2088 bp, Streptococcus pneumoniae; identical to SEQ ID NO: 73976

SEQ ID NO: 76897 - DNA, 1818 bp, Streptococcus pneumoniae; identical to SEQ ID NO: 76075

SEQ ID NO: 76898 - DNA, 2088 bp, Streptococcus pneumoniae; identical to SEQ ID NO: 73976

SEQ ID NO: 76899 - DNA, 1818 bp, Streptococcus pneumoniae; identical to SEQ ID NO: 73977

SEQ ID NO: 76900 - DNA, 2070 bp, Streptococcus pneumoniae; identical to SEQ ID NO: 76276

SEQ ID NO: 76901 - DNA, 1818 bp, Streptococcus pneumoniae; identical to SEQ ID NO: 76277

SEQ ID NO: 76902 - DNA, 1926 bp, Salmonella enterica; identical to SEQ ID NO: 72180
  subsp. enterica serovar Typhimurium str. DT104

SEQ ID NO: 76903 - DNA, 1662 bp, Salmonella enterica; identical to SEQ ID NO: 72181
  subsp. enterica serovar Typhimurium str. DT104

SEQ ID NO: 76904 - DNA, 2070 bp, Streptococcus pneumoniae; identical to SEQ ID NO: 71808

SEQ ID NO: 76905 - DNA, 1818 bp, Streptococcus pneumoniae; identical to SEQ ID NO: 71809

SEQ ID NO: 76906 - DNA, 2100 bp, Streptococcus pneumoniae; identical to SEQ ID NO: 73328

SEQ ID NO: 76907 - DNA, 1818 bp, Streptococcus pneumoniae; identical to SEQ ID NO: 73329

SEQ ID NO: 76908 - DNA, 2088 bp, Streptococcus pneumoniae; identical to SEQ ID NO: 73976

SEQ ID NO: 76909 - DNA, 1818 bp, Streptococcus pneumoniae; identical to SEQ ID NO: 76075

SEQ ID NO: 76910 - DNA, 2070 bp, Streptococcus pneumoniae; identical to SEQ ID NO: 71978

SEQ ID NO: 76911 - DNA, 1818 bp, Streptococcus pneumoniae; identical to SEQ ID NO: 71979

SEQ ID NO: 76912 - DNA, 2070 bp, Streptococcus pneumoniae; identical to SEQ ID NO: 71978

SEQ ID NO: 76913 - DNA, 1818 bp, Streptococcus pneumoniae; identical to SEQ ID NO: 71979

SEQ ID NO: 76914 - DNA, 1926 bp, Salmonella enterica; identical to SEQ ID NO: 72180
  subsp. enterica serovar Typhimurium str. DT104

SEQ ID NO: 76915 - DNA, 1662 bp, Salmonella enterica; identical to SEQ ID NO: 72181
  subsp. enterica serovar Typhimurium str. DT104

SEQ ID NO: 76916 - DNA, 2070 bp, Streptococcus pneumoniae; identical to SEQ ID NO: 71808

SEQ ID NO: 76917 - DNA, 1818 bp, Streptococcus pneumoniae; identical to SEQ ID NO: 71809

SEQ ID NO: 76918 - DNA, 2070 bp, Streptococcus pneumoniae; identical to SEQ ID NO: 71978

SEQ ID NO: 76919 - DNA, 1818 bp, Streptococcus pneumoniae; identical to SEQ ID NO: 71979

SEQ ID NO: 76920 - DNA, 2088 bp, Streptococcus pneumoniae; identical to SEQ ID NO: 73976

SEQ ID NO: 76921 - DNA, 1818 bp, Streptococcus pneumoniae; identical to SEQ ID NO: 73977

SEQ ID NO: 76922 - DNA, 2070 bp, Streptococcus pneumoniae; identical to SEQ ID NO: 71978

SEQ ID NO: 76923 - DNA, 1818 bp, Streptococcus pneumoniae; identical to SEQ ID NO: 71979

SEQ ID NO: 76924 - DNA, 2070 bp, Streptococcus pneumoniae; identical to SEQ ID NO: 71978

SEQ ID NO: 76925 - DNA, 1818 bp, Streptococcus pneumoniae; identical to SEQ ID NO: 71979

SEQ ID NO: 76926 - DNA, 2070 bp, Streptococcus pneumoniae; identical to SEQ ID NO: 71808

SEQ ID NO: 76927 - DNA, 1818 bp, Streptococcus pneumoniae; identical to SEQ ID NO: 71809

SEQ ID NO: 76928 - DNA, 2100 bp, Streptococcus pneumoniae; identical to SEQ ID NO: 73328

SEQ ID NO: 76929 - DNA, 1818 bp, Streptococcus pneumoniae; identical to SEQ ID NO: 73329

SEQ ID NO: 76930 - DNA, 2070 bp, Streptococcus pneumoniae; identical to SEQ ID NO: 71808

SEQ ID NO: 76931 - DNA, 1818 bp, Streptococcus pneumoniae; identical to SEQ ID NO: 71809

SEQ ID NO: 76932 - DNA, 1824 bp, Salmonella enterica subsp. enterica serovar Typhi; identical to SEQ ID NO: 76062

SEQ ID NO: 76933 - DNA, 1893 bp, Salmonella enterica subsp. enterica serovar Typhi; identical to SEQ ID NO: 71787

SEQ ID NO: 76934 - DNA, 2088 bp, Streptococcus pneumoniae; identical to SEQ ID NO: 73976

SEQ ID NO: 76935 - DNA, 1818 bp, Streptococcus pneumoniae; identical to SEQ ID NO: 73977

SEQ ID NO: 76936 - DNA, 2100 bp, Streptococcus pneumoniae; identical to SEQ ID NO: 73328

SEQ ID NO: 76937 - DNA, 1818 bp, Streptococcus pneumoniae; identical to SEQ ID NO: 73329

SEQ ID NO: 76938 - DNA, 2100 bp, Streptococcus pneumoniae; identical to SEQ ID NO: 73328

SEQ ID NO: 76939 - DNA, 1818 bp, Streptococcus pneumoniae; identical to SEQ ID NO: 73329

SEQ ID NO: 76940 - DNA, 2190 bp, Staphylococcus aureus; identical to SEQ ID NO: 71982

SEQ ID NO: 76941 - DNA, 1794 bp, Staphylococcus aureus; identical to SEQ ID NO: 75835

SEQ ID NO: 76942 - DNA, 2100 bp, Streptococcus pneumoniae; identical to SEQ ID NO: 73328

SEQ ID NO: 76943 - DNA, 1818 bp, Streptococcus pneumoniae; identical to SEQ ID NO: 73329

SEQ ID NO: 76944 - DNA, 2070 bp, Streptococcus pneumoniae; identical to SEQ ID NO: 76276

SEQ ID NO: 76945 - DNA, 1818 bp, Streptococcus pneumoniae; identical to SEQ ID NO: 76277

SEQ ID NO: 76946 - DNA, 2088 bp, Streptococcus pneumoniae; identical to SEQ ID NO: 73976

SEQ ID NO: 76947 - DNA, 1818 bp, Streptococcus pneumoniae; identical to SEQ ID NO: 76075

SEQ ID NO: 76948 - DNA, 2070 bp, Streptococcus pneumoniae; identical to SEQ ID NO: 71978

SEQ ID NO: 76949 - DNA, 1818 bp, Streptococcus pneumoniae; identical to SEQ ID NO: 71979

SEQ ID NO: 76950 - DNA, 2070 bp, Streptococcus pneumoniae; identical to SEQ ID NO: 76276

SEQ ID NO: 76951 - DNA, 1818 bp, Streptococcus pneumoniae; identical to SEQ ID NO: 76277

SEQ ID NO: 76952 - DNA, 2088 bp, Streptococcus pneumoniae; identical to SEQ ID NO: 73976

SEQ ID NO: 76953 - DNA, 1818 bp, Streptococcus pneumoniae; identical to SEQ ID NO: 73977

SEQ ID NO: 76954 - DNA, 2100 bp, Streptococcus pneumoniae; identical to SEQ ID NO: 73328

SEQ ID NO: 76955 - DNA, 1818 bp, Streptococcus pneumoniae; identical to SEQ ID NO: 73329

SEQ ID NO: 76956 - DNA, 2070 bp, Streptococcus pneumoniae; identical to SEQ ID NO: 76246

SEQ ID NO: 76957 - DNA, 1818 bp, Streptococcus pneumoniae; identical to SEQ ID NO: 71809

SEQ ID NO: 76958 - DNA, 2070 bp, Streptococcus pneumoniae; identical to SEQ ID NO: 71978

SEQ ID NO: 76959 - DNA, 1818 bp, Streptococcus pneumoniae; identical to SEQ ID NO: 71979

SEQ ID NO: 76960 - DNA, 2070 bp, Streptococcus pneumoniae; identical to SEQ ID NO: 71978

SEQ ID NO: 76961 - DNA, 1818 bp, Streptococcus pneumoniae; identical to SEQ ID NO: 71979

SEQ ID NO: 76962 - DNA, 2088 bp, Streptococcus pneumoniae; identical to SEQ ID NO: 73976

SEQ ID NO: 76963 - DNA, 1818 bp, Streptococcus pneumoniae; identical to SEQ ID NO: 76075

SEQ ID NO: 76964 - DNA, 2070 bp, Streptococcus pneumoniae; identical to SEQ ID NO: 76276

SEQ ID NO: 76965 - DNA, 1818 bp, Streptococcus pneumoniae; identical to SEQ ID NO: 76277

SEQ ID NO: 76966 - DNA, 2190 bp, Staphylococcus aureus; identical to SEQ ID NO: 71982

SEQ ID NO: 76967 - DNA, 1794 bp, Staphylococcus aureus; identical to SEQ ID NO: 75835

SEQ ID NO: 76968 - DNA, 2100 bp, Streptococcus pneumoniae; identical to SEQ ID NO: 73328

SEQ ID NO: 76969 - DNA, 1818 bp, Streptococcus pneumoniae; identical to SEQ ID NO: 73329

SEQ ID NO: 76970 - DNA, 2190 bp, Staphylococcus aureus; identical to SEQ ID NO: 71982

SEQ ID NO: 76971 - DNA, 1794 bp, Staphylococcus aureus; identical to SEQ ID NO: 75835

SEQ ID NO: 76972 - DNA, 2070 bp, Streptococcus pneumoniae; identical to SEQ ID NO: 71808

SEQ ID NO: 76973 - DNA, 1818 bp, Streptococcus pneumoniae; identical to SEQ ID NO: 71809

SEQ ID NO: 76974 - DNA, 2070 bp, Streptococcus pneumoniae; identical to SEQ ID NO: 71978

SEQ ID NO: 76975 - DNA, 1818 bp, Streptococcus pneumoniae; identical to SEQ ID NO: 71979

SEQ ID NO: 76976 - DNA, 2070 bp, Streptococcus pneumoniae; identical to SEQ ID NO: 71978

SEQ ID NO: 76977 - DNA, 1818 bp, Streptococcus pneumoniae
atggtaaagagtgaggagtggtttcctaaaggagatatcattttagaagagactgcattaggagccgtcaaagatgtgactaactgtttagtcattgctggaccaggtgctgggaaaactgaattactagctcaaaagttagactatctattctctacaaataaatgcgtttctccgaaaaaaattctagcattaagtttcaaaacggatgctgcatcaaatttgaaagaaagagttaagaaacgttatggtgatgaatatgcttctcgttttacctcattaacctattcggcttttgaaaagagaattttagaccaatttagagatgttctacctgaggatatacgaccatcaagagattatttgattgaagattggtatactataaaagaactactctctatgaatggaattaatgttaatggatggagaatgtcagatataagaagatatgtcgaaaacatcatacttaacaatggggataatcacaagtttaaaactgacttactaaaaggaacacaagataataagccggtcctcttgtataggcaaataacaaagttgagtactcaaataatagatactaacgaatacatccgtaaagcacttcaaatgacatacgattttgtatttctagatgaatttcaggatactacatatgcccagtatgatttattaaaaacttgttttttaggttcgtcttgtaaattaacagcagttggagataataagaaagccattatgagatgggcaggtgcaaagcctgatatttttccagactatattcgagactttaatccaaatgaatatcaattgttgatgaatcaccgctctgtacctaagcttgtagaatttcaaaaagaggttcatcagatattaaatagtaatcacagttctattcagacaaataattatccagaatttcaagagggtgaaataacattatttgaatttgaaaatgaaagtttagaagctaagttaattgcaaatgatatagaattaaaaattcaaggaggtatacgaccatcagaaatttgtatcctagcaaaacaaaaggttggtatttatagtttcgaattgatatctatattaaatagcaaagggattaaagcaagaattgaaaatgaatatcaggatattttaaaagatcctacgtgtaacctattattagatttaatatcatgcagtcaaggaaaacgagatcctttaatttgggaaaatattagtaatttttatggaaatatcaatggaatagatgagttaactgatgaattaattttagcaaaatcctataaggagattgacaatatagttagtgatattacttacctaatttcaaattttattcccaatgaagaaagtatgctaaaattaattgattgtattattgaaaaaatagatgaaaaaagaattatttccaatttttcaacatacaatggaaaaagtgacctagatatcattgtcaagaacttttcaaagttattatacatagaatattctcaaacacaaggtgaatggctagatacagtctctagtttcaagggtgaaaactcaattccaattatgactatccataagagtaaaggattagaatatgaggtagtctattttctaggcttggaggattctgcattctggagttttaataatcagccggaagaagataaaagtgcattctttgtcgcactttcaagagcaaaaagtcacttaatattcacatattgtaaattgagaaataatagtccgcaaaataatagaaatattaatgagatatattcattgctgactcaatccaatttagttgatgttattaattaa

SEQ ID NO: 76978 - DNA, 1758 bp, Streptococcus pneumoniae; identical to SEQ ID NO: 76066

SEQ ID NO: 76979 - DNA, 1539 bp, Streptococcus pneumoniae; identical to SEQ ID NO: 72173

SEQ ID NO: 76980 - DNA, 2190 bp, Staphylococcus aureus; identical to SEQ ID NO: 71982

SEQ ID NO: 76981 - DNA, 1794 bp, Staphylococcus aureus; identical to SEQ ID NO: 75835

SEQ ID NO: 76982 - DNA, 2070 bp, Streptococcus pneumoniae; identical to SEQ ID NO: 71808

SEQ ID NO: 76983 - DNA, 1818 bp, Streptococcus pneumoniae; identical to SEQ ID NO: 71809

SEQ ID NO: 76984 - DNA, 2088 bp, Streptococcus pneumoniae; identical to SEQ ID NO: 73976

SEQ ID NO: 76985 - DNA, 1818 bp, Streptococcus pneumoniae; identical to SEQ ID NO: 76075

SEQ ID NO: 76986 - DNA, 2100 bp, Streptococcus pneumoniae; identical to SEQ ID NO: 73328

SEQ ID NO: 76987 - DNA, 1818 bp, Streptococcus pneumoniae; identical to SEQ ID NO: 73329

SEQ ID NO: 76988 - DNA, 2088 bp, Streptococcus pneumoniae; identical to SEQ ID NO: 73976

SEQ ID NO: 76989 - DNA, 1818 bp, Streptococcus pneumoniae; identical to SEQ ID NO: 76075

SEQ ID NO: 76990 - DNA, 2070 bp, Streptococcus pneumoniae; identical to SEQ ID NO: 71978

SEQ ID NO: 76991 - DNA, 1818 bp, Streptococcus pneumoniae; identical to SEQ ID NO: 71979

SEQ ID NO: 76992 - DNA, 2070 bp, Streptococcus pneumoniae; identical to SEQ ID NO: 71808

SEQ ID NO: 76993 - DNA, 1818 bp, Streptococcus pneumoniae; identical to SEQ ID NO: 71809

SEQ ID NO: 76994 - DNA, 2088 bp, Streptococcus pneumoniae; identical to SEQ ID NO: 73976

SEQ ID NO: 76995 - DNA, 1818 bp, Streptococcus pneumoniae; identical to SEQ ID NO: 76075

SEQ ID NO: 76996 - DNA, 2070 bp, Streptococcus pneumoniae; identical to SEQ ID NO: 71978

SEQ ID NO: 76997 - DNA, 1818 bp, Streptococcus pneumoniae; identical to SEQ ID NO: 71979

SEQ ID NO: 76998 - DNA, 2070 bp, Streptococcus pneumoniae; identical to SEQ ID NO: 71978

SEQ ID NO: 76999 - DNA, 1818 bp, Streptococcus pneumoniae; identical to SEQ ID NO: 71979

SEQ ID NO: 77000 - DNA, 1926 bp, Salmonella enterica; identical to SEQ ID NO: 72180
  subsp. enterica serovar Typhimurium str. DT104

SEQ ID NO: 77001 - DNA, 1662 bp, Salmonella enterica; identical to SEQ ID NO: 72181
  subsp. enterica serovar Typhimurium str. DT104

SEQ ID NO: 77002 - DNA, 2088 bp, Streptococcus pneumoniae; identical to SEQ ID NO: 73976

SEQ ID NO: 77003 - DNA, 1818 bp, Streptococcus pneumoniae; identical to SEQ ID NO: 76075

SEQ ID NO: 77004 - DNA, 1758 bp, Streptococcus pneumoniae; identical to SEQ ID NO: 72172

SEQ ID NO: 77005 - DNA, 1539 bp, Streptococcus pneumoniae; identical to SEQ ID NO: 72173

SEQ ID NO: 77006 - DNA, 2088 bp, Streptococcus pneumoniae; identical to SEQ ID NO: 73976

SEQ ID NO: 77007 - DNA, 1818 bp, Streptococcus pneumoniae; identical to SEQ ID NO: 76075

SEQ ID NO: 77008 - DNA, 2070 bp, Streptococcus pneumoniae; identical to SEQ ID NO: 71978

SEQ ID NO: 77009 - DNA, 1818 bp, Streptococcus pneumoniae; identical to SEQ ID NO: 71979

SEQ ID NO: 77010 - DNA, 1926 bp, Salmonella enterica; identical to SEQ ID NO: 72180
  subsp. enterica serovar Typhimurium str. DT104

SEQ ID NO: 77011 - DNA, 1662 bp, Salmonella enterica; identical to SEQ ID NO: 72181
  subsp. enterica serovar Typhimurium str. DT104

SEQ ID NO: 77012 - DNA, 2070 bp, Streptococcus pneumoniae; identical to SEQ ID NO: 71808

SEQ ID NO: 77013 - DNA, 1818 bp, Streptococcus pneumoniae; identical to SEQ ID NO: 71809

SEQ ID NO: 77014 - DNA, 2100 bp, Streptococcus pneumoniae; identical to SEQ ID NO: 73328

SEQ ID NO: 77015 - DNA, 1818 bp, Streptococcus pneumoniae; identical to SEQ ID NO: 73329

SEQ ID NO: 77016 - DNA, 2100 bp, Streptococcus pneumoniae; identical to SEQ ID NO: 76158

SEQ ID NO: 77017 - DNA, 1818 bp, Streptococcus pneumoniae; identical to SEQ ID NO: 76159

SEQ ID NO: 77018 - DNA, 2070 bp, Streptococcus pneumoniae; identical to SEQ ID NO: 71808

SEQ ID NO: 77019 - DNA, 1818 bp, Streptococcus pneumoniae; identical to SEQ ID NO: 71809

SEQ ID NO: 77020 - DNA, 1926 bp, Salmonella enterica; identical to SEQ ID NO: 72180
  subsp. enterica serovar Typhimurium str. DT104

SEQ ID NO: 77021 - DNA, 1662 bp, Salmonella enterica; identical to SEQ ID NO: 72181
  subsp. enterica serovar Typhimurium str. DT104

SEQ ID NO: 77022 - DNA, 2070 bp, Streptococcus pneumoniae; identical to SEQ ID NO: 71978

SEQ ID NO: 77023 - DNA, 1818 bp, Streptococcus pneumoniae; identical to SEQ ID NO: 71979

SEQ ID NO: 77024 - DNA, 2100 bp, Streptococcus pneumoniae; identical to SEQ ID NO: 76158

SEQ ID NO: 77025 - DNA, 1818 bp, Streptococcus pneumoniae; identical to SEQ ID NO: 76159

SEQ ID NO: 77026 - DNA, 2088 bp, Streptococcus pneumoniae; identical to SEQ ID NO: 73976

SEQ ID NO: 77027 - DNA, 1818 bp, Streptococcus pneumoniae; identical to SEQ ID NO: 76075

SEQ ID NO: 77028 - DNA, 2100 bp, Streptococcus pneumoniae; identical to SEQ ID NO: 73328

SEQ ID NO: 77029 - DNA, 1818 bp, Streptococcus pneumoniae; identical to SEQ ID NO: 73329

SEQ ID NO: 77030 - DNA, 2088 bp, Streptococcus pneumoniae; identical to SEQ ID NO: 73976

SEQ ID NO: 77031 - DNA, 1818 bp, Streptococcus pneumoniae; identical to SEQ ID NO: 73977

SEQ ID NO: 77032 - DNA, 2088 bp, Streptococcus pneumoniae; identical to SEQ ID NO: 73976

SEQ ID NO: 77033 - DNA, 1818 bp, Streptococcus pneumoniae; identical to SEQ ID NO: 76075

SEQ ID NO: 77034 - DNA, 2400 bp, Yersinia pseudotuberculosis; identical to SEQ ID NO: 76456

SEQ ID NO: 77035 - DNA, 1869 bp, Yersinia pseudotuberculosis; identical to SEQ ID NO: 76457

SEQ ID NO: 77036 - DNA, 2100 bp, Streptococcus pneumoniae; identical to SEQ ID NO: 73328

SEQ ID NO: 77037 - DNA, 1818 bp, Streptococcus pneumoniae; identical to SEQ ID NO: 73329

SEQ ID NO: 77038 - DNA, 2070 bp, Streptococcus pneumoniae; identical to SEQ ID NO: 71978

SEQ ID NO: 77039 - DNA, 1818 bp, Streptococcus pneumoniae; identical to SEQ ID NO: 71979

SEQ ID NO: 77040 - DNA, 2088 bp, Streptococcus pneumoniae; identical to SEQ ID NO: 73976

SEQ ID NO: 77041 - DNA, 1818 bp, Streptococcus pneumoniae; identical to SEQ ID NO: 76075

SEQ ID NO: 77042 - DNA, 2241 bp, Streptococcus agalactiae; identical to SEQ ID NO: 72338

SEQ ID NO: 77043 - DNA, 2019 bp, Streptococcus agalactiae; identical to SEQ ID NO: 72339

SEQ ID NO: 77044 - DNA, 2070 bp, Streptococcus pneumoniae; identical to SEQ ID NO: 71808

SEQ ID NO: 77045 - DNA, 1818 bp, Streptococcus pneumoniae; identical to SEQ ID NO: 71809

SEQ ID NO: 77046 - DNA, 2088 bp, Streptococcus pneumoniae; identical to SEQ ID NO: 73976

SEQ ID NO: 77047 - DNA, 1818 bp, Streptococcus pneumoniae; identical to SEQ ID NO: 76075

SEQ ID NO: 77048 - DNA, 2088 bp, Streptococcus pneumoniae; identical to SEQ ID NO: 73976

SEQ ID NO: 77049 - DNA, 1818 bp, Streptococcus pneumoniae; identical to SEQ ID NO: 76075

SEQ ID NO: 77050 - DNA, 1758 bp, Streptococcus pneumoniae; identical to SEQ ID NO: 72172

SEQ ID NO: 77051 - DNA, 1539 bp, Streptococcus pneumoniae; identical to SEQ ID NO: 72173

SEQ ID NO: 77052 - DNA, 2070 bp, Streptococcus pneumoniae; identical to SEQ ID NO: 71978

SEQ ID NO: 77053 - DNA, 1818 bp, Streptococcus pneumoniae
atggtaaagagtgaggagtggtttcctaaaggagatatcattttagaagagactgcattaggagccgtcaaagatgtgactaactgtttagtcattgctggaccaggtgctgggaaaactgaattactagctcaaaagttagactatctattctctacaaataaatgcgtttctccgaaaaaaattctagcattaagtttcaaaacggatgctgcatcaaatttgaaagaaagagttaagaaacgttatggtgatgaatatgcttctcgttttacctcattaacctattcggcttttgaaaagagaattttagaccaatttagagatgttctacctgaggatatacgaccatcaagagattatttgattgaagattggtatactataaaagaactactctctatgaatggaattaatgttaatggatggagaatgtcagatataagaagatatgtcgaaaacatcatacttaacaatggggataatcacaagtttaaaactgacttactaaaaggaacacaagataataagccggtcctcttgtataggcaaataacaaagttgagtactcaaataatagatactaacgaatacatccgtaaagcacttcaaatgacatacgattttgtatttctagatgaatttcaggatactacatatgcccagtatgatttattaaaaacttgttttttaggttcgtcttgtaaattaacagcagttggagataataagcaagccattatgagatgggcaggtgcaaagcctgatatttttccagactatattcgagactttaatccaaatgaatatcaattgttgatgaatcaccgctctgtacctaagcttgtagaatttcaaaaagaggttcatcagatattaaatagtaatcacagttctattcagacaaataattatccagaatttcaagagggtgaaataacattatttgaatttgaaaatgaaagtttagaagctaagttaattgcaaatgatatagaattaaaaattcaaggaggtatacgaccatcagaaatttgtatcctagcaaaacaaaaggttggtatttatagtttcgaattgatatctatattaaatagcaaagggattaaagcaagaattgaaaatgaatatcaggatattttaaaagatcctacgtgtaacctattattagatttaatatcatgcagtcaaggaaaacgagatcctttaatttgggaaaatattagtaatttttatggaaatatcaatggaatagatgagttaactgatgaattaattttagcaaaatcctataaggagattgacaatatagttagtgatattacttacctaatttcaaattttattcccaatgaagaaagtatgctaaaattaattgattgtattattgaaaaaatagatgaaaaaagaattatttccaatttttcaacatacaatggaaaaagtgacctagatatcattgtcaagaacttttcaaagttattatacatagaatattctcaaacacaaggtgaatggctagatacagtctctagtttcaagggtgaaaactcaattccaattatgactatccataagagtaaaggattagaatatgaggtagtctattttctaggcttggaggattctgcattctggagttttaataatcagccggaagaagataaaagtgcattctttgtcgcactttcaagagcaaaaagtcacttaatattcacatattgtaaattgagaaataatagtccgcaaaataatagaaatattaatgagatatattcattgctgactcaatccaatttagttgatgttattaattaa

SEQ ID NO: 77054 - DNA, 2100 bp, Streptococcus pneumoniae; identical to SEQ ID NO: 73328

SEQ ID NO: 77055 - DNA, 1818 bp, Streptococcus pneumoniae; identical to SEQ ID NO: 73329

SEQ ID NO: 77056 - DNA, 2088 bp, Streptococcus pneumoniae; identical to SEQ ID NO: 73976

SEQ ID NO: 77057 - DNA, 1818 bp, Streptococcus pneumoniae; identical to SEQ ID NO: 73977

SEQ ID NO: 77058 - DNA, 2088 bp, Streptococcus pneumoniae; identical to SEQ ID NO: 73976

SEQ ID NO: 77059 - DNA, 1818 bp, Streptococcus pneumoniae; identical to SEQ ID NO: 76075

SEQ ID NO: 77060 - DNA, 2316 bp, Yersinia frederiksenii
atgcatttgagaaagctggcagtccgtaatttcagaaggctgcacgatgttgttatcgatcttgcgtcagacatttcaattttcgtaggggcgaataacagtggtaagacttctgtcggtcatgcacttcaactattcaccggtaaaagccgattcaatattcatgacttcaatgctgaatgttggactgacattgtcacatttggagaaggggcggatgctgcgtcgctaccttcactggaacttgatatttggtttgaagtaacaccgaatgatgttcatcgtgtagtcgatcttctccccagcctatcgtggtcaggttctctggttggaatgcgcgttgccttttcccccatcaatcctgaagaaatccgttcgcgtttcctcgcagtacgtcagcttgctatcgatgccacacctaaagatgaaaatggaactcccaaatacgatccttcacctcgtaatctttgggaatatcttcgcgatagactcaatgacgaatatgaattccgctattttgttcttgatcccgcacgtttcaatgcggaaatgatatccgaggaaggctatgagcctactccgctcacagggcgtgatcgaagtggtcgcgaaatactgaacagccttatccaaatcaactttttgaatgctcagcgtcatctttcagatggttctggaggttcccgttcggaagatctttctcgtgttctcagccgtttttacggacgaaatcttgaacaaaaaggtgaagattacgaagcattaattgctttagctgcgtctgaatcagctttcaatcagcatcttgaacgtgtttttgcacctacgctgaaaagtctggcgaaactcggataccctggactttcaaacccacgcatgatgattcgttcggccttagacccggcgcagatcatgaacaaccaaaatggggccgtaatacattacgcgctgggggaggatgacggtaatcctaccccaccaacactacccgatagttataacgggcttggatttaagaatctgatctttatggttgttgaattactcgacatccacaaccaatggttagcaatagaagagaatcgaccaccggttcacctgatttttattgaagagccggaagctcatctccacgcacagttacagcaggcttttatacgcaagataatggaccttcttgccatggagagtcaggagcttatgcactacaccactcaagtggtggtgacttctcattcaactcatattctttacgaacgtggttttcggccgatccgttactttcggcggaagcgttcatcaaatatgtcggcaacagatgtgctcaatctctctgttttttatgataatactgatcctgaaattcgagactttcttgagcgttacttgaagctgacccattgtgacttgttttttgccgacggggctgtacttgtagaaggcaatgttgagcggctactgctcccgcaaatgattgctaccgccgcacctagattaaaatcctcttacctaacagtccttgagattggcggtgcttttggctatcgattccaaaaactaattgaatatcttgggcttactacactcattattactgatctggatagtgtgtactgtacccctccggtacaagatgcaacagaagctcgagcagatgagttagatgctcttgcagaaaatccggctgcaaatgatgatggcgaggaacctgatgatgatgaggaagaacaggccaacacagaaacaccaggaaaggcttgtattgccagtcatcctggagctatgacctctaatcaaacacttcggcagtggttaccgaaatgtgacaccgttgctgctttatgggaagcaactgaggaaatgaaaatacaaagccgcacagctgagtgtgacgctttggttcgtgttgcttaccagtgccagacagatgttacatggaaagaggaaacactggcgcttgctggtcgtactttagaggaggcttttgcacttgaaaatctgtcctggtgtcaggatgtgagctgtaagccactcaagctacgcattgccagagctgtaagtatggatctactgcaactggcccagcgcattcacaagcgcgtgcaatcaaaaagcttcagtaaaactgattttgctctgaatttacttcttaaaaaaccggatgaatggtctgtcccaacatacattgctgaaggattaaaatggctcgaagctgaaatagccccgccggaactagaagttgcagaaggtcaggaagaggatgttgaagatatgtccgtcgttctggctgaaacagatggtgggagggttgcatga

SEQ ID NO: 77061 - DNA, 1878 bp, Yersinia frederiksenii; identical to SEQ ID NO: 76153

SEQ ID NO: 77062 - DNA, 2070 bp, Streptococcus pneumoniae; identical to SEQ ID NO: 71978

SEQ ID NO: 77063 - DNA, 1818 bp, Streptococcus pneumoniae; identical to SEQ ID NO: 71979

SEQ ID NO: 77064 - DNA, 2070 bp, Streptococcus pneumoniae; identical to SEQ ID NO: 71978

SEQ ID NO: 77065 - DNA, 1818 bp, Streptococcus pneumoniae; identical to SEQ ID NO: 71979

SEQ ID NO: 77066 - DNA, 2070 bp, Streptococcus pneumoniae; identical to SEQ ID NO: 71978

SEQ ID NO: 77067 - DNA, 1818 bp, Streptococcus pneumoniae; identical to SEQ ID NO: 71979

SEQ ID NO: 77068 - DNA, 2070 bp, Streptococcus pneumoniae; identical to SEQ ID NO: 71978

SEQ ID NO: 77069 - DNA, 1818 bp, Streptococcus pneumoniae; identical to SEQ ID NO: 71979

SEQ ID NO: 77070 - DNA, 2070 bp, Streptococcus pneumoniae; identical to SEQ ID NO: 71808

SEQ ID NO: 77071 - DNA, 1818 bp, Streptococcus pneumoniae; identical to SEQ ID NO: 71809

SEQ ID NO: 77072 - DNA, 2070 bp, Streptococcus pneumoniae; identical to SEQ ID NO: 71978

SEQ ID NO: 77073 - DNA, 1818 bp, Streptococcus pneumoniae; identical to SEQ ID NO: 71979

SEQ ID NO: 77074 - DNA, 1926 bp, Yersinia frederiksenii
atgctagaaaaattgacgtacctatctcattctgatttgaaagtgctttcaaaaattcataaaaccattactatcagtaggttatcatttaaccttggtggtgttatgtatctaaaaattttaaaagtttggaatttccgaaagtatggctctccggaagttatagatctaaacaaaccaaatttatgtttacaccttaaaaaaggtctcaatgttttaataggggaaaatgactcagggaagacagcaataatagatgcaattaaactagttttaaaaacacatagttttgaatggatcaaggctgatgaaaatgacttttataaaaatacagacagatttagaattgaattggttttcgacgatatggaaaaagaagcccatcactttaatgaatggatagagtaccatcgtgacggcgacaagatatttccttatttgacattaacttacgaagtatataaaaagaatggaagaataatacaatcagacataagtgctggaagtcacggtcaaggtaaacctctgaaagctgaagcaaaagagtatttaaaaacaacatatttaaaacctcttcgtgatgctaactttgatttaacaccaaaacaaaactctagactatcacaaatacttaaaactcatgcagcctttaataataaggatgaaaaccatcgccttcttgagctttttatagaattcaatactaatgtatcactttatttcgaaggaaaagattcccaaggaaatacaattacagatgatagtagaggtaaagaattaaaagataaaattgagggatttgcgagagcttttattgatgattcgatatcgactacttttgaagtgactcctgccaacatcaaatcgattctagaaaagttagcattgaagatacaaggcggatttaaccctggccttgggacactaaataaattatttatggccgcagaattacttcatttagaagaaagtgattggtcaggtttaaaactatgtttaattgaagaattagaagcacatttacatcctcaagcccaaatgaaagttattgaatcattacaaaaatatgatgacatacaaatattaattacatcacacagcccaaatctcacatcaaaaatttgcctagaaaatttaattctctgccattctggaaatgtattccctctaggaaaagagtatacagaactagatgtagacaacggagattatttatatttagagcgttttattgacgtaacaaaatccaatttattctttgctaaaggagtaataatggtggaaggttggtcagaagagatcctattaccagccatagcaaaacttctaaaaaaacaaggtgtgattaagaaagattttaccgatgcaggagtagcagttgtcaatgttgccagcgcagagttcatgcgttttagcaagatttttcttaggaaggttgaaccattgattccaatacctattgcaattatcacggatgttgatgttagagctttcgaaagaaaacttcttaatgaagataaagcaaaaaaaaatgagtatgattatataaaaatagatgagaaaattattgaagttgaatcaacaaggaaagtaattgaaaaagagagtgagttcaatagtcaaaatgtcaaagtatttgtaactaagtactggactttagaatatagccttctaaaatctccagttttaggtgggtactcaaaacaagttctttacgatatgcacaaaaacatcaataaggaggatattgaaaaagaattagcgataaaactattcaataaaagcctatgtaagacagactttgcttataaactagcccaaatgattgatccgtcatctgaaaaacacgatgataaaattattttaaaagaagatgataaatatatatcatcgttgattgagggggtgaaatatgtgtgtgattaa

SEQ ID NO: 77075 - DNA, 2091 bp, Yersinia frederiksenii
atgtgtgtgattaatataagtgacaatgatattttatatgctgaatccattctcttaaacaaaggagattcttttgatcaggagcgtgttgattttataaaaaacatgcagacgatagatttacaagcagtccctgggagtgggaaatctacagcgttactggcaaaacttcttataatagaaaagcatatgccgctttcggatggcagaggtgtactggtaatttcacatacaaattccgccatagaagaacttaagagtagaattggaaaatattgtccaaaacttttcacctatcctaatttcattggaactatacaaagcttcacaaatacttttctcgcaactcattacctcagacttaaatttaactctcaattaagaatagttgatgaccaacaattcactgagtcattaatacaatcttacaagagaattaaatgggatgaaaactatggaaaaatttctggtttattttacggaaggaacatcaacgaagctaaaagaatcgcacaagatattgggaaaaaagaacaaaaagatataaactcaatatgtgaaattttaactgaagataacattaaaaacttacacttcgattttatagaaagaaattttaaaatttcaggggaatcaaaatttcttttgagcgatgagaaaaacttgaaattccttgggctagaaaaattattcattgatactttcaacaatggaatcctctcttacaagtatgcttatctattcgccactgagtttgttaaaatatatccaaacattgtcgaaagcattggaaatagatttcaacatgcatttgtagatgaaatgcaggatatggacgctttacagtatgcacttttagaaaactgtcttaataatggaaaaactatttatcaacgaataggtgatattaatcaatcaatttataacacagaggatgatgaatacgtaaactgggttgaaagaccttcaaccttaaatattcaaggcagtcataggcttagctcacctattgcaagggtagttagtcaattatcccttacaaataccatcgcgattggaaataacaatcagtcaaacataaagcccattattttatgttatcaaagccaagacataaagaaagtcatggggaaatttaatgagttatacgctgattatatacatgcagatttaattcctaaacttaacaacccactagttgcaagtattgcttgggttgcaaaaccaagggaagacgaaaagctatccttgattaactttatcaatgaagggagtttaccaaaagaaaaaaacaatcaattaaacacattgcaggactttttccttcagttattaagcaatagtaacttaacaataaacgatgcatgtagctcgttaataaactcagcgatttatttgttaaaaaataataacataaaagattacaatggttattactacacaaaaaaaacactaaacacatatattaaaagtttcgacaaaggatattatgatgattttaaaaagaagttatatataatatcatctaaatttatatctggtgacaatacatacttggatttttcgaaaaaaacaatcatatggatcttcaatcagtttttcgatattgatatcagcaaaaacactttcttcatctttgatgtaaataatattcccaccccctccactagagttaatgacgttcatatcgaaaacactccaatacaatatatagggacaattcactcagttaagggacaaacacattcagctacattatacttggaaacttatttcaaaaaaaactatgagtcttctgttctaaaagaattctttgaaggaaaaagttgcattgaaataataaaatcattaagagaagaaatagctaaattagagattgaaatcaatgaattaaagaatgggcgtggagaaaaaacaagaagaacaaaaataaacaagcttcaactaagaataaaattaattgagcgctatactagaatgatgtatgttggtttttcaaggccccagcatctattatgctttgcccttgaagcgtcgagatataatcaattaaaaatagacgctacacgatgggatgtcattaatgtctaa

SEQ ID NO: 77076 - DNA, 2088 bp, Streptococcus pneumoniae; identical to SEQ ID NO: 73976

SEQ ID NO: 77077 - DNA, 1818 bp, Streptococcus pneumoniae; identical to SEQ ID NO: 73977

SEQ ID NO: 77078 - DNA, 2070 bp, Streptococcus pneumoniae; identical to SEQ ID NO: 71978

SEQ ID NO: 77079 - DNA, 1818 bp, Streptococcus pneumoniae; identical to SEQ ID NO: 71979

SEQ ID NO: 77080 - DNA, 1758 bp, Streptococcus pneumoniae; identical to SEQ ID NO: 72172

SEQ ID NO: 77081 - DNA, 1539 bp, Streptococcus pneumoniae; identical to SEQ ID NO: 72173

SEQ ID NO: 77082 - DNA, 2070 bp, Streptococcus pneumoniae; identical to SEQ ID NO: 71978

SEQ ID NO: 77083 - DNA, 1818 bp, Streptococcus pneumoniae; identical to SEQ ID NO: 71979

SEQ ID NO: 77084 - DNA, 2070 bp, Streptococcus pneumoniae; identical to SEQ ID NO: 71978

SEQ ID NO: 77085 - DNA, 1818 bp, Streptococcus pneumoniae; identical to SEQ ID NO: 71979

SEQ ID NO: 77086 - DNA, 1926 bp, Salmonella enterica; identical to SEQ ID NO: 72180
  subsp. enterica serovar Typhimurium str. DT104

SEQ ID NO: 77087 - DNA, 1662 bp, Salmonella enterica; identical to SEQ ID NO: 72181
  subsp. enterica serovar Typhimurium str. DT104

SEQ ID NO: 77088 - DNA, 2088 bp, Streptococcus pneumoniae; identical to SEQ ID NO: 73976

SEQ ID NO: 77089 - DNA, 1818 bp, Streptococcus pneumoniae; identical to SEQ ID NO: 73977

SEQ ID NO: 77090 - DNA, 2070 bp, Streptococcus pneumoniae; identical to SEQ ID NO: 76246

SEQ ID NO: 77091 - DNA, 1818 bp, Streptococcus pneumoniae; identical to SEQ ID NO: 71809

SEQ ID NO: 77092 - DNA, 2070 bp, Streptococcus pneumoniae; identical to SEQ ID NO: 71978

SEQ ID NO: 77093 - DNA, 1818 bp, Streptococcus pneumoniae; identical to SEQ ID NO: 71979

SEQ ID NO: 77094 - DNA, 2070 bp, Streptococcus pneumoniae; identical to SEQ ID NO: 71978

SEQ ID NO: 77095 - DNA, 1818 bp, Streptococcus pneumoniae; identical to SEQ ID NO: 71979

SEQ ID NO: 77096 - DNA, 2088 bp, Streptococcus pneumoniae; identical to SEQ ID NO: 73976

SEQ ID NO: 77097 - DNA, 1818 bp, Streptococcus pneumoniae; identical to SEQ ID NO: 76075

SEQ ID NO: 77098 - DNA, 2070 bp, Streptococcus pneumoniae; identical to SEQ ID NO: 71978

SEQ ID NO: 77099 - DNA, 1818 bp, Streptococcus pneumoniae; identical to SEQ ID NO: 71979

SEQ ID NO: 77100 - DNA, 2100 bp, Streptococcus pneumoniae; identical to SEQ ID NO: 73328

SEQ ID NO: 77101 - DNA, 1818 bp, Streptococcus pneumoniae; identical to SEQ ID NO: 73329

SEQ ID NO: 77102 - DNA, 2070 bp, Streptococcus pneumoniae; identical to SEQ ID NO: 71978

SEQ ID NO: 77103 - DNA, 1818 bp, Streptococcus pneumoniae; identical to SEQ ID NO: 71979

SEQ ID NO: 77104 - DNA, 2100 bp, Streptococcus pneumoniae; identical to SEQ ID NO: 73328

SEQ ID NO: 77105 - DNA, 1818 bp, Streptococcus pneumoniae; identical to SEQ ID NO: 73329

SEQ ID NO: 77106 - DNA, 2088 bp, Streptococcus pneumoniae; identical to SEQ ID NO: 73976

SEQ ID NO: 77107 - DNA, 1818 bp, Streptococcus pneumoniae; identical to SEQ ID NO: 73977

SEQ ID NO: 77108 - DNA, 2070 bp, Streptococcus pneumoniae; identical to SEQ ID NO: 71808

SEQ ID NO: 77109 - DNA, 1818 bp, Streptococcus pneumoniae; identical to SEQ ID NO: 71809

SEQ ID NO: 77110 - DNA, 2100 bp, Streptococcus pneumoniae; identical to SEQ ID NO: 73328

SEQ ID NO: 77111 - DNA, 1818 bp, Streptococcus pneumoniae; identical to SEQ ID NO: 73329

SEQ ID NO: 77112 - DNA, 2088 bp, Streptococcus pneumoniae; identical to SEQ ID NO: 73976

SEQ ID NO: 77113 - DNA, 1818 bp, Streptococcus pneumoniae; identical to SEQ ID NO: 73977

SEQ ID NO: 77114 - DNA, 1926 bp, Salmonella enterica; identical to SEQ ID NO: 72180
  subsp. enterica serovar Typhimurium str. DT104

SEQ ID NO: 77115 - DNA, 1662 bp, Salmonella enterica; identical to SEQ ID NO: 72181
  subsp. enterica serovar Typhimurium str. DT104

SEQ ID NO: 77116 - DNA, 2070 bp, Streptococcus pneumoniae; identical to SEQ ID NO: 71978

SEQ ID NO: 77117 - DNA, 1818 bp, Streptococcus pneumoniae; identical to SEQ ID NO: 71979

SEQ ID NO: 77118 - DNA, 2070 bp, Streptococcus pneumoniae; identical to SEQ ID NO: 71978

SEQ ID NO: 77119 - DNA, 1818 bp, Streptococcus pneumoniae; identical to SEQ ID NO: 71979

SEQ ID NO: 77120 - DNA, 2070 bp, Streptococcus pneumoniae; identical to SEQ ID NO: 71808

SEQ ID NO: 77121 - DNA, 1818 bp, Streptococcus pneumoniae; identical to SEQ ID NO: 71809

SEQ ID NO: 77122 - DNA, 2100 bp, Streptococcus pneumoniae; identical to SEQ ID NO: 73328

SEQ ID NO: 77123 - DNA, 1818 bp, Streptococcus pneumoniae; identical to SEQ ID NO: 73329

SEQ ID NO: 77124 - DNA, 2088 bp, Streptococcus pneumoniae; identical to SEQ ID NO: 73976

SEQ ID NO: 77125 - DNA, 1818 bp, Streptococcus pneumoniae; identical to SEQ ID NO: 73977

SEQ ID NO: 77126 - DNA, 2088 bp, Streptococcus pneumoniae; identical to SEQ ID NO: 73976

SEQ ID NO: 77127 - DNA, 1818 bp, Streptococcus pneumoniae; identical to SEQ ID NO: 73977

SEQ ID NO: 77128 - DNA, 2070 bp, Streptococcus pneumoniae; identical to SEQ ID NO: 71978

SEQ ID NO: 77129 - DNA, 1818 bp, Streptococcus pneumoniae; identical to SEQ ID NO: 71979

SEQ ID NO: 77130 - DNA, 2100 bp, Streptococcus pneumoniae; identical to SEQ ID NO: 73328

SEQ ID NO: 77131 - DNA, 1818 bp, Streptococcus pneumoniae; identical to SEQ ID NO: 73329

SEQ ID NO: 77132 - DNA, 2070 bp, Streptococcus pneumoniae; identical to SEQ ID NO: 71808

SEQ ID NO: 77133 - DNA, 1818 bp, Streptococcus pneumoniae; identical to SEQ ID NO: 71809

SEQ ID NO: 77134 - DNA, 2070 bp, Streptococcus pneumoniae; identical to SEQ ID NO: 71978

SEQ ID NO: 77135 - DNA, 1818 bp, Streptococcus pneumoniae; identical to SEQ ID NO: 71979

SEQ ID NO: 77136 - DNA, 1926 bp, Salmonella enterica; identical to SEQ ID NO: 72180
  subsp. enterica serovar Typhimurium str. DT104

SEQ ID NO: 77137 - DNA, 1662 bp, Salmonella enterica; identical to SEQ ID NO: 72181
  subsp. enterica serovar Typhimurium str. DT104

SEQ ID NO: 77138 - DNA, 2088 bp, Streptococcus pneumoniae; identical to SEQ ID NO: 73976

SEQ ID NO: 77139 - DNA, 1818 bp, Streptococcus pneumoniae; identical to SEQ ID NO: 73977

SEQ ID NO: 77140 - DNA, 1821 bp, Yersinia aldovae
atgagtatattaattgatgctgtaaggatttcttgttttcgtggattgaatgatttagaaattcccttatcacgagtaactgttttaatcggtgcaaataattctgggaagacgtctgtattaaaagcgttgcaattagctttaggcgattactctcgatatttttctgaagaagatttttttatcgatgaaaatggggtggtatctgataaggtaacaatagatataaaaattgtccctgaatctagaaatggtgcttttagtgaagagtggcaagaggagttcgaagacaaaataaggtctgaggctaatggagatcagtttttagctattagaaccagtaccgaaagggactctataaaaggtgggttttcaactctaaggtattatctagatagatggcctgaatattcaaattggttatccgaatcgacaggaacaagtaaacaactaaggaaaaaaatagattctttagcatttacttctatagaggcacaacgagatatccacatagagctaagagataaaagttctttcgtaggaaaagttttgtctagtgttgaatataattcagatgatatagaaaggcttgaggggctagtacaagtagtaaatgatgaggctgtacagaaaagtcaatcattgcaaaatcttaaaggtcatctagagagattaagcaaatcttttcgtggatctggtcatgcggaaataactcctttccctaagaaaattagagatttatctaagcagtttactgtgcattttggtgaggaggctgatacatcattttcaatggagtatcatggaatgggcacaagaagttgggcatcaatgttgactgttaaagctttcatagagctggtaggtgaaaagcataacctagaggctaaacagtttttcccaattatttctgcggaggaacccgaagcccatctacacccgaatgctcaaagaacgttatataaacagttatctgagagtaatggtcaggttcttatcagtacccattcgccatatttagcagcgatcgcaaaacaagatgaacttagatctttagttaaaataaatggtagggtttgtgtaaatagaattaactctactttgacggatgaaaataaaagaaaaatacaaagagaagttatccattctcggggcgagcttttcttttcaaatgctattgttctttctgagggagagacggaagaacaatctttaccattattattttctaagtatttctcattcgaaccatttgaaatgggggtgaattttataggtgtaggtggctctggcgaaaaatatagaccattcttatcatttgcctatgattttaaaataccagtttttatatttagtgatggtgaggcgattataaaaaataaattaaaaaaagtttatgaaagtatttttggcagtactgatatagataattgtaatttaataaccatactggatggtactgattttgaaggatatcttttagatagcggcttctcgcaagttattgagagtgctatcatagatattgatggtgcgggggcagtagatacatggatacaaagtaaacaaggtcttccgttaaaaatgaaaaagactgacgagcctgactgtcctacgtgcaatcaacctatacttgaaacaccatatagagattatcatgtaccagatgggcggcgtaaagcgatcacggaaattattgatagtaagaagcctaagtatgcacttgctattactaatgaattatgtaagttagaaccagcgcattttccaccgaagataatcgagctatttgataaaataaaaagagaggccaacttatga

SEQ ID NO: 77141 - DNA, 1899 bp, Yersinia aldovae
atgattaagctatcagatgctcaacgggctgttgttgaagctgaaattggtatttctatgcaggttttagcttctgctggttcggggaaaacgagagttttaacagaacgagttagatatattttagataatacaaggaaagatagtgtaattgcactgacttttactaataaagcggctgacgagatgttagaacgcttgaataattctgatgatgcaatggaaagatgctggattgccacaattcactctattgctcaacgtattattgaacaatatggatatacaatagggcttccttctgaagttcatattttcgaaagagagaaagatagaatggaagttttcttgcaatcaattagagagcaagggattgatattgatagctatttagatgtaaccgataatagggaaagaaaaactcgtgaaaaaatcatgcagaattatatggatggtttttctataataaagcgtgagttactaaatgaagatggtgtcaaaaataagtatcctcatgatgagagattttggtatatataccaagattatcaaaatgccctgataaatagtggtgggatagactatgatgatatacttgtttatgctcataaaattttattaacccaagattgggtaggtaatatttatagatctaaatataaacacgtttgtgtggatgaagcacaagacctaaataaagctcaatatgagtttattaaagtattatgcggtgagtccataaaaagtattatgctggttggtgacccaaatcagatgatttatggatttaatagttcatccataagatatttatgtaatgattttataacggattattctccagttaagttcgagcttaaagaaaactatcgtagtgctaaagaagtgatccgaattgctaataagctaaagccgaactcccaaaatgaaagtgaggctgcaatagttggggctgtccattttcaagaggctgaggatgaatttatggaggctggatgggttactttaactatccagcatttattagaactcaaagagcataaggatattgagggagatatatccttagagcgaatggttgtaatcgctaggaataggtttgtattttctgcgcttgaaaagtcactttctgaatatggaattaagtattctttaaaacgtggtgagaggaatgaagaaccaagatctatttttggtaaagttcttgattacgcaatacgtataaagttaaatccgaaagattgggttgatggaaaaaaattgtgtcaatccattaaagttgtaccaccatcaacttggggggggcacaacgtgctggttgatttggctaagaaagtcttacattctgatatagcttatcctgaattacagtctgaattacttactagcttggataaactagaaacagaaaatcctaatattagaaaatttattaactcatttgatgaaaaactaaactcattggtttttcttactaaagatgaaaaactaaaatcagaactagagtcaagtatccttgatttaaatgagtttagtaagtgttggactcgttttaaacaaaaaggattaggcaatactttacaagcatttaggaatgcgatctcacttggtcaactgtcagaggaggttgttcacggtggcttaactctgagtactgtacatactatgaaagggcttgaaaaggatattgtttttataattgggttatgcgaaggtattttccctgattatagggctaagtctgttaatgatattaatgaagaaagaaatagtgcatttgtggcagttacaagagcgaaaagatggttatatctatcataccctatgaaaagattaatgccgtggggggatattaaaaatcaaaatccatcacgtttttttttagaaatgagtaagtga

SEQ ID NO: 77142 - DNA, 2136 bp, Yersinia aldovae
atgtatctaaaaagtttagttattcacaactttaggaaatttagcgatgtgaataataaagtatgctttgttaaagctggtaaaacatcacctgaacaatcaccagtggcatcatcaaccacagttgttattgggaaaaataactcaggtaaaacaacgataacaaactcattatctttgatatgttcagacaccgaaaaattaacagggaatgactttaaccataattatttgaggaagattttgtcttctatgatggcatcagatttctcaaactatccagaaataaagtttgaaatggaatttatcttagatgacatccataatgatagcattagcaattttgcgccattcatcgatatatcatcgctaagtagtcttcccggggaagaaaaaaaggatacaatagcattagtattaataaattttagagtaaatgatgaatccatttttcaggataaaataaataatctcattagagaaaaacaggagaatatttatagtgacaccgaaacttttagaagatttttagatttaatatcaatgacagaatttaaaagagtcattaagaataaaagcaacagattaattgaaaaggttagactaaaaaatctaatcgatcttcgagttatcaaggttgcaaataatatacatgaccaaagactattggctaagtcctttaatcgcatcataaaatttatgtatgaaaaaaataaagatgaattaaaaagcattttgcatttagtagatgttaataataatagtcttacagaaaagataaaaataagtcatcaggataatgtggagtcagttttgaacacaattatacttgatgaaagtttaggcattgagttaagagctaacttaactttcgataaattgatgggtgatcttataacatatgagcatcgggatggcgaaaatttaattcctgaagggcagtttgggttagggtatgcaaatcttataaatataattagtgagataattgattattccaataggagtttgcatgaacaaaaacaactaaagattcaactcttgtgcattgaggaacctgaagtcttcatgcacccccaaatgcaagttaattttattcgtcatattgaagaagcgctagtaaaaatattaggtcttaactttaaagatattagctctattaaaagtcaaataatagttactactcattcctctcatatattaaatagtattatccatggtagtggaacttttaatgagataaattacattaacagttctaaagggaatagcgaatgtatagttctgaatgataatgaactttgtcatggtggtgatgaatttgactactttaactttataaaaaaacacgttaaacaccaagtccctgagcttttcttttctgatgcaataattttagtagaaggcattactgaagagcgtgttctgaattatcacatagataataacgatgttttaaacaggaaaaatatttcagtgtttagaattgatggtgctcatggtaaggtttactcaaaccttctgaaaaaaataaacatcccaacattaataataactgatatagatttcaaaagagatagttctcttttcaaaaaagtaactaagatggaggatggatcggagaataccatagagtatttcccacaaatggagggaattgataattcaactgaaacaactaattcaactttaagccatttcttagggagcaagaaagttggagagtatcctgagtatcatatctctgataatatatatttatcttatcagttggaaaaaatatccattgatattactgagtccaaacagcattattattatgccacttcatttgaagaagcatttatcctcaaaaactataaaaataatttattgagaaaagtattgctgggaattgttgggaaggattactcagatataatatcagagaaacaagatgattattaccttctagcgatgaactccttcaaaatacaaaagaaactttccgatagtaaaagtgcatttgctaattctatcatttatgaattaattacgagcaatgatataaaacctgagttgccatcatacatattaaatggcctatcctggctagagagccaaaaacctaaattaggaggggttgactatgtatga

SEQ ID NO: 77143 - DNA, 2031 bp, Yersinia aldovae
atgtatgaaatagatgaaatcaaggccgaaagagaaagggaaataattgaagaaatctattccttaattaataacaaagaatctttttacttccagtctggtgcaggctctggaaaaacatatgctctagttaaggcaattaggcacacagggcaattagaccttataaaggataatcatggtttcagaaaaatattgtgtataacatacacaaataatgccaccaatgaaatagttgaaagactgccagattccgatctgtattatatatcaacaattcattattttatttgggatttattgaaaaattacaacaaagaattaatagatgttcatgtctcttttcttgaaagtgaaataataaatatagaaaatacggtttttcgtaatcctgattctaaagattcatataagaagtttagagaaattcccatttcagacttagagtttgctatcaaaaatatacataatgataagattaattattatgaggttgcctttggaccagctaaagaatattgggattatctagaatctgtaatggggatagatatattacatagaatcaagtctaataaaaaagatgtttctgatgtaatcaaattattgataactgttaataattataaaatttgtctggaatcaattcagaaaggtcacgttaaatataaagaattaatttataaaaccaatcaaaatattgaaatacttcataggaatatcataggccatgacacattgcttagatatgctaaaatgttattactgaaaaatagaggcttatcaaagttagtaattgacttgtatccatatgtttttattgatgaatgtcaagatgttaacccggatattatggacttcttttctgaagtatatgaatactcaaaacaatctgaagataattttgtcatgggtttttttggcgatccaatgcaaactatcttctctaaagaaatagttcaagaacctttttattctagactaaatatcatcaataaagatttcaataggagatcttatgatgaaataataaatagtataaataaaattagggggaaccatcagcctattattcaaacttccatttttaaaaacaaaaaaggtggtttgattaaatttcaaaggttggatgaaatatataatgaaaagtcagtgataagaaaaataattgctgaccatgctcgtgagtggaatatatcatctgaaagttctttcgcatgtctagttctgaaaaataaaatgctcgctagcttgtgtgactatgaagaaatttatagtttagttgctaaactctatcagacagaaaactcttcttatcacaataaagttaatgaggaatttgttgtaaagggaattaagaaggcaggacggttagcaataactctccacaaaatattgcttccactgttttttattgttaggaatgacagtttatctttgaatgaaatttttccagttattccaaaaggacaatatagcttgaatgtggtgcgtgaggctatatactttttccaaagagtatcgaattgttctttgctagaatatattgataatgttcgtaataaattaaatggttcatatcccattgaaataaaagaactaataggatgtaatttcccagagaaactagtcgatgttggctcaagtttagaatcgattattttggaattatctggatttaagaacatttctgagtgttctccatttttatctgaacttcttcaagttaatatcaatgaatttttgaattggatggattacctgcacggggagcaaaaactctctggcactaattatttgacgtgtcactcatcgaaggggctggagtttgataatgtgctgattttacttgaagattcaatgttacatgataagaatattttttctgagcttctatcttcagatttgaatataaagctaaatgacaagttagagagagcaaggcgtattttttatgtttcagtctcacgtgctatcaagaatgttagtatagttttattttcgaaaaattccgttgagtttcatacttaa

SEQ ID NO: 77144 - DNA, 2190 bp, Staphylococcus aureus; identical to SEQ ID NO: 71982

SEQ ID NO: 77145 - DNA, 1794 bp, Staphylococcus aureus; identical to SEQ ID NO: 75835

SEQ ID NO: 77146 - DNA, 2070 bp, Streptococcus pneumoniae; identical to SEQ ID NO: 71808

SEQ ID NO: 77147 - DNA, 1818 bp, Streptococcus pneumoniae; identical to SEQ ID NO: 71809

SEQ ID NO: 77148 - DNA, 2070 bp, Streptococcus pneumoniae; identical to SEQ ID NO: 71978

SEQ ID NO: 77149 - DNA, 1818 bp, Streptococcus pneumoniae; identical to SEQ ID NO: 71979

SEQ ID NO: 77150 - DNA, 2100 bp, Streptococcus pneumoniae; identical to SEQ ID NO: 73328

SEQ ID NO: 77151 - DNA, 1818 bp, Streptococcus pneumoniae; identical to SEQ ID NO: 73329

SEQ ID NO: 77152 - DNA, 2100 bp, Streptococcus pneumoniae; identical to SEQ ID NO: 73328

SEQ ID NO: 77153 - DNA, 1818 bp, Streptococcus pneumoniae; identical to SEQ ID NO: 73329

SEQ ID NO: 77154 - DNA, 2070 bp, Streptococcus pneumoniae; identical to SEQ ID NO: 71808

SEQ ID NO: 77155 - DNA, 1818 bp, Streptococcus pneumoniae; identical to SEQ ID NO: 71809

SEQ ID NO: 77156 - DNA, 1926 bp, Salmonella enterica; identical to SEQ ID NO: 72180
  subsp. enterica serovar Typhimurium str. DT104

SEQ ID NO: 77157 - DNA, 1662 bp, Salmonella enterica; identical to SEQ ID NO: 72181
  subsp. enterica serovar Typhimurium str. DT104

SEQ ID NO: 77158 - DNA, 2070 bp, Streptococcus pneumoniae; identical to SEQ ID NO: 71978

SEQ ID NO: 77159 - DNA, 1818 bp, Streptococcus pneumoniae; identical to SEQ ID NO: 71979

SEQ ID NO: 77160 - DNA, 2100 bp, Streptococcus pneumoniae; identical to SEQ ID NO: 73328

SEQ ID NO: 77161 - DNA, 1818 bp, Streptococcus pneumoniae; identical to SEQ ID NO: 73329

SEQ ID NO: 77162 - DNA, 2088 bp, Streptococcus pneumoniae; identical to SEQ ID NO: 73976

SEQ ID NO: 77163 - DNA, 1818 bp, Streptococcus pneumoniae; identical to SEQ ID NO: 76075

SEQ ID NO: 77164 - DNA, 2100 bp, Streptococcus pneumoniae; identical to SEQ ID NO: 76158

SEQ ID NO: 77165 - DNA, 1818 bp, Streptococcus pneumoniae; identical to SEQ ID NO: 76159

SEQ ID NO: 77166 - DNA, 2070 bp, Streptococcus pneumoniae; identical to SEQ ID NO: 71978

SEQ ID NO: 77167 - DNA, 1818 bp, Streptococcus pneumoniae
atggtaaagagtgaggagtggtttcctaaaggagatatcattttagaagagactgcattaggagccgtcaaagatgtgactaactgtttagtcattgctggaccaggtgctgggaaaactgaattactagctcaaaagttagactatctattctctacaaataaatgcgtttctccgaaaaaaattctagcattaagtttcaaaacggatgctgcatcaaatttgaaagaaagagttaagaaacgttatggtgatgaatatgcttctcgttttacctcattaacctattcggcttttgaaaagagaattttagaccaatttagagatgttctacctgaggatatacgaccatcaagagattatttgattgaagattggtatactataaaagaactactctctatgaatggaattaatgttaatggatggagaatgtcagatataagaagatatgtcgaaaacatcatacttaacaatggggataatcacaagtttaaaactgacttactaaaaggaacacaagataataagccggtcctcttgtataggcaaataacaaagttgagtactcaaataatagatactaacgaatacatccgtaaagcacttcaaatgacatacgattttgtatttctagatgaatttcaggatactacatatgcccagtatgatttattaaaaacttgttttttaggttcgtcttgtaaattaacagcagttggagatgataagcaagccattatgagatgggcaggtgcaaagcctgatatttttccagactatattcgagactttaattcaaatgaatatcaattgttgatgaatcatcgctctgtacctaagcttgtagaatttcaaaaagaggttcatcagatattaaatagtaatcacagttctattcagacaaataattatccagaatttcaagagggtgaaataacattatttgaatttgaaaatgaaagtttagaagctaagttaattgcaaatgatatagaatcaaaaattcaaggaggtatacgaccatcagaaatttgtatcctagcaaaacaaaaggttggtatttatagtttcgaattgatatctatattaaatagcaaagggattaaagcaagaattgaaaatgaatatcaggatattttaaaagatcctacgtgtaacctattattagatttaatatcatgcagtcaaggaaaacgagatcctttaatttgggaaaatattagtaatttttatggaaatatcaatggaatagatgagttaactgatgaattaattttagcaaaatcctataaggagattgacaatatagttagtgatattacttacctaatttcaaattttattcccaatgaagaaagtatgctaaaattaattgattgtattattgaaaaaatagatgaaaaaagaattatttccaatttttcaacatacaatggaaaaagtgacctagatatcattgtcaagaacttttcaaagatattatacatagaatattctcaaacacaaggtgaatggctagatacagtctctagtttcaagggtgaaaactcaattccaattatgactatccataagagtaaaggattagaatatgaggtagtctattttctaggcttggaggattctgcattctggagttttaatgatcagccggaagaagataaaagtgcattctttgtcgcactttcaagagcaaaaagtcacttaatattcacatattgtaaattgagaaataatagtccgcaaaataatagaaatattaatgagatatattcattgctgactcaatccaatttagttaatgttattaattaa

SEQ ID NO: 77168 - DNA, 2088 bp, Streptococcus pneumoniae; identical to SEQ ID NO: 73976

SEQ ID NO: 77169 - DNA, 1818 bp, Streptococcus pneumoniae; identical to SEQ ID NO: 73977

SEQ ID NO: 77170 - DNA, 2070 bp, Streptococcus pneumoniae; identical to SEQ ID NO: 71978

SEQ ID NO: 77171 - DNA, 1818 bp, Streptococcus pneumoniae; identical to SEQ ID NO: 71979

SEQ ID NO: 77172 - DNA, 1578 bp, Yersinia pseudotuberculosis
ttggaaatatcatctctgaaactcaaaggttttagaaactttaaagatgcacgcataaattttaattcgaatactctgatcatcggagctaatgatgttggcaaaagtaatatgcttcattcgttaagaatgctattagataaaagtgtatcagattcagaaattgaaccaaatgaacttgattttcatttagaaaatggaaattcaagtgaagaatttgaaattattattcattttaaagatatcaatgaagatgcagtactttcaattttgaaagggaatgtcagtgactcaggtgagtcgtttattaagtatgttgcacaaaaatctgatctcagctacaaactttttattggtgattctttagagtctttacaagaaattaactctcgctattatcttaaattcgttaatttaaaatatattcagtcacaacgagatttagagagatttatccgcaaagaaaaaagacaactcttaaaaatcgcacaacaatcattgaactctgatgaaagagaagaagatgacgatttgttaggagagataagttcagatttacaatcaattaatgataagatatcgcagcttatatatgttgaaagagctacaaaagatgtcaacgatgagctgaaaaaacttgcgcatcattactcagaatattctgtgcaactagatactggggcaattggaataaatgactttattgataacctacaacttggagcaaatacaaatggttctaacgtcatgcttggaggagacggacggaacaatcaaatcttattagcattatggaaagcgaaaagtatcaaggaacatgatatcgataacgaagttatcttctatgttatcgaggaacctgaagcacacttacaccctcaccaacaaagaaaactggccgattatttgatagctgaactccctggtcaaacgatcatttcatcccattcgccccaaatagctgtaaattttgaaccagactcagtaataagattgcttgatcggactggacacactgtagccgcaagtgaaggatgttcgaaaggcatttcagatggctgggaagatatgagctaccggatgagtatattgccagcagaatcatttttttcaaatggtgttttcttaattgaaggaccatccgaaattttattttaccattccttagccagaagtttaaatattgacctcgattatttgaatatttcattaatttcagtggatggaatatcatttaaaatatatgcagcaatactagatgctttagaaattccatgggtaatgcgaactgataacgatatatccaagctaaaagatcaagaaaaatggcaatatgcaggtataaaccgatgtttagatttagttggtatagaaaaatttgagcatagcgacaaaaaaataacatctatagacactcttaccaacggtgattggcaaacagtttctgaagaaataaataaatacggaatatatttatcaaaaattgatttagagactgatctggtagaagaattgagtgcttcaatattagatgcgctaaacaaaaaaaataaccaaagcgcaatagaatacttataa

SEQ ID NO: 77173 - DNA, 1626 bp, Yersinia pseudotuberculosis
atgagtactttttcaccaaccactcagcaaacattagccattgattaccctaaaagcatggtaataacagcatgtcctggaagtggtaaaactacagttataaaagaaaaaattagatatattaccggctgtcttcctgagcataaaggggtcattgcaattacattaacaaggaaagcaagttcagaactggagcgtagatgtaaggcggaaggacacgatacaaaacatagtttctttggtacgattgatagtttttgcttaaaggaaataatcattccatttcttccaagaatatggggtggtaaaccaacagaatgcaaagtactaaagaaattagagtctccatataaatattacttagaggaagaattttttggcacaccatcagtcgttaatatcaatgaagattccggctataagaaactgtacgatgagggaatgctgtggatgagttcatttgctgccttagcattaaaaatacttaatgaatctcctgcagcaaagcgatatatcaaagcgagatatagccatatattcatagatgaatatcaagattcatccttatctcagcatcaattatttctaaaaataaatgaacttggtttatgctctattgctgttggtgatgtttggcaatcaatttatgagtttcgaggtggaaatgctgagctgttacttgacttagttagagataaactggtgtttgcacattttgaaataaatttaaatcataggtgtcatccatcaataattaattatgcatctagattactctattcaaatttcgaattattaccaagcgaaagtatcaatgtttacagaaagagattgtcagggaatctaaaagatgtttcgatgaaaatatcatcatggatttcaaaatggttaaatgaaggacaatggggtttggagcaagctaaccaaatagctatttttgcaagaaaagagcaatcgttgctattgctatgctcgggattgacatcaaattttagagtttatattgatacgccattagataaattgggcacagaatgttcagatttatataaagatcttctagcgtataggtataaggccataggcactgcgcaagagttaattaataaagtatttgataacttgattataaatcataatcatcaatttttattaaggaaaaaaattaaaactctcaggggtaaactaactgatgaggaactaattaataaattccacgaaatcgctgaaatgctaaatattcagttcactacacctaatgataatgcagctttggaaattatatcagacgatattttcttaaagcagtttatgccattagataaaaatgaagttcaagtaatgacacttcacaaatctaaaggacttgaatttaaaatagtattgcatttggatttggatgaatggtcttttccatatagattagtaaatgaagttgatagaaatacagcactgtatcccagccttccgcaagaaacaaaccttcattatgttggcattacaagagctgaggaatgctgcgtcctaataaatacagagttccgccaaaactcgactggggcatttaagaagtctgaagcatcttactttttcaagttaccgcaactagagggcctttatcgttag

SEQ ID NO: 77174 - DNA, 2088 bp, Streptococcus pneumoniae; identical to SEQ ID NO: 73976

SEQ ID NO: 77175 - DNA, 1818 bp, Streptococcus pneumoniae; identical to SEQ ID NO: 73977

SEQ ID NO: 77176 - DNA, 1926 bp, Yersinia intermedia
atgaagcttgaagcaattcggttatctggtttccagtcttttggcaaagaaccaactgaactaagcttggaagatgtgacctatctcattggtcctaatggatcaggtaaaacagcagcacttcaggctttatgccgactttttgcgtttgatccaacattgcgtcgtgtccagcgaacagatttccatgtcccttttgatgaggatgaatttcctcctgagagacagttgtggattgaagctgactttctgtttcacgaacttgcggaggacgaggataacagtactgtggctccttattttggtcacatgcgacttgatgagccagaaggtattccacgtgtgcgttttcgcctcactgctactatgggaacagatggggatatagaagaaaacttagtatatgttttggatgtcagtcctgatagctcacctcaaaccacagctcaagtaaccagggcagagcgtaataatattcaagttcactacttaccagccagacgggaccctgcagaccatattgcttacggtgctaacgctttactcggacgtttactccgtgctgttcgttgggatgatgaacgtaatacgattagaggattaaccaaccagataagcgacagcctagcagctaatccctccatcaatgctttcagtgaaagtttgaaattaacttgggcaaccctacacaaaggtaaatttttctcagatcctaaaattacatttgtggcttcggagattgaagcattgctacgccatttatcggtttcatttactcccggccatgatggctcgcttgtcgatttttctcggttgagcgatggtcaaaaatcgatgctttacctttctcttgttctatcatctcaagcgatcggtagagctgttctcgcagaggaagatgttacatttgatcccgacaagttgcgccctccgatttttacgctggtcgcagtggaagaaccagagaatagcctttctccccattacctgggacgtatcgtcagtgccttgaataccatggcaaaaaatattgatgctcaagccttaattgctactcatgcaccatcaatgttacgaagagttgatcctaaatttatacgttatctacgacttactgaggaaagaaaaacacgaattacgtgtatcaaattgccccctaaaacagatgaagcacataaatttgtgagagaggctgtacaagcattccctgagatctatttctcacgcttggttgtgcttggtgaaggagatagtgaaggaatcgtactgcctcgtttgctccaagttaaaggcactcctgtggatgaatcagctattacggtagcaccgttaggtggcaggcatgtaaatcatttctggcggttgctttcagcactgcagattccctatctgactttgcttgatctggatgtagctcggtatggcgctggatgggggcgaattaaatacgttaacgatcagcttgcagcatttgagccggagaaagtacttcctacagaatggaaaattacaaaatggaatgatgaaactacgccaataagaactcaccatttttttaataaaggcactcaagacattttcaaagaacttgaaaaccgatctgtgtttttttcctttcctatggatttggacttttccatgttgctagcttatcccgaagcttatggagttgaaaaagaggagccggatgagtcaacaataaaagcagtgcttggcaaaagctatgacaatatttctcaatatagcgtagatgaacagagttttttcgctacatatcatctacgttttaaattaggtagtaagcccgccgcacacattgatgctctagcgaaactaagcgacaaaaaattaattgcgaatatgccagagtcgcttaatagactagttgatgccgttattgccaaacttggagaattacctgaatga

SEQ ID NO: 77177 - DNA, 1668 bp, Yersinia intermedia
atgattcctattgaagcatggcaacccgcagatggattaacgctggaaccaaatgcaaaacgagcagcaaaagcccgcaaacgttgcttagctcttaccgctggaccgggcgcaggtaaaactgaaatgcttgcgcagcgggcagatttcctgttacggacagggacatgtcggtatccgaagcggattctcgctatctccttcaaggttgatgctagtagaaatctaaaagagcgcgtcgaacggcgctgtggtgcagaccttgcctcccgtttcgatagttatactttccatgcatttgccaagcgaataattgatcgctttagaccagtactgaaaggaagagaggcattagattcagactatacgatcgttgataagaaaatcagtatttctcgttcccaaatcgaatttagtgatcttgttccgttggctattaaaatattgcaaaactcaaaaattgctcgtaattctattcgtcagacttacagcgatattttccttgatgaatttcaggattgtacaaatttgcaatatgaattggttaaacttgcttttctagggactaaaatccggcttactgcagtaggtgataccaagcaaaaaatcatgggttgggcgggagcgatggatggtatattccaaacatttactgatgatttcaatgcagttccacttaacatgtaccgaaatttccggtcaaagccacaattgctgcgagtacaaaacgaaataattcgtcggcttgatcttgcatctgtcatgccagatgaacaattgaatggtgacgaaggtgagattcatgtcgagagtttcagaaacagtcaagaagaagccatttatttggcaaatattattaatgactggattaataaagaaggattggcaccaacagaaattgccgtcttagtttctaagcagttagatctctatgctgaccacctaatgatggagctggaattacgaggaattccatatcgaaacgagcagcaaatgcaggatattactgttgagccagttgcacgtttaatcgtagattatctttcatgcctctatggaaagcgtgaacccaaggcttggatccgtctgatgaatcagctgattccttttgctgatgaagaagtacagtcctgtgcgcgaaaggaccttgatcgtttgttaaaaaaacagcgcaaagaagcaactagtgctgaacagcttgattcacctttttcttgttggtggaagtttgtaaaggagtttttaaaacatattggcactgatacaatcgtagccctatcacctgattacgaatcacacaagcgtctacaggaagtttttcgtgataccaaagcaaggattgaagagttgcttgaaattgaatcagatttgccacaagctcttggacggtttacggatgaccaagcagtcagaattttaaccattcacaaaagcaaagggcttgagttcgattctgtaattataatggcggtggaaaacgagattttctttggtaaccaagatgagaatcgatgtgcattcttcgttggtgtttcacggacgaagagacgattatttttaactcatgctgcacagcgtgaacggcctgctaatgccaaacgttgggaagtccatcgaactgttcaatccgaatatattggttatgttacaccatttattaaacggtaa

SEQ ID NO: 77178 - DNA, 2070 bp, Streptococcus pneumoniae; identical to SEQ ID NO: 71978

SEQ ID NO: 77179 - DNA, 1818 bp, Streptococcus pneumoniae; identical to SEQ ID NO: 71979

SEQ ID NO: 77180 - DNA, 2100 bp, Streptococcus pneumoniae; identical to SEQ ID NO: 73328

SEQ ID NO: 77181 - DNA, 1818 bp, Streptococcus pneumoniae; identical to SEQ ID NO: 73329

SEQ ID NO: 77182 - DNA, 2070 bp, Streptococcus pneumoniae; identical to SEQ ID NO: 71808

SEQ ID NO: 77183 - DNA, 1818 bp, Streptococcus pneumoniae; identical to SEQ ID NO: 71809

SEQ ID NO: 77184 - DNA, 2100 bp, Streptococcus pneumoniae; identical to SEQ ID NO: 73328

SEQ ID NO: 77185 - DNA, 1818 bp, Streptococcus pneumoniae; identical to SEQ ID NO: 73329

SEQ ID NO: 77186 - DNA, 2088 bp, Streptococcus pneumoniae
atgaagttaacaaaaatggttattaataattttagatcttttggggagtgtcaagcaattaactttaataatcaaactgtactgatagggaataatagttcaggaaagacaactgtattacaggcattgagtaagttgttttcagataaacaaagtgaaagaatcattcgaaaaagtgattttcatttaccaaaagggttaaaacctggtgaaaacacaagaaatctttttatagaaactatttttgagtttgatgaacttgctggaactgtctatggcccagccattccaacatttttcgagcactttacagtttctcaagatggtgcaaaaccttttttacgaatcagattagaatcttcctgggaagatgatggaacagttgaaggaagtattgatactcaaatttattatatttcatctgatgaagatactattagagatgaagacaaacatcgtgctcctagaaaggatttggataaaattagggtactttatgtaccagcttcaagaacacctgagaaggagttgggtaatgcttcaggtagtatgttaagtaggctggtaaatagtataaattggactaaagatgagataaatgaaattaaagataaaattgatgagttgaataacacctttttatctgaaaatggagcattaactcagattaacaatgagattcagaaatcatgggaattatatcatgaagataaccgtttttctcaagcagagttaattattaattcttctgagatggcggcagcacttagacagattgccttaaaattttcaccaacaaccactgaagaagcatttacagtttcagatctaggagatggactgagatctattttttatttttcacttgttgattcgatacttgatattgagttagaaattaccaaagaccgtgaagagaatcctgataatccaagatttaagttggtacctccaatactaactatcttagcaatagaggaaccagaaaatcatattgctccacatcacattggaaaactagtaaaaaggtttaagcaattaagtaataatgataactctcaagtaattttaacgtcacattccccagctattgtaaaaagaattgaaccagaagaattgaggtatttaagaattgaaagtaatggcagagttcttcaaaccattgtttctgatataaaactacctcaagatactgatgaatcttataaatatattaaaggagcaattcaagcatatcctgaactatattttgccaagttagtagttctaggtgaaggtgatagtgaggaactgctattaccaaagttttttgatttacttgggaatgagatagatagctctcagatttcaattgtgcctttaggaggaagacatgttaactatttttggaaattattaaattctctaaaaatacctcatattactttactagactttgataatgaaagatacggaggtggttgggggagagtacaatatgttatccaacagttactaaaaataggtattgcgcgtaatgatttagtgagaatgaaagatggtagaatattggacgatcaagacattgctagaattagttctaatcagatatctgatatcctctctcaaccattgttatcctggataaatcatttagaaaaattcaatgttttcttttctgcaccccttgatattgatttcttaatgttacagtattataaggattattatctggaaactttatctaccaatgagggacctgttgtttcttatactgacgaaaatagtgacaataaaaaaataaaaataactaaaatggacagaacaaatgattatcaattaattggttttaaaaatcgcatcagtgaagctatacaagcgactttaaaagataagagtggccctggtgatagcttcactgaagaagaaaaggaactcatgatttggtatcaatatttctttttaggtagaggcaaaccgacgactcatatgcaatttttattatctattcgtgatgaagaattaatcgaaagcctaccttctgtatttgagaaaatagttaaacgagctaaagaattacttggagatattgaatatggtgaagagtga

SEQ ID NO: 77187 - DNA, 1179 bp, Streptococcus pneumoniae
  modified_base (1105)..(1130): a, c, t, g, unknown or other
atggtgaagagtgatgattggcttcctaaaggagatattattttagagaatgcagctttagaagctgttaagaatgtaaacaattgtttagttattgctggaccaggtgcggggaaaactgaattactagctcaaaaattagactatcttttttctacaaatgaatgtatttctcccaaaaaaattttagctttaagttttaaaacagatgctgcagcaaatatgaaaaatagagttaaaaaacgttatggtgatgagtatgcttcgcgatttacatctttaacctattcagcatttgagaagatgattttagatcaatatataaatgctctcccagaagaaataagaccagatagagactatctggttgatgattgggatgttataaaagcaacacttattaaaaatggtattaatgttaatgggaggagaatgtcagatataagaaagtctgtcgaaaaaaccgtacttaatgatgaggctaatttaaagtttaaaaaggacttattaaaagggacacggaataataaggctgtgctcctttataaacaaataactaagctagctacgtatataatatatacaaataaatatattcggaaagcacttcaaatgacatatgaatttgtctttttagatgaatttcaggatactacgtatgaccagtataatttattaaaaacatgttttttaggttcgacgtgtaaattgactgcagttggagataataaacaagcaattatgagatgggcaggtgcaaatcctgatatttttcaagattataagctagacttcaaagcaaatgaatatcaattattgatgaatcaccgctctgtacctaaacttatagaatttcaaaaagaggttcatcagatattaaatagtaatcacagttctattcagtcaaattattatccagaatttcaagagggtgaaataacattatttgaatttgaaaatgaaagtttagaatctaagttaattgcaaatgatatagaatcaaaaattcaaggaggtatacgaccatcagaaatttgtatcctagcaaaacagaaggttgatgattatagttcaaaattgataattacattaagcagtaaagggnnnnnnnnnnnnnnnnnnnnnnnnnnagtaaagggattaaagcaagaattgaaaatgaatatcaagaacttttaa

SEQ ID NO: 77188 - DNA, 2088 bp, Streptococcus pneumoniae; identical to SEQ ID NO: 73976

SEQ ID NO: 77189 - DNA, 1818 bp, Streptococcus pneumoniae; identical to SEQ ID NO: 73977

SEQ ID NO: 77190 - DNA, 2100 bp, Streptococcus pneumoniae; identical to SEQ ID NO: 73328

SEQ ID NO: 77191 - DNA, 1818 bp, Streptococcus pneumoniae; identical to SEQ ID NO: 73329

SEQ ID NO: 77192 - DNA, 2088 bp, Streptococcus pneumoniae; identical to SEQ ID NO: 73976

SEQ ID NO: 77193 - DNA, 1818 bp, Streptococcus pneumoniae
atggtgaagagtgatgattggcttcctaaaggagatattattttagagaatgcagctttagaagctgttaagaatgtaaacaattgtttagttattgctggaccaggtgcggggaaaactgaattactagctcaaaaattagactatcttttttctacaaatgaatgtatttctcccaaaaaaattttagctttaagttttaaaacagatgctgcagcaaatatgaaaaatagagttaaaaaacgttatggtgatgagtatgcttcgcgatttacatctttaacctattcagcatttgagaagatgattttagatcaatatataaatgctctcccagaagaaataagaccagatagagactatctggttgatgattgggatgttataaaagcaacacttattaaaaatggtattaatgttaatgggaggagaatgtcagatataagaaagtctgtcgaaaaaaccgtacttaatgatgaggctaatttaaagtttaaaaaggacttattaaaagggacacggaataataaggctgtgctcctttataaacaaataactaagctagctacgtatataatatatacaaataaatatattcggaaagcacttcaaatgacatatgaatttgtctttttagatgaatttcaggatactacgtatgaccagtataatttattaaaaacatgttttttaggttcgacgtgtaaattgactgcagttggagataataaacaagcaattatgagatgggcaggtgcaaatcctgatatttttcaagattataagctagacttcaaagcaaatgaatatcaattattgatgaatcaccgctctgtacctaaacttatagaatttcaaaaagaggttcatcagatattaaatagtaatcacagttctattcagtcaaattattatccagaatttcaagagggtgaaataacattatttgaatttgaaaatgaaagtttagaatctaagttaattgcaaatgatatagaatcaaaaattcaaggaggtatacgaccatcagaaatttgtatcctagcaaaacagaaggttgatgattatagttcaaaattgataattacattaagcagtaaagggattaaagcaagaattgaaaatgaatatcaagaacttttaaaagaccctacttgtaacttattattagatttaatatcatgcagtcaaggaaaacgagatcctttaatttgggaaaatattagtaatttttatggaaatatcaatggaatagatgaacttactgatgaattaattttagcaaaatcctataaggagattgacaatatagttagtgatattacttacctaatttcaaatgttattcccgataaagacaggatgctaaatttaattaattgtattatcgaaaaaatagatgaaaaaagaattatttcaaatttttcaacatacaatagaaaaagtgacctagatatcattgtcaagaacttttcaaagttattatacaaagaatattctcaaacacaaggtgaatggctaaatacagtctctagtttcaagggtgaaaactcaattccaattatgactatccataagagtaaaggattagaatatgaggtagtctattttctaggcttggaggattctgcattctggagttttaatgatcaaccggaagaagataaaagtgcgttctttgtcgcactttcaagagcaaaaagtcacttaatattcacatactgtaaattgagaaataatagtccgcaaaataatagaaatattaatgagatatattcattgctgactcaatccaatttagttgatgttattaattaa

SEQ ID NO: 77194 - DNA, 2100 bp, Streptococcus pneumoniae; identical to SEQ ID NO: 76158

SEQ ID NO: 77195 - DNA, 1818 bp, Streptococcus pneumoniae; identical to SEQ ID NO: 76159

SEQ ID NO: 77196 - DNA, 2088 bp, Streptococcus pneumoniae; identical to SEQ ID NO: 73976

SEQ ID NO: 77197 - DNA, 1818 bp, Streptococcus pneumoniae; identical to SEQ ID NO: 76075

SEQ ID NO: 77198 - DNA, 2100 bp, Streptococcus pneumoniae; identical to SEQ ID NO: 73328

SEQ ID NO: 77199 - DNA, 1818 bp, Streptococcus pneumoniae; identical to SEQ ID NO: 73329

SEQ ID NO: 77200 - DNA, 2190 bp, Staphylococcus aureus; identical to SEQ ID NO: 71982

SEQ ID NO: 77201 - DNA, 1794 bp, Staphylococcus aureus; identical to SEQ ID NO: 75835

SEQ ID NO: 77202 - DNA, 2070 bp, Streptococcus pneumoniae; identical to SEQ ID NO: 71978

SEQ ID NO: 77203 - DNA, 1818 bp, Streptococcus pneumoniae; identical to SEQ ID NO: 71979

SEQ ID NO: 77204 - DNA, 2070 bp, Streptococcus pneumoniae; identical to SEQ ID NO: 71978

SEQ ID NO: 77205 - DNA, 1818 bp, Streptococcus pneumoniae; identical to SEQ ID NO: 71979

SEQ ID NO: 77206 - DNA, 2088 bp, Streptococcus pneumoniae; identical to SEQ ID NO: 73976

SEQ ID NO: 77207 - DNA, 1818 bp, Streptococcus pneumoniae; identical to SEQ ID NO: 73977

SEQ ID NO: 77208 - DNA, 2100 bp, Streptococcus pneumoniae; identical to SEQ ID NO: 73328

SEQ ID NO: 77209 - DNA, 1818 bp, Streptococcus pneumoniae; identical to SEQ ID NO: 73329

SEQ ID NO: 77210 - DNA, 1584 bp, Salmonella enterica subsp. enterica serovar Typhi
atgctgcattctttaaggatattattagataaaagcctttcagaatctgaaattgaaccagatgaacttgatttccatttggaaaatggaacgccatgtgaagaaattgagattatagtccattttaaagatattaatgaagatgcagtgctttcaattcttaaaggaaatgtcagtgattcaggtgaatcattcattaaatattctgctataaaatcagatctcagctataaactattcattggaagttccttagaatcattacaagaaataaactctcggtactatcttaaattcgttaatctaaaatatattcaatcacaacgagatttagaaaaatttatccgtaaggaaaaaagacaattactaaaaatagcacaacaatctttgactccaggtgaaagagtagaagatgatgatttgttgagagagataagttcagatttacaagtaataaatgataagatatcgcaacttatatacgttgaaagagccacaaaggatgtcaatgacgagataaaaaaacttgcacatcattactcagaatattctgtacaacttgatactggggtaattggtataaatgagtttattgatagcctacaacttggagccaattcgaatggctccagcgtcatgcttgggggagacggtagaaataatcaaatattattagctctatggaaagcgaagagtatcagagaacatgatattgataacgaagttatcttttatgttatcgaagaacctgaagcacatttacaccctcaccaacaaagaaaattggccgattatttgacaactgaacttccggggcaaacgatcatttcatcccattccccccaaatagctgtaaattttgaacctggctcagtaataagattgcttgaccgggccgggcatactgtagctgctagcgaaggatgttcaagatatattacagatggttgggaaggaatgagctaccgaatgagtatattaccagcagagtcatttttttcaaatggtgtattcttagtcgagggaccgtcagaaattttattttaccaatctttggcaaaaagtttaaatatcgacttggattattggaatatttcaatagtttcagttgatgggatagcatttaaaatatacgtggctatacttaatgcgttagaaattccatgggtaatgagaaccgataacgatatatcaaaaataaaagataagtggcaatatgctggtataaatcgatgtttaagtatagtaggtatcgataactttgagcatagtgatgttgaaataacacctatggataccgtaaccaatggtgaatggctgaaagtttctaaaataataaatgaacatggagtatatttatcaaaaatcgatttggaaactgacttggtagaagagttaaatacaccagtactaaatgctttagataagaaaagtaaccaaagtgcaataaagtatttacagaagaaaaaagcattaagaatgcgtgaacttcttaaaataataagaaaagaccttcacaaactaaatgcaggtaatttagtaaaaccattaaaccatcttgtaaaactgattaaaggtgaatga

SEQ ID NO: 77211 - DNA, 1626 bp, Salmonella enterica subsp. enterica serovar Typhi
atgagcgtcttttcaccaacgcatcagcaaacattggctattgattacactggcagtatggtaataacagcatgcccggggagtggtaagactacggttataaaggaaaaaattagaaatattaccgcctctctccctgaccataaaggagttattgcaattacattcacaaggaaagcaagttcagaactggaacgtagatgcaagtctgaaggacacgatgtaaaacatagtttttttggtacaattgatagcttttgtttaaaggaactaattattccatttctttcaaggttatggggaggtacgccaacagaatgtaaagtgctaaagagattggatccgccatatagctatttcatagaaaacaatttttctggcacgccatcaatcattaatatcaatgaagattctggatataagaaattatacgataatggaatattgtggatgggctcattctccgccttagcactgaaaatattaaatgaatcatctgcggcaaaacgatatattaaagcgagatacagtcatatatttatagatgaatatcaagattcatctttatcccagcatcaactatttctaaaaataaacgaacttggtttgtactccattgctgttggtgatgtttggcaatcaatatatgagtttaggggaggaaattcgaaacttcttttagagttagtcagtaaaacagaagtttttaaacattttgagataaacttcaatcacaggtgccacccttcaataagcaattacgcctcaagattacttaacccaagttataatctgttaccaacagatgatataagagtatttaggagacgacttagtggaaatcttaaagataatgcagttacgatttcctcttggatttcagattggttagaaagtggtgaatgggaattagaaaaggcaaatcaaatagcaattttagcaagaaaagaaaaatcgttaacacgattttgttctggattaaacttaaacttcaggctttatattgatacaccactagataaaattggtactgagtgttcagatctgtacaaagatcttttagcgtataaatatggatcaataaatacagttcaagagcttattaacaaggtttttgatggggttataattaatgataatattaagttcttcttgaggaagaaaataaaagaaattaaaaccgaattaaaatatgaagatttaatacataagtttcatgatatcgccgatattttagggataaattcgacagaacatactgatgaggctgtgataaaaacaatttctaacgaggttttagtcaagcagttcaagccattagatgataatgagttacaagtaatgactcttcataaatctaaaggattagaattcaaagtagtatttcatctagatttagatgaatggtctttcccatatagaaaacccggcagcgaagataaatacacacctctatatcctacccttcaacaagagcttaaccttcattacgttggcataactagagctgagaattgtatcgtgcttattaattcctctcttagagaaaattcaggtggagaatttaaaaaatcagatgaatcatatttttttaaattaccacaattgaatggtctatataattaa

SEQ ID NO: 77212 - DNA, 2070 bp, Streptococcus pneumoniae; identical to SEQ ID NO: 71978

SEQ ID NO: 77213 - DNA, 1818 bp, Streptococcus pneumoniae; identical to SEQ ID NO: 71979

SEQ ID NO: 77214 - DNA, 2088 bp, Streptococcus pneumoniae; identical to SEQ ID NO: 73976

SEQ ID NO: 77215 - DNA, 1818 bp, Streptococcus pneumoniae; identical to SEQ ID NO: 73977

SEQ ID NO: 77216 - DNA, 2070 bp, Streptococcus pneumoniae; identical to SEQ ID NO: 71808

SEQ ID NO: 77217 - DNA, 1818 bp, Streptococcus pneumoniae; identical to SEQ ID NO: 71809

SEQ ID NO: 77218 - DNA, 2088 bp, Streptococcus pneumoniae; identical to SEQ ID NO: 73976

SEQ ID NO: 77219 - DNA, 1818 bp, Streptococcus pneumoniae; identical to SEQ ID NO: 76075

SEQ ID NO: 77220 - DNA, 1758 bp, Streptococcus pneumoniae; identical to SEQ ID NO: 72172

SEQ ID NO: 77221 - DNA, 1539 bp, Streptococcus pneumoniae; identical to SEQ ID NO: 72173

SEQ ID NO: 77222 - DNA, 2070 bp, Streptococcus pneumoniae; identical to SEQ ID NO: 71808

SEQ ID NO: 77223 - DNA, 1818 bp, Streptococcus pneumoniae; identical to SEQ ID NO: 71809

SEQ ID NO: 77224 - DNA, 2100 bp, Streptococcus pneumoniae; identical to SEQ ID NO: 73328

SEQ ID NO: 77225 - DNA, 1818 bp, Streptococcus pneumoniae; identical to SEQ ID NO: 73329

SEQ ID NO: 77226 - DNA, 2100 bp, Streptococcus pneumoniae; identical to SEQ ID NO: 73328

SEQ ID NO: 77227 - DNA, 1818 bp, Streptococcus pneumoniae; identical to SEQ ID NO: 73329

SEQ ID NO: 77228 - DNA, 2100 bp, Streptococcus pneumoniae; identical to SEQ ID NO: 73328

SEQ ID NO: 77229 - DNA, 1818 bp, Streptococcus pneumoniae; identical to SEQ ID NO: 73329

SEQ ID NO: 77230 - DNA, 2070 bp, Streptococcus pneumoniae; identical to SEQ ID NO: 71808

SEQ ID NO: 77231 - DNA, 1818 bp, Streptococcus pneumoniae; identical to SEQ ID NO: 71809

SEQ ID NO: 77232 - DNA, 2070 bp, Streptococcus pneumoniae; identical to SEQ ID NO: 71978

SEQ ID NO: 77233 - DNA, 1818 bp, Streptococcus pneumoniae; identical to SEQ ID NO: 71979

SEQ ID NO: 77234 - DNA, 2088 bp, Streptococcus pneumoniae; identical to SEQ ID NO: 73976

SEQ ID NO: 77235 - DNA, 1818 bp, Streptococcus pneumoniae; identical to SEQ ID NO: 73977

SEQ ID NO: 77236 - DNA, 1701 bp, Yersinia frederiksenii
atgtatattgataacatttatttaaaggggtatagaaactattctgatgcttatattcgattggataaaaccacattgattattggtgctaatgatgttgggaaaactaacttactatactcattgagattattacttgataagagtttgtcagagttggatttagaaccaaagtcaaatgattttcatatagataaaaatggagcaccagcagaagaaatagaaattactctaaactttaaagatgtaactgaggatgctgttatatctaagttaagtggttatgtaagtgaaagtaatgaagttttcataaggtatttcgccaataaaaccacgttagagtacaaaatatatattggacataaagtaagtgacatggaggaaatatcatcacgattttatttgaaatatttaagtttgaggtatatcaactcacagagagacttactaaaatacattaaattagaaaagaaacatttattaagattagcccaggaacatcggactgaagagcaatctgaaaaagataagttaacatatgaaggtttatctagcctacttgacagtgttaatgaaaaagttaaagatttaagttatgtagccgcagccacatctgaattaaatacagaattacaaaagttagcttataaaaatgaggggtatactgttcaattagattcaggcgcaataggtgtagatcaatttatagaaaagctagaattaagtgcaagtactaatggtcagagagtaatgcttggtggtgatggtcttaataatcaaatattactagctctatggaaagctaaaagtgtgagagaacatgatgtagaaaatgaagtaattatttattgtgtagaagagccagaagcccatttatatccacatcagcaaaggaaaatttccaattatttaattaataaattgcctggacagtctattgtcacctcacactccccacaaatagccgtaaactatcagccatcatcaattgttaaaatttattcagaagatggcagttctcaagctgcaagtgatggttgctctgattgtataagcaaagcatgggatggcatgggctataggataagtataattcctgcggaagcttttttttcagatgtagtatttcttgttgaaggtccatcggaaaaaatattttacgaacagttagcaaaagttatagatatcgatcttgattattataatataagtatattatctgttgatggtatccaatttgaagtatatacaaaaatacttgacgcttttaatataagatgggtaataagaaccgataatgatatgtcaaagattccttataaggatgaatggcagtttgctggtataaatagagcattatatctatgtggtatgcaagcaattgaaaataggcctttacctattccagagagtgatcttataacccagtggggtaactattcacccatcttaaataggaaagggatttttctctcttttatagatcttgaatctgatcttgctgagcagtttagtgaagaaatccaaagttatagccatacagataataatacagatgccgcacactacttaagaggaaaaaaagcaataaggatgcgggagcttttacaatttaagagaaataagttaatcaaccttgtaggtagtgatttgtctaggccattgattatgtgccaaaaaatcgctaggggggcgatatga

SEQ ID NO: 77237 - DNA, 1617 bp, Yersinia frederiksenii
atgaatctaactacagagcagaaagcagctatagactacccacataatgcagttattactgcttgtcccggcagtggaaaaactacgatcctcatttataaaattaagtcactgttaacgcactgtaaaaattatcaagggatcattgctatatcgtatacaaataaagcaagtgatgaactaaaaaagagatgtcaatctttaatttttgatacaaaagaaagtttctttgggactattgataaattttacctaaaagagatcattattccttttttgaagcaaatatgggggactccaacaagtttaatatctacttttaaatacagtgatctttcagttgataataaagaactagtgaacatatattttccactggataatatagatttcacattgttaaatgataacttgaataacttagttaagttgttcaagtcaggaattattgtgttagagacaatccctatattagcttttattgtcttgtgtaattctgaatcatgtaagcgttacattaaagctaaatataaaggtatatttattgatgaatatcaagactcaggagtggtccaacacagaatttttctaaagttagctgaaataggattaatatctatagctgttggtgatttggaacaatcaatatatggatattctggtagaagtcctgaaaatttaaaaaagttgattttagaacctagattcaaacatttaactattacaattaatcatcggtgtcatccatctatatctaactatgcaaataggttaatgagaccagactgtgcactattagagacaaatgaacagcgtgttttcagaaaaaaaataaatggtaatcaaactgagattgcaagatggattggagtaaatcttgataagattaaaaaacattacgctataaataaaaatagagatgttgctattttagtaagaagtaatttatgtgcttcaattatagcatctaatgtcaattatcctaatagagcttattttgacgatttactatcaaaactggatggggttactaccgatttaataaaaaatcttctttcatatagatatgaaaacaatactgcacagtcaataattgacagtttttataaaaacataagcaacaaaatgataattacctctctaagaagaaaaataaaagaggttagagtatgtgatgatgaccaactgataattaaaattaaagatgttgtttttttattaattgataaagatatttcagtttcacatgtagatgctataaacgaagttattaataatgtagagataagaaataattataaaaaatcctctgataatgagattcagatattgactcttcataaatctaaaggattggagtttgattttgtttttcatattgacttatatgattggatcttacctagaagagccttcattaaaggctcttatgatattgtttttgagaatgaagaacagtgtcttaatttgcattatgttggaataacgagagcaaagaaaggtattgtccttattacttcaacaaagagattaaattctgatttagaggaaaagaatggaaatccatcacaatttcttgaacggcaaggattggctgaactctatcttcaattatag

SEQ ID NO: 77238 - DNA, 2088 bp, Streptococcus pneumoniae; identical to SEQ ID NO: 73976

SEQ ID NO: 77239 - DNA, 1818 bp, Streptococcus pneumoniae; identical to SEQ ID NO: 73977

SEQ ID NO: 77240 - DNA, 2088 bp, Streptococcus pneumoniae; identical to SEQ ID NO: 73976

SEQ ID NO: 77241 - DNA, 1818 bp, Streptococcus pneumoniae; identical to SEQ ID NO: 73977

SEQ ID NO: 77242 - DNA, 2088 bp, Streptococcus pneumoniae; identical to SEQ ID NO: 73976

SEQ ID NO: 77243 - DNA, 1818 bp, Streptococcus pneumoniae; identical to SEQ ID NO: 73977

SEQ ID NO: 77244 - DNA, 2100 bp, Streptococcus pneumoniae; identical to SEQ ID NO: 73328

SEQ ID NO: 77245 - DNA, 1818 bp, Streptococcus pneumoniae; identical to SEQ ID NO: 73329

SEQ ID NO: 77246 - DNA, 2088 bp, Streptococcus pneumoniae; identical to SEQ ID NO: 73976

SEQ ID NO: 77247 - DNA, 1818 bp, Streptococcus pneumoniae; identical to SEQ ID NO: 73977

SEQ ID NO: 77248 - DNA, 1926 bp, Salmonella enterica; identical to SEQ ID NO: 72180
  subsp. enterica serovar Typhimurium str. DT104

SEQ ID NO: 77249 - DNA, 1662 bp, Salmonella enterica; identical to SEQ ID NO: 72181
  subsp. enterica serovar Typhimurium str. DT104

SEQ ID NO: 77250 - DNA, 2100 bp, Streptococcus pneumoniae; identical to SEQ ID NO: 73328

SEQ ID NO: 77251 - DNA, 1818 bp, Streptococcus pneumoniae; identical to SEQ ID NO: 73329

SEQ ID NO: 77252 - DNA, 1758 bp, Streptococcus pneumoniae; identical to SEQ ID NO: 76066

SEQ ID NO: 77253 - DNA, 1539 bp, Streptococcus pneumoniae; identical to SEQ ID NO: 72173

SEQ ID NO: 77254 - DNA, 2070 bp, Streptococcus pneumoniae; identical to SEQ ID NO: 76276

SEQ ID NO: 77255 - DNA, 1818 bp, Streptococcus pneumoniae; identical to SEQ ID NO: 76277

SEQ ID NO: 77256 - DNA, 2133 bp, Yersinia ruckeri; identical to SEQ ID NO: 74274

SEQ ID NO: 77257 - DNA, 1797 bp, Yersinia ruckeri; identical to SEQ ID NO: 74275

SEQ ID NO: 77258 - DNA, 2088 bp, Streptococcus pneumoniae; identical to SEQ ID NO: 73976

SEQ ID NO: 77259 - DNA, 1818 bp, Streptococcus pneumoniae; identical to SEQ ID NO: 73977

SEQ ID NO: 77260 - DNA, 2070 bp, Streptococcus pneumoniae; identical to SEQ ID NO: 71978

SEQ ID NO: 77261 - DNA, 1818 bp, Streptococcus pneumoniae; identical to SEQ ID NO: 71979

SEQ ID NO: 77262 - DNA, 2088 bp, Streptococcus pneumoniae; identical to SEQ ID NO: 73976

SEQ ID NO: 77263 - DNA, 1818 bp, Streptococcus pneumoniae; identical to SEQ ID NO: 73977

SEQ ID NO: 77264 - DNA, 2088 bp, Streptococcus pneumoniae; identical to SEQ ID NO: 73976

SEQ ID NO: 77265 - DNA, 1818 bp, Streptococcus pneumoniae; identical to SEQ ID NO: 73977

SEQ ID NO: 77266 - DNA, 2070 bp, Streptococcus pneumoniae; identical to SEQ ID NO: 71808

SEQ ID NO: 77267 - DNA, 1818 bp, Streptococcus pneumoniae; identical to SEQ ID NO: 71809

SEQ ID NO: 77268 - DNA, 2070 bp, Streptococcus pneumoniae; identical to SEQ ID NO: 71978

SEQ ID NO: 77269 - DNA, 1818 bp, Streptococcus pneumoniae; identical to SEQ ID NO: 71979

SEQ ID NO: 77270 - DNA, 2070 bp, Streptococcus pneumoniae; identical to SEQ ID NO: 71978

SEQ ID NO: 77271 - DNA, 1818 bp, Streptococcus pneumoniae; identical to SEQ ID NO: 71979

SEQ ID NO: 77272 - DNA, 2070 bp, Streptococcus pneumoniae; identical to SEQ ID NO: 71978

SEQ ID NO: 77273 - DNA, 1818 bp, Streptococcus pneumoniae; identical to SEQ ID NO: 71979

SEQ ID NO: 77274 - DNA, 1824 bp, Salmonella enterica subsp. enterica serovar Typhi; identical to SEQ ID NO: 76128

SEQ ID NO: 77275 - DNA, 1893 bp, Salmonella enterica subsp. enterica serovar Typhi; identical to SEQ ID NO: 76129

SEQ ID NO: 77276 - DNA, 1758 bp, Streptococcus pneumoniae; identical to SEQ ID NO: 72172

SEQ ID NO: 77277 - DNA, 1539 bp, Streptococcus pneumoniae; identical to SEQ ID NO: 72173

SEQ ID NO: 77278 - DNA, 2100 bp, Streptococcus pneumoniae; identical to SEQ ID NO: 73328

SEQ ID NO: 77279 - DNA, 1950 bp, Streptococcus pneumoniae; identical to SEQ ID NO: 76495

SEQ ID NO: 77280 - DNA, 2100 bp, Streptococcus pneumoniae; identical to SEQ ID NO: 73328

SEQ ID NO: 77281 - DNA, 1818 bp, Streptococcus pneumoniae; identical to SEQ ID NO: 73329

SEQ ID NO: 77282 - DNA, 2070 bp, Streptococcus pneumoniae; identical to SEQ ID NO: 71978

SEQ ID NO: 77283 - DNA, 1818 bp, Streptococcus pneumoniae; identical to SEQ ID NO: 71979

SEQ ID NO: 77284 - DNA, 2070 bp, Streptococcus pneumoniae; identical to SEQ ID NO: 71978

SEQ ID NO: 77285 - DNA, 1818 bp, Streptococcus pneumoniae; identical to SEQ ID NO: 71979

SEQ ID NO: 77286 - DNA, 2088 bp, Streptococcus pneumoniae; identical to SEQ ID NO: 73976

SEQ ID NO: 77287 - DNA, 1818 bp, Streptococcus pneumoniae; identical to SEQ ID NO: 76075

SEQ ID NO: 77288 - DNA, 1758 bp, Streptococcus pneumoniae; identical to SEQ ID NO: 72172

SEQ ID NO: 77289 - DNA, 1539 bp, Streptococcus pneumoniae; identical to SEQ ID NO: 72173

SEQ ID NO: 77290 - DNA, 2286 bp, Yersinia enterocolitica
atgtatttgaggaagctggcagtccgtaatttcagaaggctacacgatgttgtcatcgatcttgcgtcagacatttcaatttttgtaggggcgaataacagcggtaagacttcagtcggacatgctcttcaactattcaccggtaaaggccggttcaatattcatgacttcaatgcagaactttggactgacattgtcagatttggagaaggggcggatgctgtgtcgctaccttcactggaagttgatatttggtttgaagtaacatcgaatgatgttcatcgtgtagtagatcttctccccagcttatcgtggtctggttctctagtcggaatgcgcgttgcatttgccccctgcaatcccgaagaaatacgttcgcgcttcctcgcagtccgtcagcttgccgtcgatgccacacctaaagatgaaaatggaactcccaaattcgatccttcacctcgtaatctgtgggaatatcttcgcgatagcctcaatgacgaatatgaactccgctattttgttctcgatccaacacgtttcaatgcggaaatgatatctgaggaaggctatgagcctacttcgctcacagggcgtgatcgaagtggtcgcgaaatactgaacagccttatccaaatcaacttcttgaatgctcagcgtcatctttcagatggttccggaggttcccgttcggaggatctctctcgtgttctcagccgtttttacggacgaaaccttgaacaaaaaggtgaggattacgaagcattaagtgctttggctgcttctgaatcagctttcaaccagcatcttgaacgtgtttttgctcctacgctgaaaagtctggcgaaactcggataccctggactttcaaacccacgcatgatgattcgttcggccttagacccagcacagatcatgaacaaccaaaatggggccgttatacattacgcgctgggggttgatgatggtaaccctgccccgccaacattacccgatagttataacggacttggttttaagaatctgatctttatggttgttgaattactcgacatccacaatcaatggttagcaatagaagagaatcgaccacccgttcacctgatctttattgaagagccagaagctcatctccacgcacagttacagcaggcttttatacgcaagataatggatctccttgcgatggagagtgaagagcttatgcactacaccactcaagtggtggttacttctcattcaactcatattctttacgaacgcggttttcggccgatccgttactttcggcggaggcgttcatcaaatatgtcggctacagatgtgctcaatctctctgttttttatgataatactgatcctgaaattcgagactttcttgagcgttatttgaagttgacccattgtgatttgttttttgccgacggggctgtgcttgtagaaggtaatgttgagcggttactgctaccgcaaatgattgctaccgccgcacctagattaaaatcctcttaccttacagtcctcgagattggcggtgcttttgggtatagattccaaaaattaattgaatatcttggacttaccacactcattattactgatttagatagtgtgttctgtacacctccagtacaggatgaaacagacactccggctgcaaatgatgatggcgaggagcctgatgatgatgaggaggaagaacaggccaacacagaaacaccaggaaaggcttgtatcgccagtcatcctggagctatgacctctaatcaaacacttcggcagtggttaccgaaatgtgacaccgttgccgctttatgggaagcaacggaggaaatgaaaatacaacgccgcacagctgagtgtgacgctttggttcgtgttgcttaccagtgccagacaaatgttacatggaaagaggaaacactggcacttgctggccgtactttggaggaagcttttgcgcttgaaaatctgccctggtgtcaagatgtgagctgcaagccactcaagctacgtattgccagagcggtaagtatggatctactgcctctggcccagcgcattcacaagcgcgtgcaatcaaaaagcttcagtaaaactgattttgccctgaatttacttcttaaaaaaccggatgaatggtctgtcccaacatacattgctgaagggttgaaatggcttgaagctgaaatagccccgccggaactagaaattacagaaggtcaggaagagggtgctgaagatatgtccgtcgatctgactgagattgatggtgggagggttgcatga

SEQ ID NO: 77291 - DNA, 1878 bp, Yersinia enterocolitica
atgaccagtcgcattggtagccctgatacacaggcagatcttgatgttcgtgcttgtttggataactcgccgccatgttcatttgtcatggtggcaggtgctggctcagggaaaacaacatctctgattaaagccctcgcacatttggctggtacccgtggttctgatttacgtcgtgccgggcaaaaaatatcctgcattacgtatacagaagtagctgttggtgagattgccgctgacgttggtaattcacagttatttcatatttcaaccattcatagctttctttggtcggtcatccgaccttttcatttagatatcgcaaagtgggtcgtagcgcgaatacatgaaaaaatagctgaaaagcaagcccattatgataggcccagaacacaagctaaaacaaaatcccgtcttgaagatgaaattgcctatctctctgctcaacttgagtacattgatgatgttgataaatttatctacgggacaggaagtaactatgctaaaggtattttagggcacgatgatattcttaagctcgtacctgcttgtattgaggctcatccccttttgagaaggattgttgccaagcgctttccatttgtttttgtcgatgaaagtcaggataccgatccggatgtgatctctgcgcttcgaactattgctgatgacaatcctgacatgtgcataggattttttggtgatccaatgcagaaaatctatatgagcggagcaggtgccgttccgttaagtgatgggtggtctgaaattacaaaaccagagaatttcaggtgtccgacgtctgtacttggtgttatcaattcgattcgtgcttctggggatggactccaacaaattcgtggccgaacaactatcgtagatggcgttgaacaaactgtatcaggcacagtgaatcttttcatcttgccttcgaatgtggaacgaagtgcctatctcacatctgtcagacgttaccttgcaaatgaaactagcgatgaacaatggttaagtgatacacgcgaaggtgatgttcgtcttcttgttttggtgcatcgtatggcagctaatcgactggggttcccgaatttatttgctgctcttactgataaagcaccgatgagtttgagtgaaggggtgaacgatgggtcagcttggccgcttcgtccgtttgtccagcatatacttccaatttttgctgcggctcaggcaaacgatcaatttcagattatgtcgattatgcgtagcgagtgcccaaagctggagccgttacgactacatggtcaagctatggtggcagttttaaatgaactacaacaaggcatcgatggcctgcttgaactgttggaagaaggatcgcaagcaacagttcgggatatattgctacatgttaaagactgcgagctgctacgtcttgacgatcgtttttacaatcatttaagtgatgagcctgtgaatgatggtaatgatgacttcgaaaatgttcagaactacctaagatgcaatgcccatgaactttgggcataccggcgctacctttcagaggaatcaccttttgccactcatcatggtgtaaaaggtgcacagttcgagcgcgtattggttgttattgatgatgaagaggctcgcttcagccaatattcgtatgggaaatattttcagtacattcccttatccgacaatgatctagccaatcttgaagagggtaaagagtcagtactcgaccgtactcgtcgccttttttatgtatgttgctcccgtgcactgaaagacttggctgttgtcatctttgttcccgatgttgccgccgctcaagcggcaatcgttgagaaaaatttattcccagcatcggcaattctaggggcgcacgatctgggctag

SEQ ID NO: 77292 - DNA, 1950 bp, Yersinia enterocolitica; identical to SEQ ID NO: 75154

SEQ ID NO: 77293 - DNA, 1779 bp, Yersinia enterocolitica
atgatggataaccaattcactgatgaacaaattaattatattaattcaagtattgataagcacatttttttggaagcttgtcctgggagtggtaaaactgaggtcgtagctgccaaactagcgaaggaaatatatatctggaataaaagaccaggggggatagctgtactttcttttgctaacagtgctacagaagaattaattaaaagagtatcaaaatactgtaatgcagggcaatccatatatcctcatttcattggcacatttgatagcttcatttacaaaaacatagtatctccattagcaacagaattaaccaattacacagggactgggaacgatgctacaattagaattgtagagccatctgcacaaatggggtacagaacaaaatatagttacgcaaaacgtggcaacatccatgcccatcactattctcacaaccttagaagcggaggtataatttttgagactggggatgcagtatttgatagagctttaaacaccctcaagttagagaattggcaaattcaggatttttcagagacaaaacgtagaatgctagatggaggtttcgcgacttaccgagatattgaatatttggctctgcgagctcttaatgaggaaagatttaagcattttgtcagtttattagcaaagcgctatccgctgattataattgatgaatgccaagacttatcggaagaacaattaactattttgcaaatactattaaatcaagggacaaaattgcaatttgtcggggatctttatcaagctatttatggttttcgtgaagttgaacccgcgagagtaaaaaagtttattatcgataataattttaacattttagaattaacgagaaattttcgtagctgtcaaaatattgttaatctttgcgcaaagctcacaggtcgtaacaatatcaacggaaacgtaacttggctagatccaagatgcttagtcgttcaataccaaaatagcccaactgaactcacagatacctttgacagcatatgtaaaaattataataaaaacgtaatcgtctcaagaggccactcaaatttattaaagtttcaaacatccgaaaatgaattgaacaatatccaaaaacttgccctggccattagtatttataactcagacgatatgagtatgttaactaactccttgcaactattctcggaatttattcgccatcatcttaaagaaagctgcaaaacaaaagactttaattgcccgtattcggttaattcttctatttcctggcgtaaatttctgtgtgcatcattgagctacatgaatagtattggacttcaaaatatgaatatttcatggtctaattgggttaagcaagctaaatcttcaattcgtatactatcaagtaaagaattttgccctaccaatatttccgcagcattagcaccattagctagtgtaaacttaacttccccatcaggcttagccaacaaagaagtaaactctactttaggtacaatatccgaatcaacatcgctgtatggaagatctactattcatggtgctaaaggtgagacccatgatgtaacaatagtggtatcttccacccgttcaggtaaagattcacattggcttgactggctcagcgatccaaaaagtgaggctgccagattcgcttacgtggcatcatcaaggccacagcattatttaatttgggctgtgaaaacccttaaaaacgaagaaaaaaagaaacttgaggctattggttttactgttcttccactcgatactaatacatga

SEQ ID NO: 77294 - DNA, 1641 bp, Pseudomonas aeruginosa
atgcggttggacagcatcagaggtgtcccgcgtgtgcgatatcgcctggatgcgacgctaggactggacgatgagattgagcagagcctgcgctacgtctcggaagtcgatgaggatggaaatccgatagccacctctccagtgccgcgtgatgagcgtaatcaaatccaggtgcactatctgccagcacgtcgcgatccagcagagcacatcacctacgggactaatgcgctcttgggccgcctgttgcgagccgtgaactggactgagcagcgtgaaaaaatcagccagttgtctgcagatatttctgcaagcctcagtaccaatcaatcggtcatcaacctgggtgacggtattgctaatgcctggggcaagctgcacaaaggcaagtttttcaaagacccgagcttgacctttgttagccatgagatcgaagcattactgcgacacctctcggtttccttcacccctggtcatggcgaacagcaagtagatttttcgcggctcagtgacggtcagaagtcgatgctttacctgaccttggtgctcacctctcaggcgattggcagggctgtgctcaagggcgatgacgattctttcgacttggataagctaaagcctgcagtgttcaccctagtagccctagaagagccagagaatagtctgtctcctcattacctgggccggatcgtatcgtcgctcaaggcattggtgctgggcaaggatgcctatgatgcgcaggcgatgatcgccacgcatgcgccttcaatgttgcggcgcgttgagcctgagcagattcggtatcttaggcttgatgactcgcgctgcacggccgtaaccaagattacgatgcctccgaaggctggtgaggcctacaaatttgtcagggaagcagtgcaagcctttcccgagatatatttctccaggctggtagtgctgggtgagggcgatagcgaggaaattgtgttgccgcgattgcttgctgcagaaggactcatggtggatgaggctgcggtgtgcatcgcgccattgggtggtcgtcacgtaaatcatttctggcgtcttttgagcgggctgaaaatcccttacgttacgcttcttgatcttgacgtggctcggcacggtggcgggtgggggaggatcaactacgttgcaacgcagctcaatctccattgcccaaaccaagggtatatgcctgatgaccagcttgcgaaactcccaagctgggataaccccaaatataaaattctgaaggttgagaaaagtcgggagtggaggaactacatcgctgagcttgaaccgtttgacgttttcttttccagtccaatggacttggacttttccatgctctgcgccttcccacaagcctttggtgtcgaggccaaagaccttgtggcaccgaagatcggccagctcagatccgtgctgggtgatagcttctttgacgaaaaacagtacaccgtgactgagcgtaagcatttcgccgcgtaccacaggttgttcaaggtcgacagcaagcctaagtcgcacattgaggccctttcgaatctctctgacgatgatttgagggagggtatgccaccctcgctcaagcgactggtcaagcatgtgatcaaaatggccagggagcttcacgaatga

SEQ ID NO: 77295 - DNA, 1668 bp, Pseudomonas aeruginosa; identical to SEQ ID NO: 74521

SEQ ID NO: 77296 - DNA, 1641 bp, Pseudomonas aeruginosa; identical to SEQ ID NO: 77294

SEQ ID NO: 77297 - DNA, 1668 bp, Pseudomonas aeruginosa; identical to SEQ ID NO: 74521

SEQ ID NO: 77298 - DNA, 1641 bp, Pseudomonas aeruginosa; identical to SEQ ID NO: 77294

SEQ ID NO: 77299 - DNA, 1668 bp, Pseudomonas aeruginosa; identical to SEQ ID NO: 74521

SEQ ID NO: 77300 - DNA, 1932 bp, Pseudomonas putida; identical to SEQ ID NO: 76046

SEQ ID NO: 77301 - DNA, 1659 bp, Pseudomonas putida; identical to SEQ ID NO: 71685

SEQ ID NO: 77302 - DNA, 1716 bp, Desulfocarbo indianensis
atgcggctgagcaaggtcacaatcgacaattttcgcggcattgaacatgcggagatcgagcttgatcgcgacgttacggtactcattggcgaaaacaatacgggaaagacaagtgttctggatgcccttcgcttgtgcctcgacacggtgaagtccgacaagacctgtaatttctcggaattcgacttctaccggaatgagacgcggagtggtcttccgtcgtgccaaccgataagcatcactctcagtttcctcgagtccgaagagtatatctggcccgagcacatcacgcagggactcaacgacgtgattgtcggcagcgactactcagcgatcaagtttcgtataacggcgagatacgatgcggatgctggtgaacttgtccaaagctggagctttctcgatgacgccgacaacgaaatggtcggcagggcggggattatcaaggacctacggcgactgaggccgttcttcttccagacagctttgcgcgcggcgaaagatcagtttcacgggcagtccacctattgggcgtcgtttctgagaaacaaggacatcgacgatgccacgcggcgggcgctggaagacgagctttgccaggtcaaccagaagattgtgaatgcccatgctagcttcaaagatgtaacagatgaggtcaaacgcatctccggcctgatggccgtggggcaggccaatgccgtaaccgtagacccggtaccagccgacgtctacaaggcgctcaggtacacggacgtgaacctgttgactacgtccaacgccaagattccgatccgtagccatggcgaggggacgcagagcctatccgttttgctcctgttcagcgcctatctcaagacacgccttcaggccgacgtcgatagacacgctgaaccgatcatcgccattgaagaaccggaggcgcatttgcatccaaatgccgtccgagccgtgtggcatttgctgcgtgatttgccgggacagaaaatcgtggctacacactcgggggacatcctgtcagaggtgcctgtcccaaaactccgaaggatgaatcgcaatggcaatgccacagaatgcaaggccatccctagtgggctgttgtctgatgaggaactgcgcaagttcaatcaccatgtccggcggaatcgtggcgaattgctgtttgcccggtgttggctgcttgtagagggagagacggatgtctcggttttcgctgaatgcgcagacatccttggtgtcgatcttcacgggaagggtgtccgtattgtagagtgcagccaggctggaggtccgggcatcttcataaaggtagctgatgcactgggtatccactggcatttggtcgcggatagcgatcctggtggccagaaatacatcgatgacgcgaaggcactcctgaacggcaggcttgaagcggatcacatatcccccctgacacatcccaatatcgatatccttctatgctgctgtggttatggacagccataccgggatggggttggcccacagaaagaggtggagctcgcagggctgaccatcgactgtccgcagtattgggagaaggtctacgagatcgtcaacaaggcgaggaggttctccaagccggaagccgctatgaagtccatccttgatatgaagacggtagggcccagcggcgtgcccagcgaactgaagaacattctcgaccgcaccactgccttgggagagccgagcccatga

SEQ ID NO: 77303 - DNA, 1881 bp, Desulfocarbo indianensis
atgacaatcaccattgacatgctgaacgccaaccagaggctggccgttgagtggagtcaagggccgttgctggtgttggcggggcccggctcaggcaagacggccgttctgactttacgcattgccaatttaattacgaacagccccgatgagagttttcgaatcctgggactcacattcacggtcaaggcggcaaacgagatgcagaaccgcatccgtgaactcaccggcgacgagccacgacgcatcaagctctgcacattccactcgttctgcacagacttgctacgtcaacacggaagccagttggggctgaaacctgacttctccgtgattaccgacgacaaagatcgcctcgcgattctcggtgaaatgggggccagtggtgaagttgagattgacgatcccgaggattctctgaagaagatcgacacaatgttcacacatgggatcacagcagacgaactgcctgggtacttcgattccggacaggaggacacgtgtcgtgctttgcaggatgtgtttagaggctacctggccagactagtcaaggataaccagctcgactttggctcaatgcttcacttcacccgggaactacttgcatcgaagccgcgcatcgcgagacaggtcaggatggtctaccgatatgtttgtgtcgatgaattccaggatacaaacctcgcacaatacaaagtgctgcgactggtctccccagactcgtcctctaacctattcgtcgtagcggatgatgaccagatcatctttcagtggaacggtgcggacccgaagcggctggaagagctgaagcaagactacacaccccagattatccaattgccggagaactaccgctgccccgctgaagtagtgaagattgcaaaccagttgatcgcgcacaaccccggtcgggcgtcagctaaacttgatggcgtctcgcagaacaaagtggacggaaccgttaaactgcaagagttcgcaaacttcgaagacgaggtcgccggactgatctctgagattgagcccattccaaggaatcacagggaaacctgcctggtcattgcccgcagcaacaaactgctaacacatgtccagactgccatgcatgagaaggggctgagcgcggaaattgttagcaggcaccaggacttcgtcagcccgctggtgcagctgatgtacttcgccatgaaggtagccaacgcacccgactctcgtagcctactcaacaagctttgctctgcagcgacattggtgaacgacatcattgtctctgctgaggatgtctcggccaaagcaaaggttgaggaccagaccccgcttcgtgcgttctttgcccttgcagcgacaagtgaaacccttcagccttttgctgataagggaaaagagctgttatgtgattcgctggagtatgccagtttcgtggatgcgtgcttccaattgttcgaccaacttaacgtgactgggggggagaacgaagcataccccgactactcggatgacaaacagaactggcaacgcatcgcccaggagattcgccagtcacatggtgaaggcgtcagtctccacatcttcctgcaggaaatggacctatctccgaaggctaagcccctatctaaggattgtgtgcgactacagactgtccatacggccaagggtgtggagttcgacaacgtattcgtgatcggactagcagaggagcagttcccgacttatttcgcgatcaagaaaggtgagttagcgatccgggaggagcgccggaattgtttcgtggcaatcacgcgctcctcacagaacctgtatctgagttatgcccgaagctacttcggatgggacaagcgcccttcgagattcctggacgaaatggggttactggatgcctaa

SEQ ID NO: 77304 - DNA, 1989 bp, Bacillus sp. FJAT-27238
atgagagccccttatatttcacgagttaaaattaaaaattacagaaatttcaaagaagtagatgtgaatttaagtgataaacaagtcattattggagaaaataacgtaggtaaaacaaatttcattagggcaattcaattgattcttgatccccaattttctgatgaggatagatatttagatgagacagatttccatgatgggctcgtatcacctatggagaatggtgaagaaattgaagttattatagagatcaagagttttactcacatcaagaatatattatgtcaaattagtggggcaactatttcaactgatccagagacacttcgcattacctatagatattatcctattaaggatgatgaaggtaaaatagttgattacgattacattatttttaaaggagaaaacgaagctgaaagatttgggccttcagatagacgatatttaaatcttaaggttattaaacctattcgagatgtcgattctgagatgaaaaattttaaaaagtctcccttaaactcgttacttgaacaatatgatatcgataaaacggatttagagttaattgctgctaaattaaatgatcaaagtgatgaagttctttcctttgatgaaattagagatttagaaactagaataaacaatcgttttacaaaattaattaatgtggatgcaagttcaaatatcaacctaaaaacaaatgaggttaaccctaatcgcattctaaataccctgaaattagtactgggtgcaaggtcggttagcgaaacaagcctcgggttaacaaatattctatatatatcattagtgatactgtcaattgaagataatactgttccaagtttacttaagaaagttagactagaggaactccgtgtaaatgatacttatggaattttagaaaaatgttattcattaatggcatctggaaattatatacttactgatgatctagatgaaaaattatttgaagagctctatatgtttttagaaagcggcgatacaagtagtaaaggggttactatacttgcaatagaagaaccagaagctcaccttcatccgtcattgcagcgtattgtttacaaagatttgtttagtagaagctcgtattcagttctaatgactacccattctactcatatcacttctgttgctccaattgaatcaattgtgcatctttttaaacaaaataatgaaacaaatgtttgttctactgcaaatcttggattaacccctgaggagtatatagatttatcccggtatatagatgcaaaaagaggtgaaatttacttcggaaaaggtatcatcttagtggaaggtatagcagaagaatacctaatacctgaattttctaataaaattaattttccattagattataacggtattattgtatgtaatattaattcaactaatttcaaaccttatataaaatttttaaacgctttaaacatcccttttgtggtagtaacagatggggatttttatgaggtgatagatggtgagagaaagtttcataaaatgtatgacaaagatagtagtaattcctacggagttttaggtcttgaaataataagggatactctaattgaaatagggataatcataagtgaagagcttcctatcggcctaaaaaaccagatgaaatttttcagggataaaggctattatatgggtgtttatacattagaagtagagataatgaagagtgcgaaaaatcaacaagcaaaagatatcatctgtaactgttttgaccaattaacatccggaggaagtaaacagaaggagaattttaagaacgaattgaattccggtgactattgggcatgccttcgtaaaattgagtctagtaataatggcatcggtaaaggacgttttgcccaaaggttcacttccttatgtactgatcaacatatacccatctatattaggaaagccattcaatatataagttcgaaagtgaatgaaagaaccaatgaataa

SEQ ID NO: 77305 - DNA, 1812 bp, Bacillus sp. FJAT-27238
atgaataattacgaaaagaaactaaatgagataaaaaatgatgagtttcaaaatgctgcttacgtgtctgataaaagtactgtagtactagcagggccaggtagtggaaaaaccacagtgctcacattgaagataatgaaattactaaaggaaaaaatagctcctccgcaaggtttagcttgtgtaaccttcagtaaggaagcagcatatgagttcaaacatagattaaaaaaattagggtaccaaagaagagataatgtatttcttggaacggtacactcattttgtattgcagaggtgattgggaaattcggacacttatatccaaaatatcaaataccactaccaatcaaaattatctcgcagaaagaaaaaaggaaactttttaagcaaataaaggatgaactagaaataggtgacgaaaatttaagtctaatcgaactggataaggagaggagtcaaaacataaaaggtaaaaccagggtagaaggttctaaaaatgaattagctattaagattgcggaagaatatgaacgaaggctacattcatctggctatactgactttgttagtattgttaagttttcaacactccttatacaaaacgagagttatgttagaaaatgtctagaggcaaagtttccatggattttggttgatgaataccaagatttaggaagaccgttacatgaaatgattctttcattttttaatcacactaaaataaagatttttgcagtaggtgatccagaccaatcaatatatggttttgggggagctgctccagactatttaatagaattgtatgatttaataggaatagaaagagtacgtcttatcacaaattatagaagtacgcaagatattattgaagcatctgaactagcattaaatattgcagaaaaacgtaattatgtagctggcttaagaaaagaagacgctgaattcgactttataacttgtgaatacggaatggagcaacagtatcaatatgttgtagaaagtataattccaagttgtattgaacaaaatataaatttagaagagatagcgttattagttggctataatgatgagattaaggatcttagtttagtattagagaattataagattcctcattatattgcgaaacatgattttgaaagaagcgaaattgttctgtggcttgaaagttgtgcgatgtggactgtagaccaatcgaaggcatcctttgaagagatatatgaattctggaaaaggttacttgagtctcataataaagtgattacaaataaattagatattaaagaaagacgaaaagtatttgatatactaacaaaaaatcagcaactttcctctaatcttcttctctggttgagatcaactattcaacaatttgaacttaagtccttgttagaattatcaacaaaataccctgaagaagctgagaatttagataatctattaaaagtttgtgcagatggtaaattcaaagaatacgatgttagcaaattcactgaaattggtaaacctgaaaatcaggtgacagtgacaacacgccactcatcaaaaggattagagtttgaggtggttgtactactaggaatggaagaaggaagatttccatactacaatatactcaatgatactgataaacttgctgaagcccatagagtcttctttgtgtgtgttagtagagccaaacgtgtttgttatttaattagatcacttaggcataccatttatcctagaaggggtaacccctttgaaaaaaggtatccaaagtcaaggttttggtccattctagaggaaaaatacggggaagcatga

SEQ ID NO: 77306 - DNA, 2139 bp, Klebsiella pneumoniae; identical to SEQ ID NO: 72908

SEQ ID NO: 77307 - DNA, 1800 bp, Klebsiella pneumoniae; identical to SEQ ID NO: 72909

SEQ ID NO: 77308 - DNA, 1779 bp, Planococcus sp. L10.15
atgtatatcagcaaagtgaaaataagtaattttagaaattttaaagaaacagaagttgagttaggcaaacaaatggttattgtcggagaaaataaaattgggaagtctaacttcatacatgcactaagacttgttttagatccaactttatctgaaacaagtcgtgtattgcagatctcagacttttgggatggtctaactcgaccattagatgatcaagaaataagaatagaaattgaacttactgagtttgaacaagacgataaattaaaaaccgtcctttctgattttttagtggaatcttcaccattaactgcaggcttaacatataagtttttccctgaagatgaggacggaaataaaatttataactttaaagtttatggaacaaaaacagagaatatttttagttatgaacaaaggaaatggttacctcttgaagttttatcaggattaagagacaccgagagcgatctatcaaactggagaaaatctccattaaggcctttgatagaaagagcaatcgaaaccacagataagcaagaactagaggacgttgctaaagaaattactcgttcaacagactctttgaaagaattggacgaaattgggtcattaactaaaagaataaacaatcaattagaagatattgtaggagataggcatacgatagaaaccagtctaggtttttctcctgccgatgcttcaaaactttaccgtgcaataaaaatgttcattgatgatggaaatagaggaattaatgaggccagcttagggtcttccaatttgctgtatttagtgctgaagcttctctctttagagcaatatgtagatgaaaatgaacgtgctcatacttttttagctattgaagaaccggaggcacatctacatcctcatttacaaagattactttataaatatttgttgaatcacgataagttggtagttgagggctctcaagagcagactcatattcatagcgtttctactattttaacaacacactcaccccatattgtaagtgttgctccattgaaatctatcgttttattaaaggaaacgtatggagaagaaaaatccacaaaaatagtctctactgcaaaaatatctttagaggataaagatgttaaagatttagagcgctacattaatgtcactagaggagaagttcttttttctaaaggggtagtattagttgaaggtgacgcagaagaatttttattaccttcactatcagaattgcatggaattgaccttgataaacatggaataactgtatgttcggtatctggcaccaactttcttccatatatcaagcttttaggaagtggaggattagacattccttttgtaattcttaccgactatgatccaagagatgagctacctctaattcataaccgcttaataaaattattgaattttataaataatggagataaatataaagatttagaaactgaagatttaattacctatggagaagaagttggtatttttacaaatagccacactttagaaattgatctatttgatacaatgtctgaggaaattacagaaacattaactgaattgacaacaaatagtaaagcaattagtagagcgcaagggtggagatctgcatgtagcattggaggagatgaaaaaagttttctttccgacatagaaaatatcggtaaagggagatttgctcagagattatcgactaatcttacacataactcgattgttcctgaatatgtgaagggagctttagattatgtcattgctagagtttga

SEQ ID NO: 77309 - DNA, 1827 bp, Planococcus sp. L10.15
atgtcattgctagagtttgataaagagctttatagaggagcgactaaagatttagcaaataatgaagaacaacaaaaagtttatgattctactgggaattgcgtggtacttgctggtcctggtagtggaaagtctaaaattcttacattaaagttagcaaggattttgaatgaagatgttgaagaaccacaaggagttgcttgcttaacttataataaggaatgcgcaagagaactgaaagagaagctttccaatttaggaatcaatgaatcatctagagtttttattgataccgtacattctttttgtttaaatcatgtcattaaaccatacaaacatttagtacatacgaatctgccaaaagaaattaaagttgctacttcaaaagaagtaagagaaacaatgtttcaaacttacaacttaactatcggaaaaaatgaacggtatactccaagctggtcaacagcgtttaacgtttatagaagaacatttatagataggaaatcgtctgaatggaagactaatgacagtgatatagcagtatggattttaaattacgaaaattcgttaaggcgtcaaggattaattgattttgatgatatggttttaaatggattttggatgattgaggaaaaccaatggattcaagggttacttaaagctaagtttcctgttatagcagttgatgaatatcaagatttaggagtatctttagatagaataataagagttctctgtatagaaaacgacattcgtcttttagcagttggagatcctgatcaatcaatatatgggttcacaggagctcaacctatactattgaatgaccttgctcatcaatcaggtgtattaaaaatacaactaaaaaagaactatagatcaaaagggaatattgttaaagcatcgattgcttcgttattagaggaaagagacttcgtttcaagcaggaatggggaaggaagtattaagttttatgatattaggaatggtatagagacgcaatgtgattatatttgcaaagacatagtccctaaaattcttgctgcgaatccttctagtacactcggagatattggagtattatacatagataaaaatgacggagatcgaattgctgagaaagtatcaaaagaaggtttgcaatttattagagtggatggaaatgctccttacaataaaaataaactaactatgtggatagaaaattgtgccatgtggtgctcaggaggatgggtaaaaggaaatccccaactttataaaattgagggtactttcagttcatttttttcaaactcgaatatttctgaagaaaacctagatgctaaaaaattaaatttatctaaatttttatttcaaagtagagatgttgaacttaaactaagtgattggcttgatgagtttaataatgatattgtttccgagctgttagattgtttcactgaagaaccaagtatagtagaggaatataagaaattaaatgaatcggcaaaaagtggacagttaaaggactttaaagtttcttctttatcccgacaagttggatctaaaagtcatttgaatttatatacgttacacagttctaaggggctagagtttaaatatgtcattatgtttggcttggagcatggaaggataccttggctgaatgttactgaagaaaagacaaatgagtcaaggagattattttacgttggcctaactagagcaaaggatgaaattcatttgttatgctcaggatggtactatgattacttcgatagacgtcaaaatcacggttcatctaattttgtattagaacttaaagaatttgtagataataatttgtaa

SEQ ID NO: 77310 - DNA, 1980 bp, Escherichia coli M114
atgctaataaaaaacgttgaaataaaaggttttaaaagctttgactgtaatgggcaaaatataagacttgattcatttacaagtcttattggaggtaatggtaccggtaaaacagcactattgttagctttagtaagaatgtttagtgtcaaaagtgcagacagagtaattcaagcagatgacttccatgtccctcctggtgagaaaatagatgatcaggatgaacgtaattttactgtaagaataagattcgaattcgctgatttgaaggacgggcaagatagtacggtatcagatttttttggacatctggtttctgatgggaaagatgaaataccatactgtatcgcaaaattaagagctaaatggataaaaactaatttggcaggaggtgatattgaaagtgaattagtttgggaagtaggagatgaggagagaaaaatatcagcttatgagaggtcaagaattcatattcattatgttcctgcctatcgagatccttctacgcaattgaaacaaaccgcaggaaccataatgcataggcttattaatgcagttgagtggtcagatgatatcgcgcataaaattggggaaggtgcaagatcgatagatgagcaatttcaaaatgaaagtggaattaaaaccataacgacatcattagcaaaaaactggaattcattatttactggagggtattttgaaaaccttaaaattcatccggtaatgaatggagtggaggatgtattaaagcatattgatactgttttcttacccacacctgatacacaacctctatctacagatagacttagtgatgggatgaaatctctattttatttatctctcgtaaaatctgcattcgatatagaaagtgatattattgaaggtctaaatgaaaatttagcgatttcaatagatgcgcttgaaccacctgatttaacattaatacttattgaagaacccgaaaaccatctttcaccacaatattttggcagaatcattaatctatgtagagctatatcttcaaataaaagggcgcaagtctttttgtctacacattctcctgcactattaaatagggttgaaccagaaaatatacgctattttcgtttgtgtgaaaatcaaaaaacgatagttaaaaatattatattgcctgaagaagatgataatggagaagagattgatgaatttacttatgttaaagaggctataaaatctcacccggaaatatatttcgcgaaagtggttgttttgggggaaggagacagtgaagaaatcgtaatacctaaattagcagaagccaacagcattggtcttgataattcattaataacattcgccccattaggtggtaggtatgtgaaccatttctggagattattgagtgagttatcaataccctatataacgctccttgattatgataggaaaagaggaggtggtggttatgggcgaattaaatatgctctaaaacaattgatttcaacgggagttgataaaagcgatattcttaaattacaagatggaaaagttctttcagataaagaacttgatgaaatgcacacttgggtagaagatgaaactacagaaaattcatggattaatgtgttaaaaagatatggtgtatttttctcttacccatatgacttagattggattatgcttgagaaattttatgaggaatataaatcatttgcaccaagcagaggcggcccaacaataccttcatctcatgatgataattacacgcaaaaaacacaagctgcaatagcatcagtattaaaaaaagagtctatcgatattgatatttcagaatttacggatcatgaaaaatatttttggtatagatatttgtttcttggtagaggaaaacctctttcacataactatgttttgaagaaaatgaatagagatgatttaaaagaaagagcaccacaggtgttgaatgacttgatcgaaaaaattaaggggatactctaa

SEQ ID NO: 77311 - DNA, 876 bp, Escherichia coli M114
atgaaatggattagtgatgataactggtctcttaaagatatagaatcagtagagcaggaggctatgcttgttataaagaattttagtgatgatagtttagtagttgcagggccgggagcaggaaaaacagaattgttagcccaaaaagcttgttttctcattgaaacaggaaagtgtaataataaaaaaatactttcattatcctttaaaaaagatgcagcgaataatcttagagatagaatatgttcgagggtaaataaaggttattcaaggaaatttgaatcaaccacatttgatgctttttgcaaaagtatcttagacagattctatagtacattacccgatgttatcaggccgactgctgactatgaaataatttcaaacttaaatacgaaggaatttgtacaagaaataaaaaagaatggaattggctttgcgggactaacagaagatgatttgcacagagtacagcctaaacggtttgaggaaaattatatattacggaatagaagttctgacgatcatagcattgatgcaagaattacaagattcgcgtggaaatatttattgaatggaaaatcaagattgacatttaaaatgataagcgttttagcaagtttcatattagaaaaaaacaaacctttatctaatgctatcatttcaacttataaatacgtatttgttgatgagttccaagatacaacatatttacagtataaacttttgaaaacgttatttttaaatacagatatcaaaataaccgctgtaggtgatgataagcaaaggattatgggatgggctggagcattactaactatttttaaagattttaaaaaaagatttcaatattgcttccgaaaatcaattaataagtaa

SEQ ID NO: 77312 - DNA, 1992 bp, Vibrio parahaemolyticus; identical to SEQ ID NO: 72330

SEQ ID NO: 77313 - DNA, 1752 bp, Vibrio parahaemolyticus; identical to SEQ ID NO: 72331

SEQ ID NO: 77314 - DNA, 1992 bp, Vibrio parahaemolyticus; identical to SEQ ID NO: 72330

SEQ ID NO: 77315 - DNA, 1752 bp, Vibrio parahaemolyticus; identical to SEQ ID NO: 72331

SEQ ID NO: 77316 - DNA, 1710 bp, Vibrio sp. VPAP30
atgtacattcgtacggtcgaaattgaaaactaccgagccttcaaaaactttgagattaaactttcaccgctcagcctaattatcggtgaaaatgaagcaggtaaaaccaaccttttcagtgcacttaccctgccacttaacagcaacgatattagcttcaataagaaacgcctctcagtatcagatatcaatcgggaggcaatcaaaaacttttaccaagctatcatcgacgacaaggaagatgatgaagtcaaggctttgattccaaaggttcgaattgagatcgagttcactgagccaaagaacataatcgaagaaggcgttgttggaaagtggataatcggagaagaagccgacgatagctataagattcgctatgacttcagacccaaagatgcagatctctttgtgaagacagccaaggatctactcgaaggcatcgaggacattaaagatactcgttggttcaaccttccaattgagctgtacgactacgacgtaacgcaaagcaataatgggttaaaggtcagctattctgatctaagactgatatctatcaactcgattaacgccgaacgtgacgactttgcagagagtaacactcagaaatcaaacgacattctgactaagatgttgatctcgtcgcttgtggatactgacaaggccaaaatcaatagcgcgtacacgtcattctttgacgccatagaaaacaccgagactttcgagaagatcgttactcctgacccagactttgaaaacttcttcgacgagattgtagataagcttgaatgtattcccaacttaccaaacttaaaaagcatcctgtccaatatcaccctgaagtctggtgaaagctacttatatcagcgtggccttgggtatcgtaacctcgtatacatctacctgttatttgagttttttaaaggcaacaagaatgctctcaacctttgttgcatcgaagaacctgaagcacatctgagcgtgaacaacctgcgcttcgctaccgacttcatatataaaagtacgcaaaaaggtggatcatctctacaaactcttattagctcccacagcccacaggtcatcaataaacttgagctaactaacgtgatcgtattatctggaaatgatgccatccacctaactgatagtaagaagcagctcacgaactaccttcgtaaacgaccaaacttcgacatactaaaactgctgctgagcaacaagaccgtgctcgttgaaggtaccaccgaagagatgctcatcaacgccatcctctatcgtgacaacaaaaacgttagcagtcttgaagtaatatctatcgagcagactggctttacgacattcatggacgtttggctgcaagtcaacaaaggcaatactaaaaagaagctgagtatcattcgagatcacgatgagaatgaaactaccaagaaaaaacatgaaaaatacgatatagacaacgacaatattcgagtaagaaccaccaccaaatatacgctcgaagatgatcttgcagaggctgatggaaaccttgaccgcttaaacacactgttcaaaaagaagtacaaaacctctgacgaaatggccaagttcctgaagaaaagtaaagccgaaagaatgcttaagattgccgactcgatcttagacgaaaagaacgaagatccgatcaagctacccaaacacattcaagaagctttggatttcatgaaatga

SEQ ID NO: 77317 - DNA, 1476 bp, Vibrio sp. VPAP30
atgattgaagttcaaatagcaggagcaggtgcaggtaagacttatggtctagctaagaagatcatcgcacactacgacctaaagtcgcataaaaagatttttgccatcacttatactaacagtgccgcgaagaacatctcacaagcgattatcaaacacctaggatacctgccagaaaatatcgtggtttgcacagttcatacgtttctattgaatgagatcatttacccttactctccattcgtactaaatgagaagcatactacctcctcacgctgcaaaacgttctcaaactttcctcctgggaagactgaagaacaaaagaaacgagaaacggcgagtaccatcagtagactaaagaagagtggtgttatacacgttgacgaaacctatgccgctgcatggagagttgtcgacgaaaactactcaaaacacagcagccagaagaaaaagtctaaagttaggaaagttcacaaaatcctaagtagcgctattgataagattttcctcgacgaagctcaggatcttgatgaaactgctcttaaagcctttcaaaaaatcggtgagctttcagttgacatctacatggtgggcgaccctaaacaagcaatagattatccaaaatctttcaaaggctggctagctgcgaacaaagccaacgaaaaagttaaagtgcttccgaatataacgacttctcgtagggttcctcagagaattcttgatatctcaaataacttctgccccagaggtcaagcgcaaactagcttgtctgaagttgaaggacacctaacatacataacttctgaagatgagcattacgaccaagttctcggtcatcatattaagaatggaagcttagttagcatattcagaaaagaaggtaattactcaaccaagaaagcgggatctctccccgagtttgacccagaggtagaagggctacttacagtgaagtttcctgaatacgaagaaggtgtggtcatatactcattgcagcgctattttgcatccttgttatccaacaatgacaacaagacatcaatacgtatatttcttaataagctagagattccgtacgaaaaagaactattcaagaagctttgtcgatcagcagaacaatacggttcatccaaagataattcagccaagtacgcaatcagtagcatccaaataaccaagggcttagagtctaaggtgtgtgttttgatcttaactcccgcgattttcaagtacttaatgcaagatggcgttgaaaaattcaacaaaacttggaatatggtctatgtcgcgttgactcgtgctcaatctgaactagttgttgctgtagatatggatttacttggtaaaaaatataagcatgatgatattgttgagggccttaaatctattgggtttgaagagctaaacccaaatcatccaaaccacaaaaccgaagagaaattcggaagcataatatcgaccaaagataattactga

SEQ ID NO: 77318 - DNA, 1956 bp, Acinetobacter sp. V2
atgcatatatgttcactaaaagtaaaaaattttagagctattgaagatgctgaattaaggctagatcctaatcataaacaggacttaactttaattgttggaaaaaataatagtggaaaaacttcatttattatgatttttgataaatttttcaagaaagatgataattttaattttcatgatttttcgacacatctaagagaaaaaatttatcaaattgagagtacgagtattagtgatgtcacaatcggtttgtttttagatatatcatatactgaagatgataatcttgaatacttgtctgaatttattgttgatttaaattctgttaataatacagtaaaattatattttgagtgttcaattgatgaggatagattaagaaaggatcttataaatattgatcaaaaacacaaaaaaagatttattgagaaaaatattacttcatatctagtgaaaagcttatatgtatatgaaaatgaagatgatttaaaaaatactaataaacaaaaattaattaaaaaagaagttggagaagtgagtaatttaattaattatcaagttattcatgcaaaaagaaacttagcaagttctgaatccaaagaaaaatctagtctaccattatcaaagttaagtactgaatattttaataaagaaaatatattcagtgaaaaagactttattgagattaataacgcaatattagaaatggatgaaaatttaaataatttatatgatactcattttgaaggtttttttgaaaatgtaaaagaatttttgggaagtacggctttaaaagtattatctaacttagagtctagacaaataatgtctaatagttcaaaagtggtacaaatagataataaggaaaattttttacctgaatcattaaacggacttggaaatttaaatattttatatttattattacaaattgatttaaagaaacgtttttttattcaagaaaatagaagtattaatttgttttttattgaggagccagaagctcatacacatccgcaaatgcaatatgttttttcaaaaaaaattaaaaaaattattgctaagattcctaatttgcaaacttttatttcaactcattcctcgcatattgtgtcacaatgcaattttgaggatataagatattttcacaataagaacggaagtgtgaaaataaaaaatttctacttagagttagaggaaaaatataaatttcaaacggacttttttaaattcttaaaacaatatattacgctctattctgctgaattgttttttgcagaaaaagttatatttatagaaggggtttcagagaaaatactacttccttattttataaaaaattttgatgaaagtaataaggagaaagaaggctatattccaataacttctcaaaatattacatatattgaagctggagcaaatgctaaagcttttcagcatttattagaattttttgagataaaatcacttattcttactgatattgattctgttagtggagtaaatggaaatgcttgttcagttgaattgggaacatcgagcagcaatgcaacaattaatcactatttaagttatgatgaaaataatccagattggtttgaacttttaaaaaatagaagtattaaaattgataatgaaaatataaatgtattctatcaaacagaagaaaatggctatcatgcgagaagttttgaagattcatttatagctattaattataagcttgtaaggaagtataaagaaaatatatcaggattaaaaaataaagaaaaaatcattgataaagctgaaaatttttatgatcttacgaacaatattataaaaagtaaatcagagtttgcatcttcaattttatttctagctttggtcaatagtgataaaaaggatgatgaaagaattgaatggaaaactcctaaatatatttatgaggcattagaatggatcaatcaataa

SEQ ID NO: 77319 - DNA, 2094 bp, Acinetobacter sp. V2
atggatcaatcaataaaagcaattgaaaacgttaaagagattatcgtaaataatcagtttaaagaggatagttttagaaattttgtattgcaaggtggggcaggtagtggtaagacagaatcacttaaggaaattattgaatttatttctaataattatccaaatcaaaagattgcttgtattacgcacacaaatattgctgttgatgaaattaagtcacgtattaataatgataaactctgggtttctacaatacattcttttttgaacgtacaaataaaaaattttcaaaagaacctacaggaagttttacctaatattttttttatagatagtagtgatatcaatgatcatgatgactataagaagaggtatgaaaaattatcaaaattaaattataaacttaagaataaaaaaatggataaagtagtgggtaaaagagattatgatagaaatccgagtgattataataattttttattagatgaaataaagcagataaatttttttattaaggaggaaatttcattaaaagattttagagatataaagtataatgaaactgtatttgattcaattagtgagggcactttctctcatgattcactgattaagatttcatttttacttgccgaaaaatataatttattttcaaagattgtaagtgataaatttgattatatttttattgatgaataccaagatactgataaagttttagttgatttattattgaaaaaaattgcaacaaataagaaaaccactataggtttttttggcgattcaatgcaaggtatttatgatggtataggtagccttgatgattatattagagattttaatctaatttatatacctaaagatgataattatagatgttcacagcaagtaatcgattttttgaatgtaattaggaatgatgatattaaacaaaaagttgcacttaaaaaggatgaaaatttagattcacgacaaggatctattaagatatatgttaataaaattcaaaaagttaagtctaatagtcgtcaagaagataaagaaaaatatattgctttaataaatgatgcaataaaaagagtaaaggagaaaaatgatattttaaatcttaacatcttacaattaacaaataaatccatagcatcggaattaaaattttcaaaattatttaaagtgtttgaagatagatatcctaacttggagcaggctcagatagaatctaacttgaaaaaaatacaaattaaagatgtaattgatttaattgttttgtataaaaataatagacataatgatttaatattaaagcttaagaaaaataatttaaaaataaaaaaattagatgataaaaataatattattgcgctattaggttatatttgtgataatgagttaggcttaaatgaagctatcgattattgttatgaaaataaattacttataaagtcgccacaaagaatcgactttgaaagtcaatcaaagcatcattttgaacaatgtgattccgatgctgtatttaaagaattaaaaattcttttagaaagagataacctaaatacttataatagagctaagcaacattgcacatatgatatcgatcaatatgattatgatgattttatgagttcttatagaaagattaaatttagtgattcactgttatcaaatgacttacttctgagtgaggttttaaattattttaattatattgacgaaaattcaaattcagatgaaaaatatttaacaatgcataaaacaaaagggacaggtattgaaaacgtttttgttgtattagaagaatttttctggagtaattattcatttagaagtatatatgatcctagttactctaattttaaagttaaagaaaaatctgagaagttattttatgtcgcatgttctcgtacgataaaaaatctaatgattttaataaactatgaaacgaataatgagttggaattgatacgagagaaatttagaggttttgaaattactgaattaaatagcagtgatagtaatctattgattactaattcagatgtcgaaaactttactttacctgctgtcatagaaagtaatatacaagtaaatatctaa

SEQ ID NO: 77320 - DNA, 1701 bp, Trabulsiella odontotermitis
ttggaaatatcatctctgaaactcaaaggttttagaaactttaaagatgcacacatcaattttaactcaaatactctggtcatcggtgccaatgatgttggcaaaagtaatatgttgcattcgctaagaatgctattagataaaagtatatcagattcagaaattgaaccaaatgaatttgattttcatttagaaaatggaaagtcatgtgaagtatttgaaattattattcattttaaagatatcaatgaagatgcagtactttcaattttgaaagggaatgtcagtgactcaggtgaatcgttcattaagtatattgcacaaaaaaccgatctcagctataaactttttattggtgagtctttagagtctttacaagaaattaactctcgctattatcttaaatttgttaatttaaaatatattcaatcacaacgagatttagagagatttattcgtaaagaaaaaagacagcttttaaaaatcgcacagcaatccttgaactctgaagaaagagaagaagatgacgatttgttaggagagataagtttagatttacagtctattaatgataaaatatctcagcttatatatgtagaaagagctacaaaagatgtcaacgatgagctaaaaaaacttgcgcatcattactcagaatattctgtgcaactagatactggggcaattggaataaatgactttattgacaacctacaacttggagctaatacaaatggttctaatgtcatgcttggaggagacgggcgaaacaatcaaatattattagcattatggaaagcgaaaagtattaaggaacatgacatcgagaacgaggttattttctatgttatcgaagaacctgaagcacacctacatcctcaccaacaaagaaaactagctgattatttgatagcagaacttccaggtcaaacgatcatttcatcccactcaccacaaatagctgtaaactttgaacccggctcagtaataaggttgcttgaccgggctggacacacagtagccgcaagtgaagggtgttctaacgatatttcagatggctgggaagggatgagctatcggatgagtatattgccagcagaatcgtttttttcaaatggagttttcttaatcgaagggccatcagaagttttattttaccattctttagccgaaaatttaaacattgatcttgactatttaaatatttcactggtttcagtggacggaatatcattcaaaatttacgtagctatactagatgctttagagatcccatgggtaatgcgaacggataacgatatatctaaacttaaagatcaagacaagtggcaatattcaggtataaaccgatgtttagatatagccggtttgaaaaagtttgaacatagcgacatacaaatagtacctatcgatactctgaccagcggtgattggcaaacagtttctgaagaaataaataaatgcgggatatatttatccaaaattgatttagaaactgatttggcagaagaattaaacgcaccgattttaaacgctttaggtaagaaaaatgaccaaagtgcgatagaatacttacaaaagaaaaaagcattaagaatgcgtgagcttcttaaagatataaaaaaagaccttcacaaacttaatgccggtgaattagttaaaccgttaaaccatcttgtaaaaataattagaggtgaataa

SEQ ID NO: 77321 - DNA, 1626 bp, Trabulsiella odontotermitis
atgagtactttctcaccaacacctcaacaaacattagccattgactatactgaaagcatggtaataacagcatgtccgggaagcggtaagactacggttataaaagaaaaaataagaaatattaccgacggccttccagagcataaaggggtcattgcaattacttttacaagaaaagcaagttcagaactggaacgtagatgcaaggcagatggacacgatgtaaaaaatagcttctttggtacgattgatagcttttgcttaaatgatataattattccatttctttcaagaatatggggtggcaaaccaagagaatgcaaagtattaaagaaactggaatctccttttaaccatttcatagaaaaaaacttctctggcactccatcaattactaatatcaacgaggaccctggatataaaaaactatacgatgagggaatattgtggatgggatcattctcagccttagctttaaaaataattaatgaatcacctgctgcaaagcgatatatcaaagcaagatatagccatatattcatagatgaatatcaagattcatctttatctcagcatgaactatttctaagaataaacgagcttggcttatgctccattgctgttggtgatgtttggcaatcaatctatgaatttagaggagggaattcggagcttcttttagaattggtaagtaatacagagtgctttaagcattttgagataaatttcaatcatagatgccacccatcaataagcaattatgcgtcaagattgcttgatccatcatatattttactacctgcggatgagataagaatattcaggcgacgacttgatggaaatcttaaagatgctgctgttacgatttccccctggatttcaggatggctgagtagcggcgaatggaagttagaaaaagcaaatcaaatagcaattttagcaagaaaagaaaaatcactaatattattctgttctggattaaacttaaacttcagactttatgttgacacacctctagataaaattggtactgattgctcagatctatacaaagatctgttagcatacaaatacggctctataagtacagcacaagaatttattaacaaagtttttgatggggttatagtagatgataatactatgtttttactaagaaaaaaaataaaagcaattagaaatgaattaaaaaatgaagatttaatacatatgtttcatgacatcgcagatattttagggataaattcaactgaacatattgatggagctttaataagaacaatctctgacgatattttagtcaaacaattcaaaccattagatgataatgagatacaagtaatgacccttcataaatctaaaggactggaattcaaattagtatttcacctagatctagatgaatggtctttcccatatagggaatataacagcgaagacagacatacagctctatacccgacgcttcaacaagaaattaacctccactatgttggtataaccagagctgagaattgttgtatacttattaattcatctcttagacaaaatgcatctgggaattttaaaaatgcagacgaatcatatttttttaaactaccacaattagataacttgtatagttaa

SEQ ID NO: 77322 - DNA, 1767 bp, Bacillus licheniformis; identical to SEQ ID NO: 74898

SEQ ID NO: 77323 - DNA, 1377 bp, Bacillus licheniformis; identical to SEQ ID NO: 74899

SEQ ID NO: 77324 - DNA, 891 bp, Lactobacillus farciminis; identical to SEQ ID NO: 75998

SEQ ID NO: 77325 - DNA, 1554 bp, Lactobacillus farciminis; identical to SEQ ID NO: 75999

SEQ ID NO: 77326 - DNA, 1926 bp, Virgibacillus pantothenticus
gtgtatatttcaaagttaagtgtaaagaattatagaaatttcggtgatgggaaattctctataccgctgaaaccatttactgcaattattggcgaaaataatatcggaaaatccaatcttattgattgcattggtttggtcttaagtcaagatattacaatgtttaagaaaaggtttttagatgtggatgacattaattctaaaacaaaagaaacttttaaaaagtctattgtaaatcttatagatgaagaaatcattgacgaatcaaaaataaaatatcctgatgtaagggtagaattaatttttgatgaactagatgaggaacaacttgcagtcgtaggtgattggttctatgaaaagacctttactaaggctaaacttacttactggtttaaaccaaggactggttttaaaagacaagaatgggttgagagacaagtagcgaatttgagggaactgttaaccgagggtaagataaaaaaggaagaattatataatcatgttgaatttcctattgatcaatacgaatatgtaatttttggcggaaataacccaacaaataaatgtgatccatacttcttaaaaatgctgaaattagaagtccttgacgctttacgtgatgctaaaaaggaactagtcgcaaatggagaatacaaattattatatcgtattttaaatagaaattatgaaaatgattttattgagattcaatcactacttggcgaccttaatcagaaattaagggaaaataaaaaattagatacaattaaaagagaactaactgcatatttagatagagtttctttatctaatccaacagagttaaacagtattgactttaacttttcttctccagaggtaaatgaaatattaaagaaattgagtattgtgtacggtgagaatcctgtttcaattgaaagaaatggattaggtaaaaataatttattatttatttctctagtgctctcacatttagcctctcaaacggatgaaaaaaccaaattggcatttagagtaattggtattgaagaaccagaagcacatttacatccacatttacaaacacatctggcgaaaaatttaagtaaagttattaatcttgagaacaaagaggttgaaaaggacgaagaaaaagagaaagaaaagaaggatacccagattatcataacgtctcattcaactaacataactacctctattgatctaaataaccttgttatcctttatagggataaggaacaaataaaatatcattatatccttgacggcttttcaaataaaaaagaaggacaagaccatataaaatatttgaaaaaatatttagatgcaactaattcatcaatgttttatgcaagaagacttatacttgttgagggcacatccgaacaaatattagttccactgttttttgaattacatgctaaaaaaacattagagagtattggttccaatataatcaacgttaatggagttgcttttaagcattttctggaaataattaaaaatggatattttattaagtgtggtgtattaactgatagagatgcaggaaagaaaactgaaaaaagggctgaaaaacttaaagagcactataaggctaataaggacgtaattgctgtcgaaatcaacgatgatacctttgagaaggaactaattaagtataacctgaagggcaagggaagagagttgttattaagggtatttaaacaactccatccaattaagtataaagaagtagaatcaaattgggagaatcagattaatatcaacacttacttcgaaaatattgaaaatgataaatctgattttgcatttgctttacatgaggaattgttaaaagatagtacaggcttcaaaattcctgattatatagtttctatcttcaaatttataatgggggaagaaaatgaagagaaaactaagtaa

SEQ ID NO: 77327 - DNA, 1179 bp, Virgibacillus pantothenticus
ttggggaatgaggaagtcaaaaatcgtttttgcaaccgcataagatatctatttgtagacgaatttcaggattcaacaagtacccagtttgaaatttttgatacattaaggaaggggaaaaattctgaagtaatactggttggtgatccagaacaacgcataatgaattttaggaacaagcccagaaaaaggaagggctctacagaagttaagaaagttcctttgcacccaatagatgccctacaaaaaaagaaagtttattctattagtaaattgaattataattacagatctagtgaaacaattgtgaattttatcaaccattttcattgtagtatacaacaagaatggtcaaataaagaaattacttcaaagaatccaattatgttcattcaatcaaataaattaaagtcaattatatctgattttaacaatttatgtgtaaaccacaattattgtaaagaggtacctagaacaagattttttttagcacatgaaaacaaagtttacaaaagttatagaaaggttgatttcaaccaaaaatcgaaagaaaatttaccgttgttcacatgcatttatgagtatttatcagccttttacaacataaaaataaatcaattacccatagtattagaattagatgaaattgaacttagaaagaaatgtctattattgttatatgagataaattacaatatagactttgatttggaggattttgtagatttcgtagagactacatttaatcgtaagagggaagaggcaggcgaggaagttaagttcaatataaaagaaagaacaaaaagattcgtagacgaactctcaaatagaatgactgccaatgatgaggggatggctaaagaatcaaatgaataccaagactcttttcttacgatccataaatccaaaggtctgcaggccgatgcagtactagttgtagcaaaaaatgaaaaggaacttttaatgtggctagaggatgataaagaaaataggcttctcgaccagcaagataaatgtagattaggttatgtagcatttagtagaccgaaagagtttctttgcatcgcatgtcttacccctcttagcaaagagacaatagaaatacttaacaaatttaatgtaaatctttattcacctatagaggaacaagaacaactttctcttcagaatatgaattaa

SEQ ID NO: 77328 - DNA, 1704 bp, Escherichia coli
atgtatattgataatgtgtatttaaaaggatttaggaactattctgatagttttgtaaaatttaattattcaactcttataattggtggtaatgatgttggtaagaccaacttattgtattcattaaggattttgttggataaaagcttttcggatttagatttagaacctaaaaatagcgattttcatattgatgcgaaaggaaatcagtgtgaagagttagaaataataattaattttcgtgaagtaaaagaggatgctgttctctctaagttagcggggtatgttagtgatgatgcacaaacatacatcaaatataaagcatacagagctactcttgattacaagttatatataggccacaaagaatctgaaatggatgagattagtggtagattttatcttaaatatttaaatttacgctatgtgaattcacagcgagaccttgctaaatatatatctacagagaaaaaacatttacttcggcttgctcaagaaatgagaaacgaggagcaagtgcggaaggatgaaaatactttgaatgaattaactaatttattaaatgatgtcaatgataaggtaaaagaaataagctacgtctcgaccgctacggaagaattgaatgatgagttaaagaaattatcatataacaatgaaaagatttctgtaatgctcgattctggagcaattggtgttgatcagtttattgaaaaattagagttaagttcaaatacaaatggaaaaaaggtaatgcttggaggggacggatttaataaccaagtattacttgcattatggaaagccaagagtgtacgcgagcacgatactgaaaatgaagtggttatatattgtgttgaagaacctgaatcacatctttatccgcaccaacagagaaaattatctgagtatttaattagtaaattgccggggcagtctctagtaactacgcattctccgcaaattgccattaattactcaccagattcaataattaaaatttgctcttataacggtgagtcttacgcagcaagtgaagggtgttcagattgcataagtaatgcctggagtggaatgggatacaggatgagtatacttcctgcagaggcattcttcgctaatgtcgtattcttggtcgaagggccttctgaaatgttattttatcaggcccttgcaaaagagtgccaaattgatctggatttctttaatataagcatattatcagttgatggcgttcaatttgaagtttatagaaaaattcttgatgcacttgagattaaatgggttgctcgtacagataatgattcgtctaaagttccaaggaaaaaagagtggcaatattcaggtttaaatcgagctttggctctatgtggaatggagccactaaagaatgaattaacggaaatatctcaagttcaaagaatagagaaacacaaaatttataaagataagcttaaacatcataatatatttgtttcaattaatgatctcgagggtgatattggcgttgagttaagtacacagctgaaagaatatgtaggtgttgataatgaggaaattgctgctgattatttaagaggaaagaaagcaataaggatgcaagagttcttaggtgaatactcttatgcactgaaaaatatttcagacggtgaattaattcaaccccttttaactgctgtaaaattggctacggaagagttgagatga

SEQ ID NO: 77329 - DNA, 1623 bp, Escherichia coli
atgatagattttacccatgagcaaaaagcagcaatagattacccatctagtatggtattgacggcttgtcctggaagtgggaaaacagcagtaatcgtagagaagattgtccgtgacttggtagaatgcaaggaatatcagggtgttattgccatatcgtatactaacaaagcaagcgatgaactgaaaaagagatgtttaaaggctactccaaattcaaaatcaagcttttttgggacaatagataaattttatttgactgaagttattttaccattcattaagcaattatggggaagagttgatgacttacatgtagttaagcttaatgagttagcttcttctgaaaaagataggctttctgctttttttaatgtcgaattcatttgtgaaaaaattaatgagtatgattttaaggatataaaggaactatacgccaatggtattctaatactggagtttataccattgcttgcattttatatattgcgtaactcgttagcatgtcgccgatatatcgctaaaaaatacacatctatatatattgatgagtatcaagatgctggatgtgttcagcatcttctttttctttatcttttcgaacttggagtaaaagcggttgcagttggtgatgctgaccaatccatatattcatatgcgggtaaaagttcgaaatacttaatgtctttactggatgaaaaaagtggctttgccccttttaaaataactataaatcatcgttctcattcatctatagttaattatgcttctcgattgttgaatgaacactgtgacttgttaataacagatgaaattcgtgtctacagaaaaactgttaatggtactcaatgtgaaatagctaagtggattgatgctaatattaacaatattaaacgaaagttcaatatttcaaaagaaaaagagatagcgatacttactgcaacgaatagttctgtcgctttagtatccggccttataaactccaaagcaagagcatatcttgatgatgagctgtctgtactcggtggagatgtgtctctcttattaaagaatcttttgaattatcgatttaataaaacgattacagcacaggctatcattgaaagtttaaattacaaggtgctagagaggaatgcaataagaaagatgaggggggttattagagatgtgagagattctaatgacaaccaacttattcctgatttacgtaaggcagtaaaattattaatcaacgctgatatttctgctaaccatattgatgccattaactcaatcttacacaataaaatgatgctaaataattacttaccagttagtgatgatgagttacaaataatgactttacataaagcaaaaggactagagttcgactttgtttttcatttggatctttatgattggatattaccgcgaagggaatatataaaacattgttttgatgaggttttttcacattatgagcaatgtctgaatcttcattatgttggagttactagggccaaaaaagctgtggtattaataaattctactgagcgtttaaattatcagagtgaattaaaaaaagcgaaaccatctcagttcttgtcactaaaaggacttgaaagtctgtataaaaaaatttaa

SEQ ID NO: 77330 - DNA, 2088 bp, Streptococcus pneumoniae; identical to SEQ ID NO: 73976

SEQ ID NO: 77331 - DNA, 1818 bp, Streptococcus pneumoniae; identical to SEQ ID NO: 73977

SEQ ID NO: 77332 - DNA, 2088 bp, Streptococcus pneumoniae; identical to SEQ ID NO: 73976

SEQ ID NO: 77333 - DNA, 1818 bp, Streptococcus pneumoniae; identical to SEQ ID NO: 73977

SEQ ID NO: 77334 - DNA, 2088 bp, Streptococcus pneumoniae; identical to SEQ ID NO: 73976

SEQ ID NO: 77335 - DNA, 1818 bp, Streptococcus pneumoniae; identical to SEQ ID NO: 73977

SEQ ID NO: 77336 - DNA, 2070 bp, Streptococcus pneumoniae; identical to SEQ ID NO: 76276

SEQ ID NO: 77337 - DNA, 1818 bp, Streptococcus pneumoniae; identical to SEQ ID NO: 76277

SEQ ID NO: 77338 - DNA, 2100 bp, Streptococcus pneumoniae; identical to SEQ ID NO: 73328

SEQ ID NO: 77339 - DNA, 1818 bp, Streptococcus pneumoniae; identical to SEQ ID NO: 73329

SEQ ID NO: 77340 - DNA, 2088 bp, Streptococcus pneumoniae; identical to SEQ ID NO: 73976

SEQ ID NO: 77341 - DNA, 1818 bp, Streptococcus pneumoniae; identical to SEQ ID NO: 73977

SEQ ID NO: 77342 - DNA, 2088 bp, Streptococcus pneumoniae; identical to SEQ ID NO: 73976

SEQ ID NO: 77343 - DNA, 1818 bp, Streptococcus pneumoniae; identical to SEQ ID NO: 73977

SEQ ID NO: 77344 - DNA, 2070 bp, Streptococcus pneumoniae; identical to SEQ ID NO: 71808

SEQ ID NO: 77345 - DNA, 1818 bp, Streptococcus pneumoniae; identical to SEQ ID NO: 71809

SEQ ID NO: 77346 - DNA, 2088 bp, Streptococcus pneumoniae; identical to SEQ ID NO: 73976

SEQ ID NO: 77347 - DNA, 1818 bp, Streptococcus pneumoniae; identical to SEQ ID NO: 73977

SEQ ID NO: 77348 - DNA, 2100 bp, Streptococcus pneumoniae; identical to SEQ ID NO: 73328

SEQ ID NO: 77349 - DNA, 1818 bp, Streptococcus pneumoniae; identical to SEQ ID NO: 73329

SEQ ID NO: 77350 - DNA, 2088 bp, Streptococcus pneumoniae; identical to SEQ ID NO: 73976

SEQ ID NO: 77351 - DNA, 1818 bp, Streptococcus pneumoniae; identical to SEQ ID NO: 73977

SEQ ID NO: 77352 - DNA, 2070 bp, Streptococcus pneumoniae; identical to SEQ ID NO: 71808

SEQ ID NO: 77353 - DNA, 1818 bp, Streptococcus pneumoniae; identical to SEQ ID NO: 71809

SEQ ID NO: 77354 - DNA, 2088 bp, Streptococcus pneumoniae; identical to SEQ ID NO: 73976

SEQ ID NO: 77355 - DNA, 1818 bp, Streptococcus pneumoniae; identical to SEQ ID NO: 73977

SEQ ID NO: 77356 - DNA, 2088 bp, Streptococcus pneumoniae; identical to SEQ ID NO: 73976

SEQ ID NO: 77357 - DNA, 1818 bp, Streptococcus pneumoniae; identical to SEQ ID NO: 73977

SEQ ID NO: 77358 - DNA, 2088 bp, Streptococcus pneumoniae; identical to SEQ ID NO: 73976

SEQ ID NO: 77359 - DNA, 1818 bp, Streptococcus pneumoniae; identical to SEQ ID NO: 73977

SEQ ID NO: 77360 - DNA, 2088 bp, Streptococcus pneumoniae; identical to SEQ ID NO: 73976

SEQ ID NO: 77361 - DNA, 1818 bp, Streptococcus pneumoniae; identical to SEQ ID NO: 73977

SEQ ID NO: 77362 - DNA, 2070 bp, Streptococcus pneumoniae; identical to SEQ ID NO: 71978

SEQ ID NO: 77363 - DNA, 1818 bp, Streptococcus pneumoniae; identical to SEQ ID NO: 71979

SEQ ID NO: 77364 - DNA, 2004 bp, Staphylococcus aureus; identical to SEQ ID NO: 75344

SEQ ID NO: 77365 - DNA, 1926 bp, Staphylococcus aureus; identical to SEQ ID NO: 72299

SEQ ID NO: 77366 - DNA, 2088 bp, Streptococcus pneumoniae; identical to SEQ ID NO: 73976

SEQ ID NO: 77367 - DNA, 1818 bp, Streptococcus pneumoniae; identical to SEQ ID NO: 76075

SEQ ID NO: 77368 - DNA, 2088 bp, Streptococcus pneumoniae; identical to SEQ ID NO: 73976

SEQ ID NO: 77369 - DNA, 1818 bp, Streptococcus pneumoniae; identical to SEQ ID NO: 73977

SEQ ID NO: 77370 - DNA, 2100 bp, Streptococcus pneumoniae; identical to SEQ ID NO: 73328

SEQ ID NO: 77371 - DNA, 1818 bp, Streptococcus pneumoniae; identical to SEQ ID NO: 73329

SEQ ID NO: 77372 - DNA, 2100 bp, Streptococcus pneumoniae; identical to SEQ ID NO: 73328

SEQ ID NO: 77373 - DNA, 1818 bp, Streptococcus pneumoniae; identical to SEQ ID NO: 73329

SEQ ID NO: 77374 - DNA, 2100 bp, Streptococcus pneumoniae; identical to SEQ ID NO: 73328

SEQ ID NO: 77375 - DNA, 1818 bp, Streptococcus pneumoniae; identical to SEQ ID NO: 73329

SEQ ID NO: 77376 - DNA, 2088 bp, Streptococcus pneumoniae; identical to SEQ ID NO: 73976

SEQ ID NO: 77377 - DNA, 1818 bp, Streptococcus pneumoniae; identical to SEQ ID NO: 73977

SEQ ID NO: 77378 - DNA, 2088 bp, Streptococcus pneumoniae; identical to SEQ ID NO: 73976

SEQ ID NO: 77379 - DNA, 1818 bp, Streptococcus pneumoniae; identical to SEQ ID NO: 73977

SEQ ID NO: 77380 - DNA, 2088 bp, Streptococcus pneumoniae; identical to SEQ ID NO: 73976

SEQ ID NO: 77381 - DNA, 1818 bp, Streptococcus pneumoniae; identical to SEQ ID NO: 76075

SEQ ID NO: 77382 - DNA, 2100 bp, Streptococcus pneumoniae; identical to SEQ ID NO: 73328

SEQ ID NO: 77383 - DNA, 1818 bp, Streptococcus pneumoniae; identical to SEQ ID NO: 73329

SEQ ID NO: 77384 - DNA, 2100 bp, Streptococcus pneumoniae; identical to SEQ ID NO: 73328

SEQ ID NO: 77385 - DNA, 1818 bp, Streptococcus pneumoniae; identical to SEQ ID NO: 73329

SEQ ID NO: 77386 - DNA, 2190 bp, Streptococcus pneumoniae; identical to SEQ ID NO: 71982

SEQ ID NO: 77387 - DNA, 1794 bp, Streptococcus pneumoniae; identical to SEQ ID NO: 71697

SEQ ID NO: 77388 - DNA, 2088 bp, Streptococcus pneumoniae; identical to SEQ ID NO: 73976

SEQ ID NO: 77389 - DNA, 1818 bp, Streptococcus pneumoniae; identical to SEQ ID NO: 73977

SEQ ID NO: 77390 - DNA, 2088 bp, Streptococcus pneumoniae; identical to SEQ ID NO: 73976

SEQ ID NO: 77391 - DNA, 1818 bp, Streptococcus pneumoniae; identical to SEQ ID NO: 76075

SEQ ID NO: 77392 - DNA, 2088 bp, Streptococcus pneumoniae; identical to SEQ ID NO: 73976

SEQ ID NO: 77393 - DNA, 1818 bp, Streptococcus pneumoniae; identical to SEQ ID NO: 76075

SEQ ID NO: 77394 - DNA, 2004 bp, Staphylococcus aureus; identical to SEQ ID NO: 75344

SEQ ID NO: 77395 - DNA, 1926 bp, Staphylococcus aureus; identical to SEQ ID NO: 72299

SEQ ID NO: 77396 - DNA, 2088 bp, Streptococcus pneumoniae; identical to SEQ ID NO: 73976

SEQ ID NO: 77397 - DNA, 1818 bp, Streptococcus pneumoniae; identical to SEQ ID NO: 76075

SEQ ID NO: 77398 - DNA, 2088 bp, Streptococcus pneumoniae; identical to SEQ ID NO: 73976

SEQ ID NO: 77399 - DNA, 1818 bp, Streptococcus pneumoniae; identical to SEQ ID NO: 73977

SEQ ID NO: 77400 - DNA, 2088 bp, Streptococcus pneumoniae; identical to SEQ ID NO: 73976

SEQ ID NO: 77401 - DNA, 1818 bp, Streptococcus pneumoniae; identical to SEQ ID NO: 73977

SEQ ID NO: 77402 - DNA, 2088 bp, Streptococcus pneumoniae; identical to SEQ ID NO: 73976

SEQ ID NO: 77403 - DNA, 1818 bp, Streptococcus pneumoniae; identical to SEQ ID NO: 76075

SEQ ID NO: 77404 - DNA, 2070 bp, Streptococcus pneumoniae; identical to SEQ ID NO: 71808

SEQ ID NO: 77405 - DNA, 1818 bp, Streptococcus pneumoniae; identical to SEQ ID NO: 71809

SEQ ID NO: 77406 - DNA, 2088 bp, Streptococcus pneumoniae; identical to SEQ ID NO: 73976

SEQ ID NO: 77407 - DNA, 1818 bp, Streptococcus pneumoniae; identical to SEQ ID NO: 76075

SEQ ID NO: 77408 - DNA, 2088 bp, Streptococcus pneumoniae; identical to SEQ ID NO: 73976

SEQ ID NO: 77409 - DNA, 1818 bp, Streptococcus pneumoniae; identical to SEQ ID NO: 76075

SEQ ID NO: 77410 - DNA, 2088 bp, Streptococcus pneumoniae; identical to SEQ ID NO: 73976

SEQ ID NO: 77411 - DNA, 1818 bp, Streptococcus pneumoniae; identical to SEQ ID NO: 76075

SEQ ID NO: 77412 - DNA, 2088 bp, Streptococcus pneumoniae; identical to SEQ ID NO: 76178

SEQ ID NO: 77413 - DNA, 1818 bp, Streptococcus pneumoniae; identical to SEQ ID NO: 76075

SEQ ID NO: 77414 - DNA, 2088 bp, Streptococcus pneumoniae; identical to SEQ ID NO: 73976

SEQ ID NO: 77415 - DNA, 1818 bp, Streptococcus pneumoniae; identical to SEQ ID NO: 73977

SEQ ID NO: 77416 - DNA, 2004 bp, Staphylococcus aureus; identical to SEQ ID NO: 75344

SEQ ID NO: 77417 - DNA, 1926 bp, Staphylococcus aureus; identical to SEQ ID NO: 72299

SEQ ID NO: 77418 - DNA, 2100 bp, Streptococcus pneumoniae; identical to SEQ ID NO: 73328

SEQ ID NO: 77419 - DNA, 1818 bp, Streptococcus pneumoniae; identical to SEQ ID NO: 73329

SEQ ID NO: 77420 - DNA, 2088 bp, Streptococcus pneumoniae; identical to SEQ ID NO: 73976

SEQ ID NO: 77421 - DNA, 1818 bp, Streptococcus pneumoniae; identical to SEQ ID NO: 76075

SEQ ID NO: 77422 - DNA, 2100 bp, Streptococcus pneumoniae; identical to SEQ ID NO: 73328

SEQ ID NO: 77423 - DNA, 1818 bp, Streptococcus pneumoniae; identical to SEQ ID NO: 73329

SEQ ID NO: 77424 - DNA, 2100 bp, Streptococcus pneumoniae; identical to SEQ ID NO: 73328

SEQ ID NO: 77425 - DNA, 1818 bp, Streptococcus pneumoniae; identical to SEQ ID NO: 73329

SEQ ID NO: 77426 - DNA, 2088 bp, Streptococcus pneumoniae; identical to SEQ ID NO: 73976

SEQ ID NO: 77427 - DNA, 1818 bp, Streptococcus pneumoniae; identical to SEQ ID NO: 76075

SEQ ID NO: 77428 - DNA, 2088 bp, Streptococcus pneumoniae; identical to SEQ ID NO: 73976

SEQ ID NO: 77429 - DNA, 1818 bp, Streptococcus pneumoniae; identical to SEQ ID NO: 76075

SEQ ID NO: 77430 - DNA, 2070 bp, Streptococcus pneumoniae; identical to SEQ ID NO: 71808

SEQ ID NO: 77431 - DNA, 1818 bp, Streptococcus pneumoniae; identical to SEQ ID NO: 71809

SEQ ID NO: 77432 - DNA, 2088 bp, Streptococcus pneumoniae; identical to SEQ ID NO: 73976

SEQ ID NO: 77433 - DNA, 1818 bp, Streptococcus pneumoniae; identical to SEQ ID NO: 76075

SEQ ID NO: 77434 - DNA, 2088 bp, Streptococcus pneumoniae; identical to SEQ ID NO: 73976

SEQ ID NO: 77435 - DNA, 1818 bp, Streptococcus pneumoniae; identical to SEQ ID NO: 76075

SEQ ID NO: 77436 - DNA, 2070 bp, Streptococcus pneumoniae; identical to SEQ ID NO: 71808

SEQ ID NO: 77437 - DNA, 1818 bp, Streptococcus pneumoniae; identical to SEQ ID NO: 71809

SEQ ID NO: 77438 - DNA, 2100 bp, Streptococcus pneumoniae; identical to SEQ ID NO: 73328

SEQ ID NO: 77439 - DNA, 1818 bp, Streptococcus pneumoniae; identical to SEQ ID NO: 73329

SEQ ID NO: 77440 - DNA, 2088 bp, Streptococcus pneumoniae; identical to SEQ ID NO: 73976

SEQ ID NO: 77441 - DNA, 1818 bp, Streptococcus pneumoniae; identical to SEQ ID NO: 73977

SEQ ID NO: 77442 - DNA, 2100 bp, Streptococcus pneumoniae; identical to SEQ ID NO: 73328

SEQ ID NO: 77443 - DNA, 1818 bp, Streptococcus pneumoniae; identical to SEQ ID NO: 73329

SEQ ID NO: 77444 - DNA, 2100 bp, Streptococcus pneumoniae; identical to SEQ ID NO: 73328

SEQ ID NO: 77445 - DNA, 1818 bp, Streptococcus pneumoniae; identical to SEQ ID NO: 73329

SEQ ID NO: 77446 - DNA, 1833 bp, Streptococcus pneumoniae; identical to SEQ ID NO: 76548

SEQ ID NO: 77447 - DNA, 1818 bp, Streptococcus pneumoniae; identical to SEQ ID NO: 76159

SEQ ID NO: 77448 - DNA, 2088 bp, Streptococcus pneumoniae; identical to SEQ ID NO: 73976

SEQ ID NO: 77449 - DNA, 1818 bp, Streptococcus pneumoniae; identical to SEQ ID NO: 76075

SEQ ID NO: 77450 - DNA, 2100 bp, Streptococcus pneumoniae; identical to SEQ ID NO: 73328

SEQ ID NO: 77451 - DNA, 1818 bp, Streptococcus pneumoniae; identical to SEQ ID NO: 73329

SEQ ID NO: 77452 - DNA, 1794 bp, Streptococcus pneumoniae
atgaagttaacaaaaatggttattaataattttagatcttttggggagtgtcaagcaattaactttaataatcaaactgtactgatagggaataatagttcaggaaagacaactgtattacaggcattgagtaagttgttttcagataaacaaagtgaaagaatcattcgaaaaagtgattttcatttaccaaaagggttaaaacctggtgaaaacacaagaaatctttttatagaaactatttttgagtttgatgaacttgctggaactgtctatggaccagccattccaacatttttcgagcactttacagtttctcaagatggtgcaaaaccttttttacgaatcagattagaatcttcctgggaagatgatggaacagttgaaggaagtattgatactcaaatttattatatttcatctgatgaagatactattagagatgaagacaaacatcgtgctcctagaaaggatttggataaaattagggtactttatgtaccagcttcaagaacacctgagaaggagttgggtaatgcttcaggtagtatgttaagtaggctggtaaatagtataaattggactaaagatgagataaatgaaattaaagataaaattgatgagttgaataacacctttttatctgaaaatggagcattaactcagattaacaatgagattcagaaatcatgggaattatatcatgaagataaccgtttttctcaagcagagttaattattaattcttctgagatggcggcagcacttagacagattgccttaaaattttcaccaacaaccactgaagaagcatttacagtttcagatctaggagatggactgagatctattttttatttttcacttgttgattcgatacttgatattgagttagaaattaccaaagaccgtgaagagaatcctgataatccaagatttaagttggtacctccaatactaactatcttagcaatagaggaaccagaaaatcatattgctccacatcacattggaaaactagtaaaaaggtttaagcaattaagtaataatgataactctcaagtaattttaacgtcacattccccagctattgtaaaaagaattgaaccagaagaattgaggtatttaagaattgaaagtaatggcagagttcttcaaaccattgtttctgatataaaactacctcaagatactgatgaatcttataaatatattaaaggagcaattcaagcatatcctgaactatattttgccaagttagtagttctaggtgaaggtgatagtgaggaactgctattaccaaagttttttgatttacttgggaatgagatagatagctctcagatttcaattgtgcctttaggaggaagacatgttaactatttttggaaattattaaattctctaaaaatacctcatattactttactagactttgataatgaaagatacggaggtggttgggggagagtacaatatgttatccaacagttactaaaaataggtattgcgcgtaatgatttagtgagaatgaaagatggtagaatattggacgatcaagacattgctagaattagttctaatcagatatctgatatcctctctcaaccattgttatcctggataaatcatttagaaaaattcaatgttttcttttctgcaccccttgatattgatttcttaatgttacagtattataaggattattatctggaaactttatctaccaatgagggacctgttgtttcttatactgacgaaaatagtgacaataaaaaaataaaaaataactaa

SEQ ID NO: 77453 - DNA, 1818 bp, Streptococcus pneumoniae; identical to SEQ ID NO: 76075

SEQ ID NO: 77454 - DNA, 2100 bp, Streptococcus pneumoniae; identical to SEQ ID NO: 73328

SEQ ID NO: 77455 - DNA, 1818 bp, Streptococcus pneumoniae; identical to SEQ ID NO: 73329

SEQ ID NO: 77456 - DNA, 2088 bp, Streptococcus pneumoniae; identical to SEQ ID NO: 73976

SEQ ID NO: 77457 - DNA, 1818 bp, Streptococcus pneumoniae; identical to SEQ ID NO: 73977

SEQ ID NO: 77458 - DNA, 2070 bp, Streptococcus pneumoniae; identical to SEQ ID NO: 76276

SEQ ID NO: 77459 - DNA, 1818 bp, Streptococcus pneumoniae; identical to SEQ ID NO: 76277

SEQ ID NO: 77460 - DNA, 2070 bp, Streptococcus pneumoniae; identical to SEQ ID NO: 71808

SEQ ID NO: 77461 - DNA, 1818 bp, Streptococcus pneumoniae; identical to SEQ ID NO: 71809

SEQ ID NO: 77462 - DNA, 2070 bp, Streptococcus pneumoniae; identical to SEQ ID NO: 71978

SEQ ID NO: 77463 - DNA, 1818 bp, Streptococcus pneumoniae; identical to SEQ ID NO: 71979

SEQ ID NO: 77464 - DNA, 1686 bp, Burkholderia pseudomallei; identical to SEQ ID NO: 72318

SEQ ID NO: 77465 - DNA, 1896 bp, Burkholderia pseudomallei; identical to SEQ ID NO: 71759

SEQ ID NO: 77466 - DNA, 2088 bp, Streptococcus pneumoniae; identical to SEQ ID NO: 73976

SEQ ID NO: 77467 - DNA, 1818 bp, Streptococcus pneumoniae; identical to SEQ ID NO: 76075

SEQ ID NO: 77468 - DNA, 2100 bp, Streptococcus pneumoniae; identical to SEQ ID NO: 73328

SEQ ID NO: 77469 - DNA, 1818 bp, Streptococcus pneumoniae; identical to SEQ ID NO: 73329

SEQ ID NO: 77470 - DNA, 2100 bp, Streptococcus pneumoniae; identical to SEQ ID NO: 73328

SEQ ID NO: 77471 - DNA, 1818 bp, Streptococcus pneumoniae; identical to SEQ ID NO: 73329

SEQ ID NO: 77472 - DNA, 2070 bp, Streptococcus pneumoniae; identical to SEQ ID NO: 71808

SEQ ID NO: 77473 - DNA, 1818 bp, Streptococcus pneumoniae; identical to SEQ ID NO: 71809

SEQ ID NO: 77474 - DNA, 2100 bp, Streptococcus pneumoniae; identical to SEQ ID NO: 73328

SEQ ID NO: 77475 - DNA, 1818 bp, Streptococcus pneumoniae; identical to SEQ ID NO: 73329

SEQ ID NO: 77476 - DNA, 2004 bp, Staphylococcus aureus; identical to SEQ ID NO: 75344

SEQ ID NO: 77477 - DNA, 1926 bp, Staphylococcus aureus; identical to SEQ ID NO: 72299

SEQ ID NO: 77478 - DNA, 2088 bp, Streptococcus pneumoniae; identical to SEQ ID NO: 73976

SEQ ID NO: 77479 - DNA, 1818 bp, Streptococcus pneumoniae; identical to SEQ ID NO: 73977

SEQ ID NO: 77480 - DNA, 2088 bp, Streptococcus pneumoniae; identical to SEQ ID NO: 73976

SEQ ID NO: 77481 - DNA, 1818 bp, Streptococcus pneumoniae; identical to SEQ ID NO: 76075

SEQ ID NO: 77482 - DNA, 2088 bp, Streptococcus pneumoniae; identical to SEQ ID NO: 73976

SEQ ID NO: 77483 - DNA, 1818 bp, Streptococcus pneumoniae; identical to SEQ ID NO: 73977

SEQ ID NO: 77484 - DNA, 2088 bp, Streptococcus pneumoniae; identical to SEQ ID NO: 73976

SEQ ID NO: 77485 - DNA, 1818 bp, Streptococcus pneumoniae; identical to SEQ ID NO: 73977

SEQ ID NO: 77486 - DNA, 2088 bp, Streptococcus pneumoniae; identical to SEQ ID NO: 73976

SEQ ID NO: 77487 - DNA, 1818 bp, Streptococcus pneumoniae; identical to SEQ ID NO: 73977

SEQ ID NO: 77488 - DNA, 2100 bp, Streptococcus pneumoniae; identical to SEQ ID NO: 73328

SEQ ID NO: 77489 - DNA, 1818 bp, Streptococcus pneumoniae; identical to SEQ ID NO: 73329

SEQ ID NO: 77490 - DNA, 2088 bp, Streptococcus pneumoniae; identical to SEQ ID NO: 73976

SEQ ID NO: 77491 - DNA, 1818 bp, Streptococcus pneumoniae; identical to SEQ ID NO: 73977

SEQ ID NO: 77492 - DNA, 2070 bp, Streptococcus pneumoniae; identical to SEQ ID NO: 71978

SEQ ID NO: 77493 - DNA, 1818 bp, Streptococcus pneumoniae; identical to SEQ ID NO: 71979

SEQ ID NO: 77494 - DNA, 2070 bp, Streptococcus pneumoniae; identical to SEQ ID NO: 71808

SEQ ID NO: 77495 - DNA, 1818 bp, Streptococcus pneumoniae; identical to SEQ ID NO: 71809

SEQ ID NO: 77496 - DNA, 2070 bp, Streptococcus pneumoniae; identical to SEQ ID NO: 71808

SEQ ID NO: 77497 - DNA, 1818 bp, Streptococcus pneumoniae; identical to SEQ ID NO: 71809

SEQ ID NO: 77498 - DNA, 2088 bp, Streptococcus pneumoniae; identical to SEQ ID NO: 73976

SEQ ID NO: 77499 - DNA, 1818 bp, Streptococcus pneumoniae; identical to SEQ ID NO: 76075

SEQ ID NO: 77500 - DNA, 2088 bp, Streptococcus pneumoniae; identical to SEQ ID NO: 73976

SEQ ID NO: 77501 - DNA, 1818 bp, Streptococcus pneumoniae; identical to SEQ ID NO: 73977

SEQ ID NO: 77502 - DNA, 2100 bp, Streptococcus pneumoniae; identical to SEQ ID NO: 73328

SEQ ID NO: 77503 - DNA, 1818 bp, Streptococcus pneumoniae; identical to SEQ ID NO: 73329

SEQ ID NO: 77504 - DNA, 2070 bp, Streptococcus pneumoniae; identical to SEQ ID NO: 71808

SEQ ID NO: 77505 - DNA, 1818 bp, Streptococcus pneumoniae; identical to SEQ ID NO: 71809

SEQ ID NO: 77506 - DNA, 2088 bp, Streptococcus pneumoniae; identical to SEQ ID NO: 73976

SEQ ID NO: 77507 - DNA, 1818 bp, Streptococcus pneumoniae; identical to SEQ ID NO: 76075

SEQ ID NO: 77508 - DNA, 2088 bp, Streptococcus pneumoniae; identical to SEQ ID NO: 73976

SEQ ID NO: 77509 - DNA, 1818 bp, Streptococcus pneumoniae; identical to SEQ ID NO: 76075

SEQ ID NO: 77510 - DNA, 2100 bp, Streptococcus pneumoniae; identical to SEQ ID NO: 73328

SEQ ID NO: 77511 - DNA, 1818 bp, Streptococcus pneumoniae; identical to SEQ ID NO: 73329

SEQ ID NO: 77512 - DNA, 2100 bp, Streptococcus pneumoniae; identical to SEQ ID NO: 73328

SEQ ID NO: 77513 - DNA, 1818 bp, Streptococcus pneumoniae; identical to SEQ ID NO: 73329

SEQ ID NO: 77514 - DNA, 1686 bp, Burkholderia pseudomallei; identical to SEQ ID NO: 72318

SEQ ID NO: 77515 - DNA, 1896 bp, Burkholderia pseudomallei; identical to SEQ ID NO: 71759

SEQ ID NO: 77516 - DNA, 2070 bp, Streptococcus pneumoniae; identical to SEQ ID NO: 71808

SEQ ID NO: 77517 - DNA, 1818 bp, Streptococcus pneumoniae; identical to SEQ ID NO: 71809

SEQ ID NO: 77518 - DNA, 1686 bp, Burkholderia pseudomallei; identical to SEQ ID NO: 72318

SEQ ID NO: 77519 - DNA, 1896 bp, Burkholderia pseudomallei; identical to SEQ ID NO: 71759

SEQ ID NO: 77520 - DNA, 2088 bp, Streptococcus pneumoniae; identical to SEQ ID NO: 76178

SEQ ID NO: 77521 - DNA, 1818 bp, Streptococcus pneumoniae; identical to SEQ ID NO: 76075

SEQ ID NO: 77522 - DNA, 2088 bp, Streptococcus pneumoniae; identical to SEQ ID NO: 73976

SEQ ID NO: 77523 - DNA, 1818 bp, Streptococcus pneumoniae; identical to SEQ ID NO: 73977

SEQ ID NO: 77524 - DNA, 2088 bp, Streptococcus pneumoniae; identical to SEQ ID NO: 73976

SEQ ID NO: 77525 - DNA, 1818 bp, Streptococcus pneumoniae; identical to SEQ ID NO: 73977

SEQ ID NO: 77526 - DNA, 2004 bp, Staphylococcus aureus; identical to SEQ ID NO: 75344

SEQ ID NO: 77527 - DNA, 1926 bp, Staphylococcus aureus; identical to SEQ ID NO: 72299

SEQ ID NO: 77528 - DNA, 2004 bp, Staphylococcus aureus; identical to SEQ ID NO: 75344

SEQ ID NO: 77529 - DNA, 1926 bp, Staphylococcus aureus; identical to SEQ ID NO: 72299

SEQ ID NO: 77530 - DNA, 2088 bp, Streptococcus pneumoniae; identical to SEQ ID NO: 73976

SEQ ID NO: 77531 - DNA, 1818 bp, Streptococcus pneumoniae; identical to SEQ ID NO: 76075

SEQ ID NO: 77532 - DNA, 2070 bp, Streptococcus pneumoniae; identical to SEQ ID NO: 76276

SEQ ID NO: 77533 - DNA, 1818 bp, Streptococcus pneumoniae; identical to SEQ ID NO: 76277

SEQ ID NO: 77534 - DNA, 2088 bp, Streptococcus pneumoniae; identical to SEQ ID NO: 73976

SEQ ID NO: 77535 - DNA, 1818 bp, Streptococcus pneumoniae; identical to SEQ ID NO: 73977

SEQ ID NO: 77536 - DNA, 2088 bp, Streptococcus pneumoniae; identical to SEQ ID NO: 73976

SEQ ID NO: 77537 - DNA, 1818 bp, Streptococcus pneumoniae; identical to SEQ ID NO: 76075

SEQ ID NO: 77538 - DNA, 2100 bp, Streptococcus pneumoniae; identical to SEQ ID NO: 73328

SEQ ID NO: 77539 - DNA, 1818 bp, Streptococcus pneumoniae; identical to SEQ ID NO: 73329

SEQ ID NO: 77540 - DNA, 2088 bp, Streptococcus pneumoniae; identical to SEQ ID NO: 73976

SEQ ID NO: 77541 - DNA, 1818 bp, Streptococcus pneumoniae; identical to SEQ ID NO: 76075

SEQ ID NO: 77542 - DNA, 2361 bp, Burkholderia pseudomallei
atggacattcccgaggtttcctccactacggacccggcgtcgagttccgccccaagtgcatcggcagtgccacccgccgaaatagtcgcgcttccgggcgattccccgatccgacttgcttgcgtcgaagtctgcaacttccgacgtttggcaaagacccgccttgagctcgatgatgccaccactatcttggtgggcgccaacaacagcggcaagacctctcttctcacggttcttcgcaacttcctcagcgactcgccaggctttcgcgctttcgacattagcctctcgcaatgggcgaaattgcggcaactgagcgaactctgggaggcgctggacgaggaccccacgaccgaatcaaaggatgcggaaaaatgggagcagcagtatctgcagcttctaggttgcatgccgttcattgatctttggttcgacgctaaggaaggcgcgtacaactatgttgctcccttcattacatcgctgaaatggcgtggcggtgcagttggcgtgcgggtacgactcgaacctgtagcagactcagatgagttgcgaaagctggcttggcgctaccgagaagcgcgttctcccgtccggacgcttccgaaggatggccacgcgtggcctatggatctgcttgattactggttgaggtactccgcggacctgcgccgcattgctgtttaccgcctcgaccctgcgaaggggcccttggcaacggagcagtgcaatgaactacaagaactgccacctgattcgcagccggttgaactgcaactcctgcgcaagctcgtacgtgtggattttgtgccggctcaacgggggcttggtgcggaagacgacgagacgagatccgagtcggcgagcacgcgtcccgggctgttctcaagccagcttctgaaatttgcccggcaacacctgaacgtcgctccatccggccatggcaatcgcgaggatctggttgcagctattgcaagggctcaagcggaacttgacgattcgatttacaaggcgctccaaccggcgatggaggacgtggaggttctagggtatccgggactgcatgatccgcaacagcttcacttccgtacccgcattcaaactgccgaccttctcgcacacagcaccgcggtccagtatcgcctggacgagacggcggtcgacgagtcgttgccggagcattctattgggcttggctatcagaatttgcagtcgctgagcttcatgctcgtgtcattccgagccgcgcgcctcaatcccccgcagggctctccagcggcggttcaccttgtaatggtagaggaacctgaagcccatttgcacgttcaggttcaacgcaacttttcgtcgaatgctcacgaactcatccgcccaaaagagctcgtgcatagcaatcttcgcagccaattgctcatcagtacgcactcaagccatctagcccacggggacagtttcacacgtctgcgatatgtaaaacggatagctggtaccggtgcgggtgttaggcccagtagcgaggtcgtcaatctcggcgacgcctttggcgatgacattcaaaccaggacgttcgccgagcgctactttcaggtccaacacacagacctcctcttcgcggacgcagccatttttgtggagggaactgcggagcgcatgctggtgccgcttttcatcgagcgcgacttccccaagcttgccaaaaagtatgtgtcgttccttgatattgggggcagtcacgcgcaccgcctcaggccgctggtagagcggctggggattccaacggctgttatcaccgacttggaccctgtggtaccgaccacgagcaaaggcgggcgtgttgtgcgagcggcggtacatatcgcaggccaagcagacctcgagtgtgggaatgacacactgatgtcgtggcacccgaagctagcggatttccacgcttatgcgaagccgacgtccgcacacttggagtgggtctccgactcgggcgtaaaagtccgcttcgcatggcagcttcccgtcgcggccgcaagcgatcaatggccaagctcgttcgaggatgcactcgtcctgacgaacatcgattggtttaaagcgttggacgaagagaaggattccgtgtccggcaagaagaaggatcaccgaggcactctcgggaaggtgataggtctcgtactcgaccactctgaccataccgagcttcttaaggaactccacgcgatgctgcatgggaacttcagcaagggcgatttcgcggcaacactgtttgaacgattgaacgctgggcaagccttggcatgtcctacatacatcgccgacgcactcgcctggctgagtggtcaacttgaagccacagccggagagaccgcgtga

SEQ ID NO: 77543 - DNA, 1731 bp, Burkholderia pseudomallei
gtgcgcgtcatcacgtataccaacaacgccaccgctgtcgtcaacggccgactcggcgagaattacctgactgcggtgtcgaccattcacgccttctgctgggaactcatcaagggtttcgacgaagatatccgagacgccctgctcgctcgcaatgccgaaagccttgcgactgccaaggccaaggcattgagtaaggccaagggggaatctgatagggaccgggagaagtacgcagagatcgaagcgaaggccgaagaaatccggaaaatcgatgcatttatctatcatccggaccgcaacacctacgggcaaggcgcgctctcgcacaccgacgttctacatgtgacagcttggctcattcgtgagcgaccaacgttgcagcgcatccttgaggaccgacaccctctcatcctcatcgatgaatcgcaggacacgatgaaaagtgtgcttgacgcgttgttcgagctctcgatgagccgtcccggacacattacgctcggacttctgggcgaccatcggcagcggatttatcccgacgggcacgacgatctgccctcgcacgtaccggaggactgggcacgccccgcgctgcagatgaaccatcgcagtcagcaacgcatcgtcgagctcattaacaaaatctgggacgcggatattgaaggccgtactcagcccaagactggcgtgcctcagcattcccggacggagaaaaacggcggaaccgtgcgcctttttgttggcgatacgaagacgagcacggccgagaagattcggagggagtcggattgcgccctcgccatggctgcagagactggctgcgctgcctggcaagatggcacgcgtggctataagacgctagcgcttgagcacaagctggccgccaagcgcggcgactttttcgatgcgtatagcgcgatggacctgctggacaaggacgccgcgatgcctaagagcaacggtgagcggactggtcccgcgatggttcggccgctgcttggcccaatgctcgaactcgccgagtgtctgcaagcagacggttcgctgaacgagttcgctgctgttgacgtgttgcgccggcacggaaccctggcaaggctgccggaggccagcgctgaacgtcaagctgacttggataagctccatgcggcagtcgtgaagttcgcgggcgtcatctccacgccggacgcgacggtccgagatgtattggggccggtcctggaaggagggatattcgatgcggacccccgtctagtccaggcatacggcgatacctcgcctccaccaccagaacccaaacccagaagcaaggaagcaaaggaagatcggcgcaggcgcggatggtgcgctctcttcggcacgccttggcaacagattgctcggtatcgcacctatcttagcggagacgcggaactcgcgactcatcaagtcgtcaagggctccgagttcaagcacgtgatggtcgtgatggacgatcaggaggctggtggctcgctgttctcttacgataagcttttcggtgccgaggagttgagttcgaatgaccgcgagaacgtcgacgagggaaacgagacgatcatcgatcggactctgcgccttctgtacgttacctgtagccgagcagaggaaagcctcgcactggttctgtgggcaaagaacccgactgcggcgcttgatgcaatcaaacggtcagaatggtttgctgctaacgaggtgtccgctttggaatag

SEQ ID NO: 77544 - DNA, 1686 bp, Burkholderia pseudomallei; identical to SEQ ID NO: 72318

SEQ ID NO: 77545 - DNA, 1896 bp, Burkholderia pseudomallei; identical to SEQ ID NO: 71759

SEQ ID NO: 77546 - DNA, 1911 bp, Chlamydia trachomatis; identical to SEQ ID NO: 73710

SEQ ID NO: 77547 - DNA, 1863 bp, Chlamydia trachomatis; identical to SEQ ID NO: 72915

SEQ ID NO: 77548 - DNA, 1926 bp, Salmonella enterica; identical to SEQ ID NO: 72180
  subsp. enterica serovar Typhimurium str. DT104

SEQ ID NO: 77549 - DNA, 1662 bp, Salmonella enterica; identical to SEQ ID NO: 72181
  subsp. enterica serovar Typhimurium str. DT104

SEQ ID NO: 77550 - DNA, 1926 bp, Salmonella enterica; identical to SEQ ID NO: 72180
  subsp. enterica serovar Typhimurium str. DT104

SEQ ID NO: 77551 - DNA, 1662 bp, Salmonella enterica; identical to SEQ ID NO: 72181
  subsp. enterica serovar Typhimurium str. DT104

SEQ ID NO: 77552 - DNA, 1926 bp, Salmonella enterica; identical to SEQ ID NO: 72180
  subsp. enterica serovar Typhimurium str. DT104

SEQ ID NO: 77553 - DNA, 1662 bp, Salmonella enterica; identical to SEQ ID NO: 72181
  subsp. enterica serovar Typhimurium str. DT104

SEQ ID NO: 77554 - DNA, 1926 bp, Salmonella enterica; identical to SEQ ID NO: 72180
  subsp. enterica serovar Typhimurium str. DT104

SEQ ID NO: 77555 - DNA, 1662 bp, Salmonella enterica; identical to SEQ ID NO: 72181
  subsp. enterica serovar Typhimurium str. DT104

SEQ ID NO: 77556 - DNA, 1926 bp, Salmonella enterica; identical to SEQ ID NO: 72180
  subsp. enterica serovar Typhimurium str. DT104

SEQ ID NO: 77557 - DNA, 1662 bp, Salmonella enterica
  subsp. enterica serovar Typhimurium str. DT104
gtgattgctgtagatgcatggttgccttctgatgggctaacacttgaacccaatgctctgctggctgcgaaggaacaagcgcgctgtcttgcactgactgcggggccgggagcgggcaagacggaaatgcttgcacagcgagctgacttcctcctccgacccggaacctgccgttatccgaagagaatactcgctatttctttcaaagttgacgccagcaaaaacttgaaggagcgaatccagcgacgctgtggacaagaattggcttcccgttttgatagctacacatttcatgcgtttgcaaagcgtattattgatcgcttccgagtagtgcttactggtaatgatgctctggatacggattattcgattggcgaaagaaaagtcacaagaaggcaaattacatttcatgatcttgtgccgctagcaattcaaattctcaaggcctctgttgtcgcaagaaatgccatacgccaaacttacagcgatgttttcttggatgaattccaagactgcacggatcagcaatatgaactcgttaaggtagctttccaaagtacaagcattcgtcttaccgctgtcggtgacaccaagcagaaaatcatgggatgggcaggagctttggacggaattttccaaacgttcgctaaggatttttcagccgtaccactaaacatgtaccgaaactttcgttcaaaaccacgcctgcttcggatgcagaacgagataattcgtgtgcttgatccagcttccgttatgccagatcaccaacttgctggtgaggagggagaggttttcgcgtggcaattcgagaatgcacagggggaagctgagtatttggccgatttgattgccgggtggataagaaatgaaaaggttccgttgtccgaaatcgccgtattagtgtccaaacaactagatctttatgccaaccacttgatgacggcattggaagttaggggaataccgtaccggaacgagcaggagatgcaggatattactgttgaacctgccgcgaggctcgttgttgactatttgtcctgcctctacggccagcgagagcccaaagcttgggttcggcttatgaatcaattgattccctttgctgatgatgaggtgcagtctagcgctaggcaaagcttccaacgcttcttcaaggagcagagaaaaatcatcaccatgaccgagctgttggatgagccgttttcgggatggtgggattctgtgtgtagctttctgaagaaaataggaatggagactcttgttgctctctcgcccgactatgagtcacatgctaggttaggtgaagttgtgagagataccaaagcgcgcattgaagaattgcttgaacttacccccgatttgcctcaagccttgactcgtttctctgatgatcaggctgtgcgtattctgactatccataagagcaaaggattggagttcgactcaacgataattatggccgttgagaacgaaatattctttggggatcaagatgctaatcggtgtgctttctttgttggtgtatcccgtgccaagcgtcggcttgttgttacatacgcaaaagagcgagataagcctgataattattcagggatatggcgaacgaatcgctctgctcagttagaatattttggatatacatctccttttgttaagtga

SEQ ID NO: 77558 - DNA, 1926 bp, Salmonella enterica; identical to SEQ ID NO: 72180
  subsp. enterica serovar Typhimurium str. DT104

SEQ ID NO: 77559 - DNA, 1662 bp, Salmonella enterica; identical to SEQ ID NO: 72181
  subsp. enterica serovar Typhimurium str. DT104

SEQ ID NO: 77560 - DNA, 1926 bp, Salmonella enterica; identical to SEQ ID NO: 72180
  subsp. enterica serovar Typhimurium str. DT104

SEQ ID NO: 77561 - DNA, 1662 bp, Salmonella enterica; identical to SEQ ID NO: 72181
  subsp. enterica serovar Typhimurium str. DT104

SEQ ID NO: 77562 - DNA, 1926 bp, Salmonella enterica; identical to SEQ ID NO: 72180
  subsp. enterica serovar Typhimurium str. DT104

SEQ ID NO: 77563 - DNA, 1662 bp, Salmonella enterica; identical to SEQ ID NO: 72181
  subsp. enterica serovar Typhimurium str. DT104

SEQ ID NO: 77564 - DNA, 1926 bp, Salmonella enterica; identical to SEQ ID NO: 72180
  subsp. enterica serovar Typhimurium str. DT104

SEQ ID NO: 77565 - DNA, 1662 bp, Salmonella enterica; identical to SEQ ID NO: 72181
  subsp. enterica serovar Typhimurium str. DT104

SEQ ID NO: 77566 - DNA, 1926 bp, Salmonella enterica; identical to SEQ ID NO: 72180
  subsp. enterica serovar Typhimurium str. DT104

SEQ ID NO: 77567 - DNA, 1662 bp, Salmonella enterica; identical to SEQ ID NO: 72181
  subsp. enterica serovar Typhimurium str. DT104

SEQ ID NO: 77568 - DNA, 1926 bp, Salmonella enterica; identical to SEQ ID NO: 72180
  subsp. enterica serovar Typhimurium str. DT104

SEQ ID NO: 77569 - DNA, 1662 bp, Salmonella enterica; identical to SEQ ID NO: 72181
  subsp. enterica serovar Typhimurium str. DT104

SEQ ID NO: 77570 - DNA, 1926 bp, Salmonella enterica; identical to SEQ ID NO: 72180
  subsp. enterica serovar Typhimurium str. DT104

SEQ ID NO: 77571 - DNA, 1662 bp, Salmonella enterica; identical to SEQ ID NO: 72181
  subsp. enterica serovar Typhimurium str. DT104

SEQ ID NO: 77572 - DNA, 1926 bp, Salmonella enterica; identical to SEQ ID NO: 72180
  subsp. enterica serovar Typhimurium str. DT104

SEQ ID NO: 77573 - DNA, 1662 bp, Salmonella enterica; identical to SEQ ID NO: 72181
  subsp. enterica serovar Typhimurium str. DT104

SEQ ID NO: 77574 - DNA, 1926 bp, Salmonella enterica; identical to SEQ ID NO: 72180
  subsp. enterica serovar Typhimurium str. DT104

SEQ ID NO: 77575 - DNA, 1662 bp, Salmonella enterica; identical to SEQ ID NO: 72181
  subsp. enterica serovar Typhimurium str. DT104

SEQ ID NO: 77576 - DNA, 1926 bp, Salmonella enterica; identical to SEQ ID NO: 72180
  subsp. enterica serovar Typhimurium str. DT104

SEQ ID NO: 77577 - DNA, 1662 bp, Salmonella enterica; identical to SEQ ID NO: 72181
  subsp. enterica serovar Typhimurium str. DT104

SEQ ID NO: 77578 - DNA, 1926 bp, Salmonella enterica; identical to SEQ ID NO: 72180
  subsp. enterica serovar Typhimurium str. DT104

SEQ ID NO: 77579 - DNA, 1662 bp, Salmonella enterica; identical to SEQ ID NO: 72181
  subsp. enterica serovar Typhimurium str. DT104

SEQ ID NO: 77580 - DNA, 1926 bp, Salmonella enterica; identical to SEQ ID NO: 72180
  subsp. enterica serovar Typhimurium str. DT104

SEQ ID NO: 77581 - DNA, 1662 bp, Salmonella enterica; identical to SEQ ID NO: 72181
  subsp. enterica serovar Typhimurium str. DT104

SEQ ID NO: 77582 - DNA, 1926 bp, Salmonella enterica; identical to SEQ ID NO: 72180
  subsp. enterica serovar Typhimurium str. DT104

SEQ ID NO: 77583 - DNA, 1662 bp, Salmonella enterica; identical to SEQ ID NO: 72181
  subsp. enterica serovar Typhimurium str. DT104

SEQ ID NO: 77584 - DNA, 1926 bp, Salmonella enterica; identical to SEQ ID NO: 72180
  subsp. enterica serovar Typhimurium str. DT104

SEQ ID NO: 77585 - DNA, 1662 bp, Salmonella enterica; identical to SEQ ID NO: 72181
  subsp. enterica serovar Typhimurium str. DT104

SEQ ID NO: 77586 - DNA, 1926 bp, Salmonella enterica; identical to SEQ ID NO: 72180
  subsp. enterica serovar Typhimurium str. DT104

SEQ ID NO: 77587 - DNA, 1662 bp, Salmonella enterica; identical to SEQ ID NO: 72181
  subsp. enterica serovar Typhimurium str. DT104

SEQ ID NO: 77588 - DNA, 1926 bp, Salmonella enterica; identical to SEQ ID NO: 72180
  subsp. enterica serovar Typhimurium str. DT104

SEQ ID NO: 77589 - DNA, 1662 bp, Salmonella enterica; identical to SEQ ID NO: 72181
  subsp. enterica serovar Typhimurium str. DT104

SEQ ID NO: 77590 - DNA, 1926 bp, Salmonella enterica; identical to SEQ ID NO: 72180
  subsp. enterica serovar Typhimurium str. DT104

SEQ ID NO: 77591 - DNA, 1662 bp, Salmonella enterica; identical to SEQ ID NO: 72181
  subsp. enterica serovar Typhimurium str. DT104

SEQ ID NO: 77592 - DNA, 1926 bp, Salmonella enterica; identical to SEQ ID NO: 72180
  subsp. enterica serovar Typhimurium str. DT104

SEQ ID NO: 77593 - DNA, 1662 bp, Salmonella enterica; identical to SEQ ID NO: 72181
  subsp. enterica serovar Typhimurium str. DT104

SEQ ID NO: 77594 - DNA, 1092 bp, Salmonella enterica
  subsp. enterica serovar Typhimurium str. DT104
atgctctatctatcgttggttctctcatctcaagctgttggtcgtgctgtccttgccggtgaggacgactcttttgaccctgaaaagttgcgtccgccagtctttactttaatagcccttgaggaaccagagaacagcctctcacctcactatttgggaagaattgttaacgctcttaactcaatgacgagtaacgaggatgctcaggccctagtcgctacgcatgctccgtcgatgttgcgacgtgtcgatccggaacatattcgatatcttcgacttactgaaacccggcaatcaagaattaagaaaatccaattacccgctaaaaccgatgaagcgcacaaatttgtacgtgaggctgtccaggcatttcctgagatctacttctctcgtttgattgtgttgggtgaaggggatagcgaagaaattgtattaccgcgccttttccaagcaaagggtgcgccagttgatgaatcagcggttacgattgctccgcttggaggtaggcatgtaaaccatttttggcgtctgttatccgaactgcaaatcccatttttgactcttctagatttagatgtgggcagatatcaagcgggctggggaagaataaagtatgtaaataaccaacttggtttgtatcaacctgaaaaggtactaccaactactttttctttatcagattggaatgatgacaaagtacctgttcgtacacatcatttctttgaaaacggcactaagagtgtatttttagagctggaaacacgtggtgtttttttctcatttccaatggatttagatttttcaatgcttcttgctttccctaatgcgtacggtgttcagcaggaggtttcagatgagtctacgattaaagccgttttgggtaagagccatcatggctcataccaatacagcggagacgagttaaatcttttctctacgtatcacaagctttttaaactgggtagtaagcccgctgcgcatatagatgctcttgctcaactgagcaacgaggaattgctggcgaacatgccaggatcatttggacgacttgcagatgccgtgatagccaagcttgcggagctgcccgagtga

SEQ ID NO: 77595 - DNA, 1662 bp, Salmonella enterica; identical to SEQ ID NO: 72181
  subsp. enterica serovar Typhimurium str. DT104

SEQ ID NO: 77596 - DNA, 1926 bp, Salmonella enterica; identical to SEQ ID NO: 72180
  subsp. enterica serovar Typhimurium str. DT104

SEQ ID NO: 77597 - DNA, 1662 bp, Salmonella enterica; identical to SEQ ID NO: 72181
  subsp. enterica serovar Typhimurium str. DT104

SEQ ID NO: 77598 - DNA, 1926 bp, Salmonella enterica; identical to SEQ ID NO: 72180
  subsp. enterica serovar Typhimurium str. DT104

SEQ ID NO: 77599 - DNA, 1662 bp, Salmonella enterica; identical to SEQ ID NO: 72181
  subsp. enterica serovar Typhimurium str. DT104

SEQ ID NO: 77600 - DNA, 1926 bp, Salmonella enterica; identical to SEQ ID NO: 72180
  subsp. enterica serovar Typhimurium str. DT104

SEQ ID NO: 77601 - DNA, 1662 bp, Salmonella enterica; identical to SEQ ID NO: 72181
  subsp. enterica serovar Typhimurium str. DT104

SEQ ID NO: 77602 - DNA, 1926 bp, Salmonella enterica; identical to SEQ ID NO: 72180
  subsp. enterica serovar Typhimurium str. DT104

SEQ ID NO: 77603 - DNA, 1641 bp, Salmonella enterica
  subsp. enterica serovar Typhimurium str. DT104
atggcttctgatgggctaacacttgaacccaatgctctgctggctgcgaaggaacaagcgcgctgtcttgcactgactgcggggccgggagcgggcaagacggaaatgcttgcacagcgagctgacttcctcctccgaaccggaacctgccgttatccgaagagaatactcgctatttctttcaaagttgacgccagcaaaaacttgaaggagcgaatccagcgacgctgtggacaagaattggcttcccgttttgatagctacacatttcatgcgtttgcaaagcgtattattgatcgcttccgagtagtgcttactggtaatgatgctctggatacggattattcgattggcgaaagaaaagtcacaagaaggcaaattacatttcatgatcttgtgccgctagcaattcaaattctcaaggcctctgttgtcgcaagaaatgccatacgccaaacttacagcgatgttttcttggatgaattccaagactgcacggatcagcaatatgaactcgttaaggtagctttccaaagtacaagcattcgtcttaccgctgtcggtgacaccaagcagaaaatcatgggatgggcaggagctttggacggaattttccaaacgttcgctaaggatttttcagccgtaccactaaacatgtaccgaaactttcgttcaaaaccacgcctgcttcggatgcagaacgagataattcgtgtgcttgatccagcttccgttatgccagatcaccaacttgctggtgaggagggagaggttttcgcgtggcaattcgagaatgcacagggggaagctgagtatttggccgatttgattgccgggtggataagaaatgaaaaggttccgttgtccgaaatcgccgtattagtgtccaaacaactagatctttatgccaaccacttgatgacggcattggaagttaggggaataccgtaccggaacgagcaggagatgcaggatattactgttgaacctgccgcgaggctcgttgttgactatttgtcctgcctctacggccagcgagagcccaaagcttgggttcggcttatgaatcaattgattccctttgctgatgatgaggtgcagtctagcgctaggcaaagcttccaacgcttcttcaaggagcagagaaaaatcatcaccatgaccgagctgttggatgagccgttttcgggatggtgggattctgtgtgtagctttctgaagaaaataggaatggagactcttgttgctctctcgcccgactatgagtcacatgctaggttaggtgaagttgtgagagataccaaagcgcgcattgaagaattgcttgaacttacccccgatttgcctcaagccttgactcgtttctctgatgatcaggctgtgcgtattctgactatccataagagcaaaggattggagttcgactcaacgataattatggccgttgagaacgaaatattctttggggatcaagatgctaatcggtgtgctttctttgttggtgtatcccgtgccaagcgtcggcttgttgttacatacgcaaaagagcgagataagcctgataattattcagggatatggcgaacgaatcgctctgctcagttagaatattttggatatacatctccttttgttaagtga

SEQ ID NO: 77604 - DNA, 1926 bp, Salmonella enterica; identical to SEQ ID NO: 72180
  subsp. enterica serovar Typhimurium str. DT104

SEQ ID NO: 77605 - DNA, 1662 bp, Salmonella enterica; identical to SEQ ID NO: 72181
  subsp. enterica serovar Typhimurium str. DT104

SEQ ID NO: 77606 - DNA, 1926 bp, Salmonella enterica; identical to SEQ ID NO: 72180
  subsp. enterica serovar Typhimurium str. DT104

SEQ ID NO: 77607 - DNA, 1662 bp, Salmonella enterica; identical to SEQ ID NO: 72181
  subsp. enterica serovar Typhimurium str. DT104

SEQ ID NO: 77608 - DNA, 1926 bp, Salmonella enterica; identical to SEQ ID NO: 72180
  subsp. enterica serovar Typhimurium str. DT104

SEQ ID NO: 77609 - DNA, 1662 bp, Salmonella enterica; identical to SEQ ID NO: 72181
  subsp. enterica serovar Typhimurium str. DT104

SEQ ID NO: 77610 - DNA, 1926 bp, Salmonella enterica; identical to SEQ ID NO: 72180
  subsp. enterica serovar Typhimurium str. DT104

SEQ ID NO: 77611 - DNA, 1662 bp, Salmonella enterica; identical to SEQ ID NO: 72181
  subsp. enterica serovar Typhimurium str. DT104

SEQ ID NO: 77612 - DNA, 1926 bp, Salmonella enterica; identical to SEQ ID NO: 72180
  subsp. enterica serovar Typhimurium str. DT104

SEQ ID NO: 77613 - DNA, 1662 bp, Salmonella enterica; identical to SEQ ID NO: 72181
  subsp. enterica serovar Typhimurium str. DT104

SEQ ID NO: 77614 - DNA, 1926 bp, Salmonella enterica; identical to SEQ ID NO: 72180
  subsp. enterica serovar Typhimurium str. DT104

SEQ ID NO: 77615 - DNA, 1662 bp, Salmonella enterica; identical to SEQ ID NO: 72181
  subsp. enterica serovar Typhimurium str. DT104

SEQ ID NO: 77616 - DNA, 1926 bp, Salmonella enterica; identical to SEQ ID NO: 72180
  subsp. enterica serovar Typhimurium str. DT104

SEQ ID NO: 77617 - DNA, 1662 bp, Salmonella enterica; identical to SEQ ID NO: 72181
  subsp. enterica serovar Typhimurium str. DT104

SEQ ID NO: 77618 - DNA, 1926 bp, Salmonella enterica; identical to SEQ ID NO: 72180
  subsp. enterica serovar Typhimurium str. DT104

SEQ ID NO: 77619 - DNA, 1662 bp, Salmonella enterica; identical to SEQ ID NO: 72181
  subsp. enterica serovar Typhimurium str. DT104

SEQ ID NO: 77620 - DNA, 1926 bp, Salmonella enterica; identical to SEQ ID NO: 72180
  subsp. enterica serovar Typhimurium str. DT104

SEQ ID NO: 77621 - DNA, 1662 bp, Salmonella enterica; identical to SEQ ID NO: 72181
  subsp. enterica serovar Typhimurium str. DT104

SEQ ID NO: 77622 - DNA, 1926 bp, Salmonella enterica; identical to SEQ ID NO: 72180
  subsp. enterica serovar Typhimurium str. DT104

SEQ ID NO: 77623 - DNA, 1662 bp, Salmonella enterica; identical to SEQ ID NO: 72181
  subsp. enterica serovar Typhimurium str. DT104

SEQ ID NO: 77624 - DNA, 1926 bp, Salmonella enterica; identical to SEQ ID NO: 72180
  subsp. enterica serovar Typhimurium str. DT104

SEQ ID NO: 77625 - DNA, 1662 bp, Salmonella enterica; identical to SEQ ID NO: 72181
  subsp. enterica serovar Typhimurium str. DT104

SEQ ID NO: 77626 - DNA, 1926 bp, Salmonella enterica; identical to SEQ ID NO: 72180
  subsp. enterica serovar Typhimurium str. DT104

SEQ ID NO: 77627 - DNA, 1662 bp, Salmonella enterica; identical to SEQ ID NO: 72181
  subsp. enterica serovar Typhimurium str. DT104

SEQ ID NO: 77628 - DNA, 1926 bp, Salmonella enterica; identical to SEQ ID NO: 72180
  subsp. enterica serovar Typhimurium str. DT104

SEQ ID NO: 77629 - DNA, 1662 bp, Salmonella enterica; identical to SEQ ID NO: 72181
  subsp. enterica serovar Typhimurium str. DT104

SEQ ID NO: 77630 - DNA, 1926 bp, Salmonella enterica; identical to SEQ ID NO: 72180
  subsp. enterica serovar Typhimurium str. DT104

SEQ ID NO: 77631 - DNA, 1662 bp, Salmonella enterica; identical to SEQ ID NO: 72181
  subsp. enterica serovar Typhimurium str. DT104

SEQ ID NO: 77632 - DNA, 1926 bp, Salmonella enterica; identical to SEQ ID NO: 72180
  subsp. enterica serovar Typhimurium str. DT104

SEQ ID NO: 77633 - DNA, 1662 bp, Salmonella enterica; identical to SEQ ID NO: 72181
  subsp. enterica serovar Typhimurium str. DT104

SEQ ID NO: 77634 - DNA, 1926 bp, Salmonella enterica; identical to SEQ ID NO: 72180
  subsp. enterica serovar Typhimurium str. DT104

SEQ ID NO: 77635 - DNA, 1662 bp, Salmonella enterica; identical to SEQ ID NO: 72181
  subsp. enterica serovar Typhimurium str. DT104

SEQ ID NO: 77636 - DNA, 1926 bp, Salmonella enterica; identical to SEQ ID NO: 72180
  subsp. enterica serovar Typhimurium str. DT104

SEQ ID NO: 77637 - DNA, 1662 bp, Salmonella enterica; identical to SEQ ID NO: 72181
  subsp. enterica serovar Typhimurium str. DT104

SEQ ID NO: 77638 - DNA, 1926 bp, Salmonella enterica; identical to SEQ ID NO: 72180
  subsp. enterica serovar Typhimurium str. DT104

SEQ ID NO: 77639 - DNA, 1662 bp, Salmonella enterica; identical to SEQ ID NO: 72181
  subsp. enterica serovar Typhimurium str. DT104

SEQ ID NO: 77640 - DNA, 1926 bp, Salmonella enterica; identical to SEQ ID NO: 72180
  subsp. enterica serovar Typhimurium str. DT104

SEQ ID NO: 77641 - DNA, 1662 bp, Salmonella enterica; identical to SEQ ID NO: 72181
  subsp. enterica serovar Typhimurium str. DT104

SEQ ID NO: 77642 - DNA, 1926 bp, Salmonella enterica; identical to SEQ ID NO: 72180
  subsp. enterica serovar Typhimurium str. DT104

SEQ ID NO: 77643 - DNA, 1662 bp, Salmonella enterica; identical to SEQ ID NO: 72181
  subsp. enterica serovar Typhimurium str. DT104

SEQ ID NO: 77644 - DNA, 1926 bp, Salmonella enterica; identical to SEQ ID NO: 72180
  subsp. enterica serovar Typhimurium str. DT104

SEQ ID NO: 77645 - DNA, 1662 bp, Salmonella enterica; identical to SEQ ID NO: 72181
  subsp. enterica serovar Typhimurium str. DT104

SEQ ID NO: 77646 - DNA, 1926 bp, Salmonella enterica; identical to SEQ ID NO: 72180
  subsp. enterica serovar Typhimurium str. DT104

SEQ ID NO: 77647 - DNA, 1662 bp, Salmonella enterica; identical to SEQ ID NO: 72181
  subsp. enterica serovar Typhimurium str. DT104

SEQ ID NO: 77648 - DNA, 1926 bp, Salmonella enterica; identical to SEQ ID NO: 72180
  subsp. enterica serovar Typhimurium str. DT104

SEQ ID NO: 77649 - DNA, 1662 bp, Salmonella enterica; identical to SEQ ID NO: 72181
  subsp. enterica serovar Typhimurium str. DT104

SEQ ID NO: 77650 - DNA, 1926 bp, Salmonella enterica; identical to SEQ ID NO: 72180
  subsp. enterica serovar Typhimurium str. DT104

SEQ ID NO: 77651 - DNA, 1662 bp, Salmonella enterica; identical to SEQ ID NO: 72181
  subsp. enterica serovar Typhimurium str. DT104

SEQ ID NO: 77652 - DNA, 1926 bp, Salmonella enterica; identical to SEQ ID NO: 72180
  subsp. enterica serovar Typhimurium str. DT104

SEQ ID NO: 77653 - DNA, 1662 bp, Salmonella enterica; identical to SEQ ID NO: 72181
  subsp. enterica serovar Typhimurium str. DT104

SEQ ID NO: 77654 - DNA, 1926 bp, Salmonella enterica; identical to SEQ ID NO: 72180
  subsp. enterica serovar Typhimurium str. DT104

SEQ ID NO: 77655 - DNA, 1662 bp, Salmonella enterica; identical to SEQ ID NO: 72181
  subsp. enterica serovar Typhimurium str. DT104

SEQ ID NO: 77656 - DNA, 1956 bp, Yersinia enterocolitica
atgcacttgagtaaactgaaaataaatggtttccgctgttttaatgactattttaacattcatttatctcgtggattgaatgtaattgtaggtgaaaatggtgcaggtaaaactgcaatcattagtgcaattagacagttatttatcgattctgagtctggaagatatagcgtcagcaacgatgatttttcatttccatttaagattaatggagaagcagcaaattctttctctattcaagcagagttcgatgaactgagcgtaagcgataaagtaaccctcttaccatggattggatctaataaaactgcagttctaaatttagaagcagaaaataaagaaatacgtggtagatttagaaagatactttggggcggaaagtcgaaaagttctctatttgagcctgagttactggatttaatccaatgcatttatctacccccattaagggatgctgaatcaaagttgtccaatggtcgccaatcacgtttatcaaaactacttagagcattgaaccgaagagagttaaagcgctctcgtaaagatggtaagcctcatccgctagaagaaaaaatcaaggagtttaatactacgttagctgctgatgaaaacctcggtattaaagatgctaatgaattaataacaaaaaacttgattaaggcaataggttataactttggacaaaaaaccagtatacaatttgcagaaagtgattttacaaaaatagtagaaagtttaaaacttcttttttttccagatttatcaaatgaagatcaatcattattccgtagtttaagccaaaatagtttgggatataataacttactatatattgcatctattttagctgaattaacgttagatgatgatgatgatgacgatgatgagcaaccccttttaaaattactgcttatagaagaacctgaagctcatttacacccacagttgcaaatcaggcttctcaatcacataaaatccgtagctgacgaaaataaaaatgtccagataattgtcactactcactcaacggtattagcttcatctgttgaacttgaatcaatcattcatttatctaaatcccataatccagttgccacaccgttgcgaaattgtggactaaaagaaaatagttctcagttcatcaaccgatggctggatgttacaaaatcgaatctattgtttgccagtggtgtgattttagtcgaagggattgccgaacaaatgttaataccggctctcgcaaaaagagtgcttagtaatcaaaatgacggtaaaagaagcctagaagacattggtgtttcaacaataaatctgaatggaatatattttaaacactttatgcaactatattgcaacgttaaatcagtcgatgatgtcgacgaagaaattaatggtgaaaatattccaattcgatgtgcaggtttaacagatttagatccaccaaagactattaaaaaaaaggttgcgggcctcgataacacagacgaaattaaggaaatcatcgaagatttcataccttatgatggaaacatcaaagatggtaataatcatgctatcaaactcgtagagtctattaataattcaagtaatgcacgattattcgtaagcaaatacaaaacactggaatatgatcttgccatggaaggaaataatgctgcgctgatgtcaaaaataattgcatcactgtggccaaaaccccagaaaggtgaaagtgaaataatcaatgatttcaatataatgtcaaatattgattggacaaaaaaaacaaataaagaagtcgcagaagctgcatataaaatcctaaatcgaattgacgatgataatattgggaaaggtatgttcgcacaagttatgacagaaaaactcaaagacccaacgttagactttattgttcctgcttatataagggatgcaattttgtgggcgacatcattagaagttggcggtgaaaaatga

SEQ ID NO: 77657 - DNA, 1779 bp, Yersinia enterocolitica
atgatggataaccaattcactgatgaacaaattaattatattaattcaagtattgataagcacatttttttggaagcttgtcctgggagtggtaaaactgaggtcgtagctgccaaactagcgaaggaaatatatatctggaataaaagaccaggggggatagctgtactttcttttgctaacagtgctacagaagaattaattaaaagagtatcaaaatactgtaatgcagggcaatccatatatcctcatttcattggcacatttgatagcttcatttacaaaaacatagtatctccattagcaacagaattaaccaattacacagggactgggaacgatgctacaattagaattgtagagccatctgcacaaatggggtacagaacaaaatatagttacgcaaaacgtggcaacatccatgcccatcactattctcacaaccttagaagcggaggtataatttttgagactggggatgcagtatttgatagagctttaaacaccctcaagttagagaattggcaaattcaggatttttcagagacaaaacgtagaatgctagatggaggtttcgcgacttaccgagatattgaatatttggctctgcgagctcttaatgaggaaagatttaagcattttgtcagtttattagcaaagcgctatccgctgattataattgatgaatgccaagacttatcggaagaacaattaactattttgcaaatactattaaatcaagggacaaaattgcaatttgtcggggatcttcatcaagctatttatggttttcgtgaagttgaacccgcgagagtaaaaaagtttattatcgataataattttaacattttagaattaacgagaaattttcgtagctgtcaaaatattgttaatctttgcgcaaagctcacaggtcgtaacaatatcaacggaaacgtaacttggctagatccaagatgcttagtcgttcaataccaaaatagcccaactgaactcacagatacctttgacagcatatgtaaaaattataataaaaacgtaatcgtctcaagaggccactcaaatttattaaagtttcaaacatccgaaaatgaattgaacaatatccaaaaacttgccctggccattagtatttataactcagacgatatgagtatgttaactaactccttgcaactattctcggaatttattcgccatcatcttaaagaaagctgcaaaacaaaagactttaattgcccgtattcggttaattcttctatttcctggcgtaaatttctgtgtgcatcattgagctacatgaatagtattggacttcaaaatatgaatatttcatggtctaattgggttaagcaagctaaatcttcaattcgtatactatcaagtaaagaattttgccctaccaatatttccgcagcattagcaccattagctagtgtaaacttaacttccccatcaggcttagccaacaaagaagtaaactctactttaggtacaatatccgaatcaacatcgctgtatggaagatctactattcatggtgctaaaggtgagacccatgatgtaacaatagtggtatcttccacccgttcaggtaaagattcacattggcttgactggctcagcgatccaaaaagtgaggctgccagattcgcttacgtggcatcatcaaggccacagcattatttaatttgggctgtgaaaacccttaaaaacgaagaaaaaaagaaacttgaggctattggttttactgttcttccactcgatactaatacatga

SEQ ID NO: 77658 - DNA, 1926 bp, Salmonella enterica; identical to SEQ ID NO: 72180
  subsp. enterica serovar Typhimurium str. DT104

SEQ ID NO: 77659 - DNA, 1662 bp, Salmonella enterica; identical to SEQ ID NO: 72181
  subsp. enterica serovar Typhimurium str. DT104

SEQ ID NO: 77660 - DNA, 2310 bp, Yersinia enterocolitica
gtgcatcttcactcgtatcgccttaggaactaccgacgcctaaaggatgctcatattgagctggctgacgatatttcaatattcgtaggatcgaataacagcggaaaaacgtcagcgactcaagcgattcatgcgttcgttacggggggtagggaccgtttcagcctctacgattttagttcctcatgttggaaaagtttcgatgaggctggaaatatcaatttggctgatccaatacccgaggagttctcccttccaagcatagatctcgatctttggttcgaggtcgcagcgccagatctctatctcgtgattccattgcttccaagtacagcgtgggaaggcactaaagtcggcataagagtttccctgaccgcgaaaaactccattaacctcattcaaaacttccaagaagctaaagccagaggggctgcacaggcagcggaactgccgccaggttcgcaatatactccatggcctcgatccatgacggactatcttcagcgcgagctcaagagcgaatatgagttgcgctacttcatcttggatcgcacgcgattcgatgagacgaccttccgcgagattggcaattacgttccagatgaattaagtggagagccaggcggcggaacaattttaaaatcgcttattcatatcgacaatctgggagctcaacgacatcttgccgatcctaatccagaagccggcggaagatcagaagacctgtcaaagcgtttgagccgcttctataagcgcaaccttaatcaaagacaagacgatcatatagccctcaaggcgctattcgactctgagcaagcactcaaccttcacttggatggcgtattcaaaccaatgctggatcggctcgccaggcttggttatccgggcgtcaataatccgcgactgaagataatgtcagcactagaccccgctcacgtcatgagccaggacgcacgggttcattatcagatcggagatggcgaagacaccgccacccttcctgacagttataacggacttggattcaaaaatttgatctacatggttgtagagattctagactcccaagccaggtgggcgacgatggataatcgccctccgttgcatctgctttttgtggaggaaccagaggctcatctacacgcccaactccaacaggtcttcatccgcaatattcttgagcttctgaatatagagggcgacgacggaagcatttttggcagtcagatggtcatcacgactcactcgccgcacatcctttacgaacgaggcttcaagccgattcgctatttccgacgtaaaaagactggcaaaggacaggtgacagaagtcctgaatctatcggcgttctaccaatctcaaacagatgatcgtgattttttagaacgatatttgaaactgacacattgtgatctatttttctcagatgccgctattctcgttgaaggtaacgttgaaagattgctcctcccggtcatgattagaaagagcgcgaaaacactccgctcagcttgcctatgcgtcttagaggttggcggtgcctttgggcaccgtttccagtcactcatcgagtttctcggtctgaccacactgatcattactgatattgatagtgttgcccttaaagctcaggcggttgatgatgctgaggaggaagaactcgaagaatttgaagttccagccgacgcggaagacgatgctgcaggccaggcccaagacaatgggcaatatccaggcggtgaaccgatggttccagcatctaagaagaaatatggcaaagcctgtttacctagtacacagggcgccgcaacgtcgaaccaaactcttatcaaatggcttccggggaaactcacaatcgaagacttgcgcaacgcatctgaaacggaaaaaactcacgtattcgaaaacgatgcgaaggttcgcgttgcctatcagactgagcgggctattacctggaacggaaccaccgaaatcctgtgcggacgtacacttgaagaagatttcggcctcgaaaatccggactggtcccaagccatagcgagaaagcctttaggtttgattgtgaaaggaggagccgttagtcctgcagctcttgccgaaggccttcataaaaaggtttcgcgaaagagtttcgataaaacaaagtttgcgcttgcagttctcaccgaggacgaggaagcgtggcatgtgccggcttacatccgtgatggacttgtctggctgaaagacgaaatacggattgaactcgagactgttctgcccgaactcatagccgaagaagatgttgtgatgagaggtgggcatgagtag

SEQ ID NO: 77661 - DNA, 1956 bp, Yersinia enterocolitica
atgagtagccgagcaaataagccagacacccaggctgacatggatctgcggaactgccttagaaatgttccgccacgtagcttcattatgagggccggtgctggttcaggaaaaactacgtcgctgattaaaggcctgtcatcggtcatccaaatacacggcgataaactcaagaaaactcgccagcgcgttgcctgtattacctataccgagattgcggccggagagatttggagggacgtcggcagtgaccctctggttcacgtctcaacgatccatagctttatgtggctgctagctaaacctttccagaacgatattcgtgcttgggtatctgggcgcatcgtggaaaaaattgatgcacttgaagaaaaatgtgcaacctatggccccagagttcaacagcgcacgaaggataaggacgcccgagatttggagcgcctccgtcggcagtcggagcggatcgctgcagtcaaagggttccgatacggaacaggtagcaactacgcaaaaggtattcttggtcatgacgacattctgaaactcgtttcctaccttatttcccaacaccctctcttccgaacccttatcgcacgccagtttccgttcgtctttgtggacgagagccaagacactacgactgaagtcgtacaagctttgaagagcgttgagagtgaacccggagttacattttgccttggcttctttggcgacccgatgcaacgaatatatgttacaggaaccggacaagttgaagcagaacctacttgggttgacattccgaaacctgaaaatttccggtgctcaactaaggtgttaaacctcgcgaacgccattcgtcgtgatggtgatgacctcgttcagacccctggccaacgtctaggtccacaaggtatcattccaatcccagagggttcagcacacctttttattttgcctgcagatgaaacacgggacgccaatctcgttcgtgtacgtgaatggatggcaacacggacaggtgacgattactggcgatcaggtgatgatgatcaggcgcgagtaaagcttctcgtcattgttcaccagatggccgcaaggcgtttaggatttggggacctctatgctgcacttaactctaaggctccatcagcgttcaaagatggttttttagacggttctgcatggcctatttcatcgtgtgtaaagtttttgatcccgatcactatcgcgcataccaatggccaacaacttgaagtgatgcggttgatccgagagtattcacttcttcttgataaagagtctcttggtggggcgagcgtggcggagcgccttaacgtactcggcgaacttgttgcttcgatctcagcaggcatagcgggacattccggagcaacaatcggggatcttctcaaacaagtaaattcctccgatttactagtccttgaccctagattgatatcgtatctggatccaaatgcagttcttcctgttcaacctgagcccgaagcaggcgagaacaatgacgacgatgttcaagaaaacggtgaaactgataaggaaatggcctcaatggatgctttcttggcatgccctgcaagccaacttttgccataccatacctacatttcggaacgttctcccttttggactcaacaaggcataaaaggtgctgagttcgatagggtacttgtcgttctggatgacgccgaaagtaaccatttccaattctcctacgaaaaatacctcgggcttgaggagccctcaaataacgaccagaaacatatggatgccggtgaagaaacaactatggatcgaacgcgtcgacttttctatgtgagttgcacaagggcgttaaaagacctggctgttgttctttttaccgccaatcccaagcaagcagaggctcacatacgtcaacttgatctttttgaagatgaagccatccatactcaaggtgttttcgagatgacataa

SEQ ID NO: 77662 - DNA, 1926 bp, Salmonella enterica; identical to SEQ ID NO: 72180
  subsp. enterica serovar Typhimurium str. DT104

SEQ ID NO: 77663 - DNA, 1662 bp, Salmonella enterica; identical to SEQ ID NO: 72181
  subsp. enterica serovar Typhimurium str. DT104

SEQ ID NO: 77664 - DNA, 1926 bp, Salmonella enterica; identical to SEQ ID NO: 72180
  subsp. enterica serovar Typhimurium str. DT104

SEQ ID NO: 77665 - DNA, 1662 bp, Salmonella enterica; identical to SEQ ID NO: 72181
  subsp. enterica serovar Typhimurium str. DT104

SEQ ID NO: 77666 - DNA, 1926 bp, Salmonella enterica; identical to SEQ ID NO: 72180
  subsp. enterica serovar Typhimurium str. DT104

SEQ ID NO: 77667 - DNA, 1662 bp, Salmonella enterica; identical to SEQ ID NO: 72181
  subsp. enterica serovar Typhimurium str. DT104

SEQ ID NO: 77668 - DNA, 1926 bp, Salmonella enterica; identical to SEQ ID NO: 72180
  subsp. enterica serovar Typhimurium str. DT104

SEQ ID NO: 77669 - DNA, 1662 bp, Salmonella enterica; identical to SEQ ID NO: 72181
  subsp. enterica serovar Typhimurium str. DT104

SEQ ID NO: 77670 - DNA, 1926 bp, Salmonella enterica; identical to SEQ ID NO: 72180
  subsp. enterica serovar Typhimurium str. DT104

SEQ ID NO: 77671 - DNA, 1662 bp, Salmonella enterica; identical to SEQ ID NO: 72181
  subsp. enterica serovar Typhimurium str. DT104

SEQ ID NO: 77672 - DNA, 1926 bp, Salmonella enterica; identical to SEQ ID NO: 72180
  subsp. enterica serovar Typhimurium str. DT104

SEQ ID NO: 77673 - DNA, 1662 bp, Salmonella enterica; identical to SEQ ID NO: 72181
  subsp. enterica serovar Typhimurium str. DT104

SEQ ID NO: 77674 - DNA, 1926 bp, Salmonella enterica; identical to SEQ ID NO: 72180
  subsp. enterica serovar Typhimurium str. DT104

SEQ ID NO: 77675 - DNA, 1662 bp, Salmonella enterica; identical to SEQ ID NO: 72181
  subsp. enterica serovar Typhimurium str. DT104

SEQ ID NO: 77676 - DNA, 1926 bp, Salmonella enterica; identical to SEQ ID NO: 72180
  subsp. enterica serovar Typhimurium str. DT104

SEQ ID NO: 77677 - DNA, 1662 bp, Salmonella enterica; identical to SEQ ID NO: 72181
  subsp. enterica serovar Typhimurium str. DT104

SEQ ID NO: 77678 - DNA, 1926 bp, Salmonella enterica; identical to SEQ ID NO: 72180
  subsp. enterica serovar Typhimurium str. DT104

SEQ ID NO: 77679 - DNA, 1662 bp, Salmonella enterica; identical to SEQ ID NO: 72181
  subsp. enterica serovar Typhimurium str. DT104

SEQ ID NO: 77680 - DNA, 1926 bp, Salmonella enterica; identical to SEQ ID NO: 72180
  subsp. enterica serovar Typhimurium str. DT104

SEQ ID NO: 77681 - DNA, 1662 bp, Salmonella enterica; identical to SEQ ID NO: 72181
  subsp. enterica serovar Typhimurium str. DT104

SEQ ID NO: 77682 - DNA, 1926 bp, Salmonella enterica; identical to SEQ ID NO: 72180
  subsp. enterica serovar Typhimurium str. DT104

SEQ ID NO: 77683 - DNA, 1662 bp, Salmonella enterica; identical to SEQ ID NO: 72181
  subsp. enterica serovar Typhimurium str. DT104

SEQ ID NO: 77684 - DNA, 1905 bp, Yersinia enterocolitica
atgtatctacatactataaaaatcaatgggttcaaatgctttgacaataatttttcgattgaattgagcgatggtcttaacgtcttggttggtgagaacggagcaggtaaaacggctatcattagcgctatccgtcaactgtttaatgattcagaatcgggtaaacgcgccattcgtgaccgagatttctaccgtagttttatccataatgcagttgctgctgaatctattcatattgaagcaacgtttactgagctcaaccaagatgaaagcactgcctttattgattggtgtgggcaggaaccagaagcgaaactgacattttcagcagcgaatcgtgagtcacgtgggcactaccgacaccagatttggggcggggctcaacgtatcaaaccggtagagattgaagttctcgatcttatccattgcatctacctgccaccattacgtgatgctgaagtcaaactgagagaagggaggcaatcccgcctggcacgtctattgaaagcattgtgtcgaaaggaactagaggactgtcgcaaggctggggctgtccatccgcttgagcaacgcgtaggagcatttaataaggagctggctgaaagcgaagattatgccattaagcaggccaatcagaggattggagataacctcaaggaagcgttgggcatgaatttgtcccagagtactatcatccaattttcggaggtcaatttttctaaaatcgttgaaggactcaggctgctgtattatcccgatctctcagatgctgatgccacgcaattccgttctttggaagaaaacagccttggatacaataatctgctatatatcgcttcaatcttggctgagctgatcctggatgtcgaagaagagcaagtcgagaaaacataccttcgtctgttgttgattgaggaacccgaggctcacctgcatcctcagctacaaatccgtctactgcggcatttgaaggctgtagcagaggcgcggggtattcaggttattattacgactcactcgactgttatctcgtccgcagtgtctattaacaatatcatccatatttcacgggcggataaacctaccgctatccctttgcgtcattgcgggctacctgacgcaagccggcgatttattgaccgctggctggatgtcactaagtctaatttactgttttctaaaggcgtaattctggtagaaggtattgccgaagccattgttgttcctgaactggcccgtatcgtgttgcaggcatatgggaaagggcgtgattccttggatgactatggtgtatcggtaatcaatctaaacggtatctactttaaccatttcatgcagttattttgcgatgtcaaggggacagaggagagcagaagtattccagttcgttgtgcagggctgacagacaatgatccgcccaaatcgattgagaagattgttaatgaggaaggcaaggaaacgtccatgccttatcttccacacgcggaagctttccaggccggtaacaatcctgcgctgacattgattccgcttatcgcacagtcacagtatgcaaggctgtacgcagggaaatacaaaaccttcgaatacgacattgcactagaagggaataacttgcgcaagatgtttgagatagcggcagctcattggccaacaagagggccagttgaagcagtcttgcgagcaagttctgagttaagttttgctgagatgcctaacgcagaaaaagctgagtacgcttggtatcttctacagcgcattgattcggatgatatgggcaaaggactctatgcccaagttttagccgatgctctggttgagcaccttgaggacttcgtggtccctgaatacattcgcgaagccatcctgtgggcttgcaacatcccacaagagattgtcgcatga

SEQ ID NO: 77685 - DNA, 1743 bp, Yersinia enterocolitica
atgatgacgctaactgaagagcagcaagcctacatcgatgccccactcaacgaacatatttatctgagggcttgcccaggaagtggcaaaactgaagttgttgctgctcgtgttacccgtgcaatacgtgactggcaacaattcccgtccggtattgctgtactgaccttctgtaacagtgccacagatgagctgaaagaacgcctgactgaataccttggtgagccggtctcacaccctcactgtatctcaactttcgacagtttcctgttaacacatatagtggcaaagatcgctagccagataaccggatatacggggaaaaatggggattttcgtattcgtctgttagacaggtcggctgatatttttcgtacgaacacaaggatctgtggaagaacaatatctgcctgcaagtatgactacgatctggacagtaatagcttcgtgttctctactggcgaactgacagatattgcactcaacgcagctgtgttgagtgcagagaacatgcgagatttaatcgataccaaaaagaggctctggagagagggatttgcgacctacagagatatcgacatgctcgccctcatggcgtttaagaacgaggcattcggggaatactttgctagggtggctcgtcggtttccggtagtgattgtagatgagtgtcaggacctctccgcagaacagttagctgttatcaggtacctagaccgtctagggataagatttcattttgttggtgatctgaatcagtccatctatggtttcagaaagtcagatccagcgcgcgtacagaaattgctgaatgatttgcatttcagagagttcgcgctaagcgccaactggcgcagcagtcaggcaattgccaatctttgcagtgatttgctcaatgttggaagaggggctggaaacccagatattgaatcacttaaaccaaagatcattcaatatcagcggtgtccatcggagctaactcaacggattaccgaacttacacaaggctacgaaaatgttgtggttgtcgccaggggccacagtacgctccaacgtttaacgcgtggcgtgacattaaacactgtggaagaactggccatgtcatgtgtgtcggtggagagtaaaaatctagagagagttagactcgccctcaattcgttttcccagtggattgcattaaaattatcgctcgaagtggcaccgatgaacctttaccgccccattgaaattgattcaacattggtttggcgacagttcattctcaactgtctgaagtttctcagtatttgtggagcatcagacgttgagttgacgtgggcgcagtgggcagccatcacaaagcgagccatacgacaacttcctgaccaaccgttcataccgattgaaatcgcggagaaattatccggtttgaaaaagatcaatctttcggcaccttcaggccaagggtctgacaaattgtccactcgcttatcgatggtagagctgcaaccagtagtaacgcatcgttatgcaacaatccatcaagtgaagggtgaaacgcatgatgcgactgttgttatctcttctctcaaatcaggtaaccagtcgcactggaaagactggcttaatgacccaagcaccgaagcggcacgtttcgcctatgtagcgagttctcggcctcggcatctgctaatatggggagttaaaacgcttaagccaacagaacagaaacgattagttcaactcgggtttgagatttgttaa

SEQ ID NO: 77686 - DNA, 1926 bp, Salmonella enterica; identical to SEQ ID NO: 72180
  subsp. enterica serovar Typhimurium str. DT104

SEQ ID NO: 77687 - DNA, 1662 bp, Salmonella enterica; identical to SEQ ID NO: 72181
  subsp. enterica serovar Typhimurium str. DT104

SEQ ID NO: 77688 - DNA, 1926 bp, Salmonella enterica; identical to SEQ ID NO: 72180
  subsp. enterica serovar Typhimurium str. DT104

SEQ ID NO: 77689 - DNA, 1662 bp, Salmonella enterica; identical to SEQ ID NO: 72181
  subsp. enterica serovar Typhimurium str. DT104

SEQ ID NO: 77690 - DNA, 1926 bp, Salmonella enterica; identical to SEQ ID NO: 72180
  subsp. enterica serovar Typhimurium str. DT104

SEQ ID NO: 77691 - DNA, 1662 bp, Salmonella enterica; identical to SEQ ID NO: 72181
  subsp. enterica serovar Typhimurium str. DT104

SEQ ID NO: 77692 - DNA, 1926 bp, Salmonella enterica; identical to SEQ ID NO: 72180
  subsp. enterica serovar Typhimurium str. DT104

SEQ ID NO: 77693 - DNA, 1662 bp, Salmonella enterica; identical to SEQ ID NO: 72181
  subsp. enterica serovar Typhimurium str. DT104

SEQ ID NO: 77694 - DNA, 1926 bp, Salmonella enterica; identical to SEQ ID NO: 72180
  subsp. enterica serovar Typhimurium str. DT104

SEQ ID NO: 77695 - DNA, 1662 bp, Salmonella enterica; identical to SEQ ID NO: 72181
  subsp. enterica serovar Typhimurium str. DT104

SEQ ID NO: 77696 - DNA, 1926 bp, Salmonella enterica; identical to SEQ ID NO: 72180
  subsp. enterica serovar Typhimurium str. DT104

SEQ ID NO: 77697 - DNA, 1662 bp, Salmonella enterica; identical to SEQ ID NO: 72181
  subsp. enterica serovar Typhimurium str. DT104

SEQ ID NO: 77698 - DNA, 1695 bp, Yersinia frederiksenii
ttggaaatatcatctctgaaactcaaaggttttagaaactttaaagatgcacacatcaattttaattcgaatactctgattatcggagctaatgatgttggcaaaagtaatatgctgcattcgttaagaatgctattagataaaagtgtatcagattcagaaattgaaccaaatgaacttgattttcatttagaaaatggaaaatcaagtgaagaatttcaaattattattcattttaaagatatcaatgaagatgcagtactttcaattttgaaagggagtgtcagtgactcaggtgaatcatttattaagtatgttgcacaaaaatctgatctcagctacaaactttttattggcgattctttagcgtctttacaagaaattaactctcgctattatcttaaattcattaatttaaaatatattcagtcacaacgagatttagagagatttatccgcaaagaaaaaagacaactcttaaaaatcgcacaacaatcattgaaccccgatgaaagagaagaagatgacgatttgttaggagagataagttcagatctacaattaattaatgataagatatcgcaacttatatatgtcgaaagagctacaaaggatgtcaacgatgagctaaaaaaacttgcacatcactactcagaatattctgtgcaactagatactggggcgattggaataaatgactttattgacaacctacaacttggagctaatacaaatggttctaacgtcatgcttggaggagacggtcggaacaatcaaattttattagcattatggaaagcgaaaagtatcaaggaacatgatatcgataacgaggttatcttttatgttatcgaagaaccagaagcacacttacaccctcaccaacaaagaaaactggccgattatttgatagctgaacttcctggtcaaacaatcatttcatcccattcgccgcaaatagctgtaaattttgaaccagactcagtaataagattgcttgatcgggctggacacactgtagccgcaagtgaaggatgttcgaaaggtatttcagatggctgggaaggaatgagctatcggatgagtatattgccagcagaatcatttttttcaaatggtgttttcttagtcgaagggccatcagaaattttattttaccaatgtttatccaaaagcttaggtattgacctagattatttaaatatttcaatagtttcagttgatggaatttcatttaaaatatatgtagctatacttgatgctctagaaataccatgggtgatgagaactgataacgatatatctaagataaaagacaagtggcaatatgcaggtataaatcggtgtttaggtatagcaggtatagataaatttgaacatagtgacgtccaaatagtacctatggatacattgaccaatggtgactggcaagcagtttctgaggaaataaataaacatggaatatacttatcaaaaattgatttagaaaatgatctgatagaggaattaagcgcaccaatattaaacgctttaggtaataaaaacaaccaaagtgcaatagagtacttacaaaagaaaaaagcattaagaatgcgtgtactacttaaagatataaaaaaagaccttcacaaacttaataccggtgaattagttaaaccgttaaaccaccttgtaacaataattaaaggtgaatga

SEQ ID NO: 77699 - DNA, 1626 bp, Yersinia frederiksenii
atgagtgctttctcaccaacacctcagcaaacattagccattgactacactggaagtatggtaataacagcatgtccgggaagtggtaaaaccacggttataaaagaaaaaataagaaatattaccgactgtcttccagagcataaaggggtcattgcaattacattcacaaggaaagcaagttcagaactggaacgtagatgcaaggctgaaggacacaatgtaaaacatagtttctttggtactattgatagcttttgcttaaaggaaataattattccatttctttcaaggctatggggaggaacaccaacagaatgcaaaatcttaaagaaactggaatctccatatagccatttcatagaaagcaatttttctggtacaccatcaattattaatatcaatgaggaccctggatataaaaaactatatgatgagggaatgttgtggatggggtcattctctgccttagcactaaaaatacttaatgaatcatctgctgcaaagcgatatatcaaagcgaggtatagccatatattcatagatgaatatcaagattcatctttatctcagcatcaactatttctaagaataaacgagcttggtttatgctccattgctgttggtgatgtttggcaatctatctatgaatttagaggaggaaattcagaacttcttttggaattggtcggtaaaacagaatactttaagcattttgagataaacttcaatcatagatgccacccctcaataggcaattatgcttcaagattgcttgacccagcctataatttgctaccgaccgatgaaataagaatgtttaggagacgacttggtggaaatattaaagatgctgctgttacgatttccccctggattttaggatggctggatagtggcgaatggaatttagagaaagcaaatcaaatagcaatcttagccagaaaagaaaagtcgttaaatttattctgctctggattaaaattaaactttaggctttatgttgacactcctctagataaaattggtactgattgctcagatctatacaaagatcttttagcatacaagtatggctctataagtacagctcaagaatttattaacaagttttttgatggaattataatagatgataacattcagttcttgctaagaaaaaaaataaaaacaattagagaagaactaaaaaatgaagatttaatatataagtttcacgatatcgcagatattctagggataaattccacagagcatactgatggcgctgtaataagaacaatttctgacgatatcttaatcaagcaattcaagccattagatgatagtgagatacaagtaatgactcttcataaatctaaaggattggagttcaaattagtatttcatctagatctagatgaatggtctttcccatatagagaatacaacagtgaggacagatatacacctctatatcctactcttcaacaagagttaaatctccactacgttggtataaccagagctgagaattgctgtatccttattaattcatctcttagagaaaatgcatctggggaatttaaaaaaacagatgaatcctacttcttcaaattaccacaattaaataatctatatacttaa

SEQ ID NO: 77700 - DNA, 1926 bp, Salmonella enterica; identical to SEQ ID NO: 72180
  subsp. enterica serovar Typhimurium str. DT104

SEQ ID NO: 77701 - DNA, 1662 bp, Salmonella enterica; identical to SEQ ID NO: 72181
  subsp. enterica serovar Typhimurium str. DT104

SEQ ID NO: 77702 - DNA, 1926 bp, Salmonella enterica; identical to SEQ ID NO: 72180
  subsp. enterica serovar Typhimurium str. DT104

SEQ ID NO: 77703 - DNA, 1662 bp, Salmonella enterica; identical to SEQ ID NO: 72181
  subsp. enterica serovar Typhimurium str. DT104

SEQ ID NO: 77704 - DNA, 1926 bp, Salmonella enterica; identical to SEQ ID NO: 72180
  subsp. enterica serovar Typhimurium str. DT104

SEQ ID NO: 77705 - DNA, 1662 bp, Salmonella enterica; identical to SEQ ID NO: 72181
  subsp. enterica serovar Typhimurium str. DT104

SEQ ID NO: 77706 - DNA, 1926 bp, Salmonella enterica; identical to SEQ ID NO: 72180
  subsp. enterica serovar Typhimurium str. DT104

SEQ ID NO: 77707 - DNA, 1662 bp, Salmonella enterica; identical to SEQ ID NO: 72181
  subsp. enterica serovar Typhimurium str. DT104

SEQ ID NO: 77708 - DNA, 1926 bp, Salmonella enterica; identical to SEQ ID NO: 72180
  subsp. enterica serovar Typhimurium str. DT104

SEQ ID NO: 77709 - DNA, 1662 bp, Salmonella enterica; identical to SEQ ID NO: 72181
  subsp. enterica serovar Typhimurium str. DT104

SEQ ID NO: 77710 - DNA, 1926 bp, Salmonella enterica; identical to SEQ ID NO: 72180
  subsp. enterica serovar Typhimurium str. DT104

SEQ ID NO: 77711 - DNA, 1662 bp, Salmonella enterica; identical to SEQ ID NO: 72181
  subsp. enterica serovar Typhimurium str. DT104

SEQ ID NO: 77712 - DNA, 1926 bp, Salmonella enterica; identical to SEQ ID NO: 72180
  subsp. enterica serovar Typhimurium str. DT104

SEQ ID NO: 77713 - DNA, 1662 bp, Salmonella enterica; identical to SEQ ID NO: 72181
  subsp. enterica serovar Typhimurium str. DT104

SEQ ID NO: 77714 - DNA, 1926 bp, Salmonella enterica; identical to SEQ ID NO: 72180
  subsp. enterica serovar Typhimurium str. DT104

SEQ ID NO: 77715 - DNA, 1662 bp, Salmonella enterica; identical to SEQ ID NO: 72181
  subsp. enterica serovar Typhimurium str. DT104

SEQ ID NO: 77716 - DNA, 1926 bp, Salmonella enterica; identical to SEQ ID NO: 72180
  subsp. enterica serovar Typhimurium str. DT104

SEQ ID NO: 77717 - DNA, 1662 bp, Salmonella enterica; identical to SEQ ID NO: 72181
  subsp. enterica serovar Typhimurium str. DT104

SEQ ID NO: 77718 - DNA, 1926 bp, Salmonella enterica; identical to SEQ ID NO: 72180
  subsp. enterica serovar Typhimurium str. DT104

SEQ ID NO: 77719 - DNA, 1662 bp, Salmonella enterica; identical to SEQ ID NO: 72181
  subsp. enterica serovar Typhimurium str. DT104

SEQ ID NO: 77720 - DNA, 1926 bp, Salmonella enterica; identical to SEQ ID NO: 72180
  subsp. enterica serovar Typhimurium str. DT104

SEQ ID NO: 77721 - DNA, 1662 bp, Salmonella enterica; identical to SEQ ID NO: 72181
  subsp. enterica serovar Typhimurium str. DT104

SEQ ID NO: 77722 - DNA, 1926 bp, Salmonella enterica; identical to SEQ ID NO: 72180
  subsp. enterica serovar Typhimurium str. DT104

SEQ ID NO: 77723 - DNA, 1662 bp, Salmonella enterica; identical to SEQ ID NO: 72181
  subsp. enterica serovar Typhimurium str. DT104

SEQ ID NO: 77724 - DNA, 1926 bp, Salmonella enterica; identical to SEQ ID NO: 72180
  subsp. enterica serovar Typhimurium str. DT104

SEQ ID NO: 77725 - DNA, 1662 bp, Salmonella enterica; identical to SEQ ID NO: 72181
  subsp. enterica serovar Typhimurium str. DT104

SEQ ID NO: 77726 - DNA, 1926 bp, Salmonella enterica; identical to SEQ ID NO: 72180
  subsp. enterica serovar Typhimurium str. DT104

SEQ ID NO: 77727 - DNA, 1662 bp, Salmonella enterica; identical to SEQ ID NO: 72181
  subsp. enterica serovar Typhimurium str. DT104

SEQ ID NO: 77728 - DNA, 1926 bp, Salmonella enterica; identical to SEQ ID NO: 72180
  subsp. enterica serovar Typhimurium str. DT104

SEQ ID NO: 77729 - DNA, 1662 bp, Salmonella enterica; identical to SEQ ID NO: 72181
  subsp. enterica serovar Typhimurium str. DT104

SEQ ID NO: 77730 - DNA, 1926 bp, Salmonella enterica; identical to SEQ ID NO: 72180
  subsp. enterica serovar Typhimurium str. DT104

SEQ ID NO: 77731 - DNA, 1662 bp, Salmonella enterica; identical to SEQ ID NO: 72181
  subsp. enterica serovar Typhimurium str. DT104

SEQ ID NO: 77732 - DNA, 1926 bp, Salmonella enterica; identical to SEQ ID NO: 72180
  subsp. enterica serovar Typhimurium str. DT104

SEQ ID NO: 77733 - DNA, 1662 bp, Salmonella enterica; identical to SEQ ID NO: 72181
  subsp. enterica serovar Typhimurium str. DT104

SEQ ID NO: 77734 - DNA, 1926 bp, Salmonella enterica; identical to SEQ ID NO: 72180
  subsp. enterica serovar Typhimurium str. DT104

SEQ ID NO: 77735 - DNA, 1662 bp, Salmonella enterica; identical to SEQ ID NO: 72181
  subsp. enterica serovar Typhimurium str. DT104

SEQ ID NO: 77736 - DNA, 2121 bp, Yersinia mollaretii
atgaaaatatgtagcatagagatcaagaattatcgtttgttaacagaatttcgattggatttagaagataatctttcgttagttattggaaaaaataacacaggtaaaacttctcttttatcagctttggagaagctttatgcagaaacgcgaaaaatctcatttgatgatttcaatgtcaagcttagggataggttaaaagcttttgttgggggagaaaaggctttacctaatgaagatgtgtacgagcctttaggggtggaattacggcttgtattagtatatgaggatgaagacgatcttgggcaagtatcacctttgatcatgagtctagatcctgatgataagtctatattgctcggatttgagtataaaatatctcacagtcaattagtatctttccgtaatgatttcctagaggagagggataattatgatgatgatgtgcttctctatatggcggaaaaacataaaaaatacttcggaggtatttccagaagaagttatctgagtaacgatctctctgtattcacagatttgattaaagaaaaaatttcactagatgaagtgatttcttttaaagctataagcgcaaaaagaaatgtcactaacagggagaatgacaaaactctatcaggacagacggccgatatatataaaataaccgaagagtctgaagaacagaaagatactgttaatcgcttcaagaaaactctacgtggggcagataagaatctaaatggaatatacgaggagatgttttctaaagttctgaaaagtgttgagcgcttcggaggtatttctcaatatgaaacctcaatcactatcgcttctacactgcagcaccaagagttgcttgatggcaatacaacggtgttttatcgtcatgaaactcatgatcttcctgagcattacaatggcttaggatacatgaatttgataagtatgatatttgaaatagagttattgatgacttcgttcagaagatcacttcttgaacgcccggcggctgttaatctgctcttcattgaagagcctgaggttcatacacatccacaaatgcagtatgtattcataaaaaatatcaaagatttgctagaggaaggagtcgtgcgtgaagatggattagttgtaaacttgcaaacagtgatttctacgcactcgtctcacattgtagctgaatgtaactttgatgatattaaatatatgaaacgtaaaggtggggtagttaactgcagtaacttgaaagatcttaaaaaagaatatgatcgagaagattctaaaggtattgatggtcattataaatttttgaagcaatatctgacgctgaaccgggccgaattattttttgccgataaagctattttcgtcgagggtgatacagagcgggttcttttgcctgcaatgatgaaaaaaatcgatgaagaatatcctgagaatgaagtcgcccccttaacttcccaaaacgtatctatcgtagaagtaggtgctcactctcaggtttttgaaaagttcataagttttcttggaatcaaaacattgatcctaacagatatcgacactggtaaaacagtgccggatttagatagtgcggggaaccacaagcgtacccaaaaagatgagcctaaatatacaacggaaaaatgttcgcctatggattctgatgttagtcacacttcgaataatgcgttgtgtttctttcacagcaaggaacgtgaagatattaagtattttctgagtttattcaaggatgacaagaaatttttatttgatggcgaaaaatgggttagagataaaatcggtcagattttcactgcatttcaaattgaagaagaaggttatcgagggcgaagtttcgaagatgctttttttcacgtaaataaagagtttttgggaacagactcggtcgtatttccgtcgcttatcgcaaagcattttgaactgtatgtagctggtcatacaacagcatatgagtttgctgagaaaggagtcgataaaaaaacgacacttgctatagatattttgctcaatagccaaactcaagaaacgccgaaacgaacattttccaattggaacacccctgcatatattcgggagggattggaatggctgcgcaaatga

SEQ ID NO: 77737 - DNA, 1716 bp, Yersinia mollaretii; identical to SEQ ID NO: 76411

SEQ ID NO: 77738 - DNA, 1926 bp, Salmonella enterica; identical to SEQ ID NO: 72180
  subsp. enterica serovar Typhimurium str. DT104

SEQ ID NO: 77739 - DNA, 1662 bp, Salmonella enterica; identical to SEQ ID NO: 72181
  subsp. enterica serovar Typhimurium str. DT104

SEQ ID NO: 77740 - DNA, 1926 bp, Salmonella enterica; identical to SEQ ID NO: 72180
  subsp. enterica serovar Typhimurium str. DT104

SEQ ID NO: 77741 - DNA, 1662 bp, Salmonella enterica; identical to SEQ ID NO: 72181
  subsp. enterica serovar Typhimurium str. DT104

SEQ ID NO: 77742 - DNA, 1926 bp, Salmonella enterica; identical to SEQ ID NO: 72180
  subsp. enterica serovar Typhimurium str. DT104

SEQ ID NO: 77743 - DNA, 1662 bp, Salmonella enterica; identical to SEQ ID NO: 72181
  subsp. enterica serovar Typhimurium str. DT104

SEQ ID NO: 77744 - DNA, 1926 bp, Salmonella enterica; identical to SEQ ID NO: 72180
  subsp. enterica serovar Typhimurium str. DT104

SEQ ID NO: 77745 - DNA, 1662 bp, Salmonella enterica; identical to SEQ ID NO: 72181
  subsp. enterica serovar Typhimurium str. DT104

SEQ ID NO: 77746 - DNA, 1926 bp, Salmonella enterica; identical to SEQ ID NO: 72180
  subsp. enterica serovar Typhimurium str. DT104

SEQ ID NO: 77747 - DNA, 1662 bp, Salmonella enterica; identical to SEQ ID NO: 72181
  subsp. enterica serovar Typhimurium str. DT104

SEQ ID NO: 77748 - DNA, 1926 bp, Salmonella enterica; identical to SEQ ID NO: 72180
  subsp. enterica serovar Typhimurium str. DT104

SEQ ID NO: 77749 - DNA, 1662 bp, Salmonella enterica; identical to SEQ ID NO: 72181
  subsp. enterica serovar Typhimurium str. DT104

SEQ ID NO: 77750 - DNA, 1926 bp, Salmonella enterica; identical to SEQ ID NO: 72180
  subsp. enterica serovar Typhimurium str. DT104

SEQ ID NO: 77751 - DNA, 1662 bp, Salmonella enterica; identical to SEQ ID NO: 72181
  subsp. enterica serovar Typhimurium str. DT104

SEQ ID NO: 77752 - DNA, 1926 bp, Salmonella enterica; identical to SEQ ID NO: 72180
  subsp. enterica serovar Typhimurium str. DT104

SEQ ID NO: 77753 - DNA, 1662 bp, Salmonella enterica; identical to SEQ ID NO: 72181
  subsp. enterica serovar Typhimurium str. DT104

SEQ ID NO: 77754 - DNA, 1926 bp, Salmonella enterica; identical to SEQ ID NO: 72180
  subsp. enterica serovar Typhimurium str. DT104

SEQ ID NO: 77755 - DNA, 1662 bp, Salmonella enterica; identical to SEQ ID NO: 72181
  subsp. enterica serovar Typhimurium str. DT104

SEQ ID NO: 77756 - DNA, 1926 bp, Salmonella enterica; identical to SEQ ID NO: 72180
  subsp. enterica serovar Typhimurium str. DT104

SEQ ID NO: 77757 - DNA, 1662 bp, Salmonella enterica; identical to SEQ ID NO: 72181
  subsp. enterica serovar Typhimurium str. DT104

SEQ ID NO: 77758 - DNA, 1926 bp, Salmonella enterica; identical to SEQ ID NO: 72180
  subsp. enterica serovar Typhimurium str. DT104

SEQ ID NO: 77759 - DNA, 1662 bp, Salmonella enterica; identical to SEQ ID NO: 72181
  subsp. enterica serovar Typhimurium str. DT104

SEQ ID NO: 77760 - DNA, 1926 bp, Salmonella enterica; identical to SEQ ID NO: 72180
  subsp. enterica serovar Typhimurium str. DT104

SEQ ID NO: 77761 - DNA, 1662 bp, Salmonella enterica; identical to SEQ ID NO: 72181
  subsp. enterica serovar Typhimurium str. DT104

SEQ ID NO: 77762 - DNA, 1926 bp, Salmonella enterica; identical to SEQ ID NO: 72180
  subsp. enterica serovar Typhimurium str. DT104

SEQ ID NO: 77763 - DNA, 1662 bp, Salmonella enterica; identical to SEQ ID NO: 72181
  subsp. enterica serovar Typhimurium str. DT104

SEQ ID NO: 77764 - DNA, 1926 bp, Salmonella enterica; identical to SEQ ID NO: 72180
  subsp. enterica serovar Typhimurium str. DT104

SEQ ID NO: 77765 - DNA, 1662 bp, Salmonella enterica; identical to SEQ ID NO: 72181
  subsp. enterica serovar Typhimurium str. DT104

SEQ ID NO: 77766 - DNA, 1926 bp, Salmonella enterica; identical to SEQ ID NO: 72180
  subsp. enterica serovar Typhimurium str. DT104

SEQ ID NO: 77767 - DNA, 1662 bp, Salmonella enterica; identical to SEQ ID NO: 72181
  subsp. enterica serovar Typhimurium str. DT104

SEQ ID NO: 77768 - DNA, 1926 bp, Salmonella enterica; identical to SEQ ID NO: 72180
  subsp. enterica serovar Typhimurium str. DT104

SEQ ID NO: 77769 - DNA, 1662 bp, Salmonella enterica; identical to SEQ ID NO: 72181
  subsp. enterica serovar Typhimurium str. DT104

SEQ ID NO: 77770 - DNA, 1926 bp, Salmonella enterica; identical to SEQ ID NO: 72180
  subsp. enterica serovar Typhimurium str. DT104

SEQ ID NO: 77771 - DNA, 1662 bp, Salmonella enterica; identical to SEQ ID NO: 72181
  subsp. enterica serovar Typhimurium str. DT104

SEQ ID NO: 77772 - DNA, 1926 bp, Salmonella enterica; identical to SEQ ID NO: 72180
  subsp. enterica serovar Typhimurium str. DT104

SEQ ID NO: 77773 - DNA, 1662 bp, Salmonella enterica; identical to SEQ ID NO: 72181
  subsp. enterica serovar Typhimurium str. DT104

SEQ ID NO: 77774 - DNA, 1926 bp, Salmonella enterica; identical to SEQ ID NO: 72180
  subsp. enterica serovar Typhimurium str. DT104

SEQ ID NO: 77775 - DNA, 1662 bp, Salmonella enterica; identical to SEQ ID NO: 72181
  subsp. enterica serovar Typhimurium str. DT104

SEQ ID NO: 77776 - DNA, 1926 bp, Salmonella enterica; identical to SEQ ID NO: 72180
  subsp. enterica serovar Typhimurium str. DT104

SEQ ID NO: 77777 - DNA, 1662 bp, Salmonella enterica; identical to SEQ ID NO: 72181
  subsp. enterica serovar Typhimurium str. DT104

SEQ ID NO: 77778 - DNA, 1926 bp, Salmonella enterica; identical to SEQ ID NO: 72180
  subsp. enterica serovar Typhimurium str. DT104

SEQ ID NO: 77779 - DNA, 1662 bp, Salmonella enterica; identical to SEQ ID NO: 72181
  subsp. enterica serovar Typhimurium str. DT104

SEQ ID NO: 77780 - DNA, 1926 bp, Salmonella enterica; identical to SEQ ID NO: 72180
  subsp. enterica serovar Typhimurium str. DT104

SEQ ID NO: 77781 - DNA, 1662 bp, Salmonella enterica; identical to SEQ ID NO: 72181
  subsp. enterica serovar Typhimurium str. DT104

SEQ ID NO: 77782 - DNA, 1926 bp, Salmonella enterica; identical to SEQ ID NO: 72180
  subsp. enterica serovar Typhimurium str. DT104

SEQ ID NO: 77783 - DNA, 1662 bp, Salmonella enterica; identical to SEQ ID NO: 72181
  subsp. enterica serovar Typhimurium str. DT104

SEQ ID NO: 77784 - DNA, 1926 bp, Salmonella enterica; identical to SEQ ID NO: 72180
  subsp. enterica serovar Typhimurium str. DT104

SEQ ID NO: 77785 - DNA, 1662 bp, Salmonella enterica; identical to SEQ ID NO: 72181
  subsp. enterica serovar Typhimurium str. DT104

SEQ ID NO: 77786 - DNA, 1926 bp, Salmonella enterica; identical to SEQ ID NO: 72180
  subsp. enterica serovar Typhimurium str. DT104

SEQ ID NO: 77787 - DNA, 1662 bp, Salmonella enterica; identical to SEQ ID NO: 72181
  subsp. enterica serovar Typhimurium str. DT104

SEQ ID NO: 77788 - DNA, 1926 bp, Salmonella enterica; identical to SEQ ID NO: 72180
  subsp. enterica serovar Typhimurium str. DT104

SEQ ID NO: 77789 - DNA, 1662 bp, Salmonella enterica; identical to SEQ ID NO: 72181
  subsp. enterica serovar Typhimurium str. DT104

SEQ ID NO: 77790 - DNA, 1926 bp, Salmonella enterica; identical to SEQ ID NO: 72180
  subsp. enterica serovar Typhimurium str. DT104

SEQ ID NO: 77791 - DNA, 1662 bp, Salmonella enterica; identical to SEQ ID NO: 72181
  subsp. enterica serovar Typhimurium str. DT104

SEQ ID NO: 77792 - DNA, 1926 bp, Salmonella enterica; identical to SEQ ID NO: 72180
  subsp. enterica serovar Typhimurium str. DT104

SEQ ID NO: 77793 - DNA, 1662 bp, Salmonella enterica; identical to SEQ ID NO: 72181
  subsp. enterica serovar Typhimurium str. DT104

SEQ ID NO: 77794 - DNA, 1926 bp, Salmonella enterica; identical to SEQ ID NO: 72180
  subsp. enterica serovar Typhimurium str. DT104

SEQ ID NO: 77795 - DNA, 1662 bp, Salmonella enterica; identical to SEQ ID NO: 72181
  subsp. enterica serovar Typhimurium str. DT104

SEQ ID NO: 77796 - DNA, 1926 bp, Salmonella enterica; identical to SEQ ID NO: 72180
  subsp. enterica serovar Typhimurium str. DT104

SEQ ID NO: 77797 - DNA, 1662 bp, Salmonella enterica; identical to SEQ ID NO: 72181
  subsp. enterica serovar Typhimurium str. DT104

SEQ ID NO: 77798 - DNA, 1926 bp, Salmonella enterica; identical to SEQ ID NO: 72180
  subsp. enterica serovar Typhimurium str. DT104

SEQ ID NO: 77799 - DNA, 1662 bp, Salmonella enterica; identical to SEQ ID NO: 72181
  subsp. enterica serovar Typhimurium str. DT104

SEQ ID NO: 77800 - DNA, 1926 bp, Salmonella enterica; identical to SEQ ID NO: 72180
  subsp. enterica serovar Typhimurium str. DT104

SEQ ID NO: 77801 - DNA, 1662 bp, Salmonella enterica; identical to SEQ ID NO: 72181
  subsp. enterica serovar Typhimurium str. DT104

SEQ ID NO: 77802 - DNA, 1926 bp, Salmonella enterica; identical to SEQ ID NO: 72180
  subsp. enterica serovar Typhimurium str. DT104

SEQ ID NO: 77803 - DNA, 1662 bp, Salmonella enterica; identical to SEQ ID NO: 72181
  subsp. enterica serovar Typhimurium str. DT104

SEQ ID NO: 77804 - DNA, 1926 bp, Salmonella enterica; identical to SEQ ID NO: 72180
  subsp. enterica serovar Typhimurium str. DT104

SEQ ID NO: 77805 - DNA, 1662 bp, Salmonella enterica; identical to SEQ ID NO: 72181
  subsp. enterica serovar Typhimurium str. DT104

SEQ ID NO: 77806 - DNA, 1926 bp, Salmonella enterica; identical to SEQ ID NO: 72180
  subsp. enterica serovar Typhimurium str. DT104

SEQ ID NO: 77807 - DNA, 1662 bp, Salmonella enterica; identical to SEQ ID NO: 72181
  subsp. enterica serovar Typhimurium str. DT104

SEQ ID NO: 77808 - DNA, 1926 bp, Salmonella enterica; identical to SEQ ID NO: 72180
  subsp. enterica serovar Typhimurium str. DT104

SEQ ID NO: 77809 - DNA, 1662 bp, Salmonella enterica; identical to SEQ ID NO: 72181
  subsp. enterica serovar Typhimurium str. DT104

SEQ ID NO: 77810 - DNA, 1926 bp, Salmonella enterica; identical to SEQ ID NO: 72180
  subsp. enterica serovar Typhimurium str. DT104

SEQ ID NO: 77811 - DNA, 1662 bp, Salmonella enterica; identical to SEQ ID NO: 72181
  subsp. enterica serovar Typhimurium str. DT104

SEQ ID NO: 77812 - DNA, 1926 bp, Salmonella enterica; identical to SEQ ID NO: 72180
  subsp. enterica serovar Typhimurium str. DT104

SEQ ID NO: 77813 - DNA, 1662 bp, Salmonella enterica; identical to SEQ ID NO: 72181
  subsp. enterica serovar Typhimurium str. DT104

SEQ ID NO: 77814 - DNA, 1926 bp, Salmonella enterica; identical to SEQ ID NO: 72180
  subsp. enterica serovar Typhimurium str. DT104

SEQ ID NO: 77815 - DNA, 1662 bp, Salmonella enterica; identical to SEQ ID NO: 72181
  subsp. enterica serovar Typhimurium str. DT104

SEQ ID NO: 77816 - DNA, 1926 bp, Salmonella enterica; identical to SEQ ID NO: 72180
  subsp. enterica serovar Typhimurium str. DT104

SEQ ID NO: 77817 - DNA, 1662 bp, Salmonella enterica; identical to SEQ ID NO: 72181
  subsp. enterica serovar Typhimurium str. DT104

SEQ ID NO: 77818 - DNA, 1926 bp, Salmonella enterica; identical to SEQ ID NO: 72180
  subsp. enterica serovar Typhimurium str. DT104

SEQ ID NO: 77819 - DNA, 1662 bp, Salmonella enterica; identical to SEQ ID NO: 72181
  subsp. enterica serovar Typhimurium str. DT104

SEQ ID NO: 77820 - DNA, 1926 bp, Salmonella enterica; identical to SEQ ID NO: 72180
  subsp. enterica serovar Typhimurium str. DT104

SEQ ID NO: 77821 - DNA, 1662 bp, Salmonella enterica; identical to SEQ ID NO: 72181
  subsp. enterica serovar Typhimurium str. DT104

SEQ ID NO: 77822 - DNA, 1926 bp, Salmonella enterica; identical to SEQ ID NO: 72180
  subsp. enterica serovar Typhimurium str. DT104

SEQ ID NO: 77823 - DNA, 1662 bp, Salmonella enterica; identical to SEQ ID NO: 72181
  subsp. enterica serovar Typhimurium str. DT104

SEQ ID NO: 77824 - DNA, 1926 bp, Salmonella enterica; identical to SEQ ID NO: 72180
  subsp. enterica serovar Typhimurium str. DT104

SEQ ID NO: 77825 - DNA, 1662 bp, Salmonella enterica; identical to SEQ ID NO: 72181
  subsp. enterica serovar Typhimurium str. DT104

SEQ ID NO: 77826 - DNA, 1926 bp, Salmonella enterica; identical to SEQ ID NO: 72180
  subsp. enterica serovar Typhimurium str. DT104

SEQ ID NO: 77827 - DNA, 1662 bp, Salmonella enterica; identical to SEQ ID NO: 72181
  subsp. enterica serovar Typhimurium str. DT104

SEQ ID NO: 77828 - DNA, 1926 bp, Salmonella enterica; identical to SEQ ID NO: 72180
  subsp. enterica serovar Typhimurium str. DT104

SEQ ID NO: 77829 - DNA, 1662 bp, Salmonella enterica; identical to SEQ ID NO: 72181
  subsp. enterica serovar Typhimurium str. DT104

SEQ ID NO: 77830 - DNA, 1926 bp, Salmonella enterica; identical to SEQ ID NO: 72180
  subsp. enterica serovar Typhimurium str. DT104

SEQ ID NO: 77831 - DNA, 1662 bp, Salmonella enterica; identical to SEQ ID NO: 72181
  subsp. enterica serovar Typhimurium str. DT104

SEQ ID NO: 77832 - DNA, 1926 bp, Salmonella enterica; identical to SEQ ID NO: 72180
  subsp. enterica serovar Typhimurium str. DT104

SEQ ID NO: 77833 - DNA, 1662 bp, Salmonella enterica; identical to SEQ ID NO: 72181
  subsp. enterica serovar Typhimurium str. DT104

SEQ ID NO: 77834 - DNA, 1926 bp, Salmonella enterica; identical to SEQ ID NO: 72180
  subsp. enterica serovar Typhimurium str. DT104

SEQ ID NO: 77835 - DNA, 1662 bp, Salmonella enterica; identical to SEQ ID NO: 72181
  subsp. enterica serovar Typhimurium str. DT104

SEQ ID NO: 77836 - DNA, 1926 bp, Salmonella enterica; identical to SEQ ID NO: 72180
  subsp. enterica serovar Typhimurium str. DT104

SEQ ID NO: 77837 - DNA, 1662 bp, Salmonella enterica; identical to SEQ ID NO: 72181
  subsp. enterica serovar Typhimurium str. DT104

SEQ ID NO: 77838 - DNA, 1926 bp, Salmonella enterica; identical to SEQ ID NO: 72180
  subsp. enterica serovar Typhimurium str. DT104

SEQ ID NO: 77839 - DNA, 1662 bp, Salmonella enterica; identical to SEQ ID NO: 72181
  subsp. enterica serovar Typhimurium str. DT104

SEQ ID NO: 77840 - DNA, 1926 bp, Salmonella enterica; identical to SEQ ID NO: 72180
  subsp. enterica serovar Typhimurium str. DT104

SEQ ID NO: 77841 - DNA, 1662 bp, Salmonella enterica; identical to SEQ ID NO: 72181
  subsp. enterica serovar Typhimurium str. DT104

SEQ ID NO: 77842 - DNA, 1926 bp, Salmonella enterica; identical to SEQ ID NO: 72180
  subsp. enterica serovar Typhimurium str. DT104

SEQ ID NO: 77843 - DNA, 1662 bp, Salmonella enterica; identical to SEQ ID NO: 72181
  subsp. enterica serovar Typhimurium str. DT104

SEQ ID NO: 77844 - DNA, 1926 bp, Salmonella enterica; identical to SEQ ID NO: 72180
  subsp. enterica serovar Typhimurium str. DT104

SEQ ID NO: 77845 - DNA, 1662 bp, Salmonella enterica; identical to SEQ ID NO: 72181
  subsp. enterica serovar Typhimurium str. DT104

SEQ ID NO: 77846 - DNA, 1926 bp, Salmonella enterica; identical to SEQ ID NO: 72180
  subsp. enterica serovar Typhimurium str. DT104

SEQ ID NO: 77847 - DNA, 1662 bp, Salmonella enterica; identical to SEQ ID NO: 72181
  subsp. enterica serovar Typhimurium str. DT104

SEQ ID NO: 77848 - DNA, 1926 bp, Salmonella enterica; identical to SEQ ID NO: 72180
  subsp. enterica serovar Typhimurium str. DT104

SEQ ID NO: 77849 - DNA, 1662 bp, Salmonella enterica; identical to SEQ ID NO: 72181
  subsp. enterica serovar Typhimurium str. DT104

SEQ ID NO: 77850 - DNA, 1926 bp, Salmonella enterica; identical to SEQ ID NO: 72180
  subsp. enterica serovar Typhimurium str. DT104

SEQ ID NO: 77851 - DNA, 1662 bp, Salmonella enterica; identical to SEQ ID NO: 72181
  subsp. enterica serovar Typhimurium str. DT104

SEQ ID NO: 77852 - DNA, 1926 bp, Salmonella enterica; identical to SEQ ID NO: 72180
  subsp. enterica serovar Typhimurium str. DT104

SEQ ID NO: 77853 - DNA, 1662 bp, Salmonella enterica; identical to SEQ ID NO: 72181
  subsp. enterica serovar Typhimurium str. DT104

SEQ ID NO: 77854 - DNA, 1926 bp, Salmonella enterica; identical to SEQ ID NO: 72180
  subsp. enterica serovar Typhimurium str. DT104

SEQ ID NO: 77855 - DNA, 1662 bp, Salmonella enterica; identical to SEQ ID NO: 72181
  subsp. enterica serovar Typhimurium str. DT104

SEQ ID NO: 77856 - DNA, 1926 bp, Salmonella enterica; identical to SEQ ID NO: 72180
  subsp. enterica serovar Typhimurium str. DT104

SEQ ID NO: 77857 - DNA, 1662 bp, Salmonella enterica; identical to SEQ ID NO: 72181
  subsp. enterica serovar Typhimurium str. DT104

SEQ ID NO: 77858 - DNA, 1926 bp, Salmonella enterica; identical to SEQ ID NO: 72180
  subsp. enterica serovar Typhimurium str. DT104

SEQ ID NO: 77859 - DNA, 1662 bp, Salmonella enterica; identical to SEQ ID NO: 72181
  subsp. enterica serovar Typhimurium str. DT104

SEQ ID NO: 77860 - DNA, 1926 bp, Salmonella enterica; identical to SEQ ID NO: 72180
  subsp. enterica serovar Typhimurium str. DT104

SEQ ID NO: 77861 - DNA, 1662 bp, Salmonella enterica; identical to SEQ ID NO: 72181
  subsp. enterica serovar Typhimurium str. DT104

SEQ ID NO: 77862 - DNA, 1926 bp, Salmonella enterica; identical to SEQ ID NO: 72180
  subsp. enterica serovar Typhimurium str. DT104

SEQ ID NO: 77863 - DNA, 1662 bp, Salmonella enterica; identical to SEQ ID NO: 72181
  subsp. enterica serovar Typhimurium str. DT104

SEQ ID NO: 77864 - DNA, 1926 bp, Salmonella enterica; identical to SEQ ID NO: 72180
  subsp. enterica serovar Typhimurium str. DT104

SEQ ID NO: 77865 - DNA, 1662 bp, Salmonella enterica; identical to SEQ ID NO: 72181
  subsp. enterica serovar Typhimurium str. DT104

SEQ ID NO: 77866 - DNA, 1926 bp, Salmonella enterica; identical to SEQ ID NO: 72180
  subsp. enterica serovar Typhimurium str. DT104

SEQ ID NO: 77867 - DNA, 1662 bp, Salmonella enterica; identical to SEQ ID NO: 72181
  subsp. enterica serovar Typhimurium str. DT104

SEQ ID NO: 77868 - DNA, 1926 bp, Salmonella enterica; identical to SEQ ID NO: 72180
  subsp. enterica serovar Typhimurium str. DT104

SEQ ID NO: 77869 - DNA, 1662 bp, Salmonella enterica; identical to SEQ ID NO: 72181
  subsp. enterica serovar Typhimurium str. DT104

SEQ ID NO: 77870 - DNA, 1926 bp, Salmonella enterica; identical to SEQ ID NO: 72180
  subsp. enterica serovar Typhimurium str. DT104

SEQ ID NO: 77871 - DNA, 1662 bp, Salmonella enterica; identical to SEQ ID NO: 72181
  subsp. enterica serovar Typhimurium str. DT104

SEQ ID NO: 77872 - DNA, 1926 bp, Salmonella enterica; identical to SEQ ID NO: 72180
  subsp. enterica serovar Typhimurium str. DT104

SEQ ID NO: 77873 - DNA, 1662 bp, Salmonella enterica; identical to SEQ ID NO: 72181
  subsp. enterica serovar Typhimurium str. DT104

SEQ ID NO: 77874 - DNA, 1926 bp, Salmonella enterica; identical to SEQ ID NO: 72180
  subsp. enterica serovar Typhimurium str. DT104

SEQ ID NO: 77875 - DNA, 1662 bp, Salmonella enterica; identical to SEQ ID NO: 72181
  subsp. enterica serovar Typhimurium str. DT104

SEQ ID NO: 77876 - DNA, 1926 bp, Salmonella enterica; identical to SEQ ID NO: 72180
  subsp. enterica serovar Typhimurium str. DT104

SEQ ID NO: 77877 - DNA, 1662 bp, Salmonella enterica; identical to SEQ ID NO: 72181
  subsp. enterica serovar Typhimurium str. DT104

SEQ ID NO: 77878 - DNA, 1926 bp, Salmonella enterica; identical to SEQ ID NO: 72180
  subsp. enterica serovar Typhimurium str. DT104

SEQ ID NO: 77879 - DNA, 1662 bp, Salmonella enterica; identical to SEQ ID NO: 72181
  subsp. enterica serovar Typhimurium str. DT104

SEQ ID NO: 77880 - DNA, 1926 bp, Salmonella enterica; identical to SEQ ID NO: 72180
  subsp. enterica serovar Typhimurium str. DT104

SEQ ID NO: 77881 - DNA, 1662 bp, Salmonella enterica; identical to SEQ ID NO: 72181
  subsp. enterica serovar Typhimurium str. DT104

SEQ ID NO: 77882 - DNA, 1926 bp, Salmonella enterica; identical to SEQ ID NO: 72180
  subsp. enterica serovar Typhimurium str. DT104

SEQ ID NO: 77883 - DNA, 1662 bp, Salmonella enterica; identical to SEQ ID NO: 72181
  subsp. enterica serovar Typhimurium str. DT104

SEQ ID NO: 77884 - DNA, 1926 bp, Salmonella enterica; identical to SEQ ID NO: 72180
  subsp. enterica serovar Typhimurium str. DT104

SEQ ID NO: 77885 - DNA, 1662 bp, Salmonella enterica; identical to SEQ ID NO: 72181
  subsp. enterica serovar Typhimurium str. DT104

SEQ ID NO: 77886 - DNA, 1926 bp, Salmonella enterica; identical to SEQ ID NO: 72180
  subsp. enterica serovar Typhimurium str. DT104

SEQ ID NO: 77887 - DNA, 1662 bp, Salmonella enterica; identical to SEQ ID NO: 72181
  subsp. enterica serovar Typhimurium str. DT104

SEQ ID NO: 77888 - DNA, 1926 bp, Salmonella enterica; identical to SEQ ID NO: 72180
  subsp. enterica serovar Typhimurium str. DT104

SEQ ID NO: 77889 - DNA, 1662 bp, Salmonella enterica; identical to SEQ ID NO: 72181
  subsp. enterica serovar Typhimurium str. DT104

SEQ ID NO: 77890 - DNA, 1926 bp, Salmonella enterica; identical to SEQ ID NO: 72180
  subsp. enterica serovar Typhimurium str. DT104

SEQ ID NO: 77891 - DNA, 1662 bp, Salmonella enterica; identical to SEQ ID NO: 72181
  subsp. enterica serovar Typhimurium str. DT104

SEQ ID NO: 77892 - DNA, 1926 bp, Salmonella enterica; identical to SEQ ID NO: 72180
  subsp. enterica serovar Typhimurium str. DT104

SEQ ID NO: 77893 - DNA, 1662 bp, Salmonella enterica; identical to SEQ ID NO: 72181
  subsp. enterica serovar Typhimurium str. DT104

SEQ ID NO: 77894 - DNA, 1980 bp, Yersinia pseudotuberculosis; identical to SEQ ID NO: 76634

SEQ ID NO: 77895 - DNA, 1848 bp, Yersinia pseudotuberculosis
atgccaataataaaagatgataattgggttctaaaagacatccaagaagttgaagacgaggctatgagggtaatacggaatagtacaaatcataatctcgttcttgctggtcccggtgcaggtaaaaccgaattattggctcagaaagcatgttttttgatagaaactgggaaatgtagaaataaaaaaattatcgcattatcctttaaaaaagatgcggcaaaaaaccttcaggatcgtgttaactcccggcttgattcaaaatataggcataaatttgaatcaaccacgttcgatgcattctgtaaaagtattgttgatcgatttaagagtacacttccagtggcgtatcggccttcagatgattatgaaatatattttcctgaaaataaaaaattcgtagaagaggttaaacgagatgccgttggttttgagggactgactgcggaggaacttaagaaattaaaacataccaatttcgaaaataattatatcgttatgccttataaaaagggtgaagagcattcagtagatgctcgtattaaacgatttgtttggttccgtttactggaaggaaaatccagagtttcgtttaaaatgataaactttctttcaaattatatcataagaaataataaatttctttcgaatgctattaattcgacttacgaatatgctttcattgatgagtttcaagatactacttatcaacaatacgaaattttcaaaagtatctttttagataaaaaaataaaaataacagctgtaggtgatactaaacaaagaatcatggggtgggcgggagcattgcatagtgcatttgagttttttaaaaatgactttgcgattgaacatcataatgaattattgagtaatagaagatcgctaaaaaaccttataagttatcaacgcatgatggaggctttcatgaatcatgctgataataaacctgagatggagttaatcgagaatgaaggttcagcgaagttaatacaatttgatgaaagcaatatagaaggggcatacatagcattatgtatccaaaaatggattgaagaaggggttgatgaaagagaaatatgtatcttattcagaaatccgtctaagcattacacggataaaatcatctcatctctacagtacttggaaataaagtgccgcatcgaaaatacttatcaggaattactcaatgaagcaatagttcagttaatcttaaaaatgctaatgtttacctgcgataaaaagtcgattgaaggctggaattctacaatggaacttttatgcaacataagaggggtaaacaaaagcagagatattactcgtttggaaaaagagcttagtcgttttataaaatcgaacaaggacatcaatggaaatgttgttgattatatatatggattaataagtatatttggtatcgatgagatcaagtcttacttccctcaatatataagtggaaatggcttagaccatgctattaattctctttcacaaaatctagaaaccttaggtatcaaagataataaatcagcagctattgatatgttactcggaaataaaacgataccacttatgacgattcataaaagtaaaggtttggagtttaaaaaggtcatcatcgtcggtcttgaacctggtgcatattttggcgatgaagaagagcagatagaaaatcaaaaaacagtctttatggggttttcaagagcgattgaagaggtcatattaactcgctgtgcaaaaagagttaactggtgggatgaactatgttctcaaaatttttctgagatcccattgataacggatatgctaagctactgtggtcttgaagctgagatttataaagattaa

SEQ ID NO: 77896 - DNA, 2295 bp, Yersinia mollaretii
atgtacatccagcacgtagagatatctaacttccgaaaactactttccgtgcgaattgacttcgctaatgagaccacgctgcttgtaggtgcaaacaacagcggcaaatcctctgccatgctggcactccggagatttttggtttctaaggcttcagcttttcggctccaggatctgactctttgtcatctcgccaagctggatgagattggtaaagtgtgggagaacgcgccgaaaaactttgaaatccctacagccaaggactgggctgactggctccctagcctggatatctgggtgtcggcagatcaaggggagttccactacatccgggatctcatacccaactttgcgtggcgcggggggctagtgggaatgcgttttctgcttgaacctgatgatatgaatacgctgtacacggactatcgtaaggagcgtacgagggttgtagagcttgaggatgctctagagaaggaagaaccacccggtagtccgctgaagctatggccgcagagcctacatgattatctgagccgtcggctgggagataaattcaaaatacgttggtaccgcctagatccgcaacaacttaagaagcctgacaagtcgactagaatggcgcaaatgcagcaattgagccctactgccttgcccttagaaagcaatcctctcagtagattaattcgagtacatgaaatcaatgcacagcggggattcgccgaccactcggacgacaatcaaggagataacactagacccagcggcactcgaaaactctcggaacaactcagatcttattactcccgacaccttgacccaggtgacagcccagatgtttcagacctcgaagcattgcgggcgatagaagcagcccagtcggcattcgatacgaagctaggtagcagcttcgaacttgctattagagaggtcgagggattgggctaccctggccgtaatgacccacgcataaaagtcgcaagtcgcctggcaacaactgacggcatgaaccatgaagcggccgtcctttttgagttggattcaatccagggtgccccaggagcccctcctcttcatttaccagagaccgctaacgggttgggatatcaaaacctgatatctatgattttccagctgatgggcttcagggacgagtggctgagaaaaaccagggccgccagcacggaagtaatagaccgcgtcgagcccatccacctcgtgctcattgaagagcctgaagcccaccttcatgttcaagtgcagcaagtgttcgtgcggcacgcctaccaagttctatgccgagacgctttgcttgaacgctacccaaatctgaagactcagcttttggtgagcactcactccagccatgtaacacatgaagtggagtaccagaaccttaggtatttcaggcgactcccagccgggatgtatggcatcggtgtaccagtgtcgacggtctctaatctctctaacgtgttcggcgagggaacaaagacgaaggagttcgtaaccaggtatctgcgggcacagcatgcagacatattcttcgccgacgccgtcatcttggtagagggttcagcagagcgaatgatgctgccgcattttttgcgaaataagtttccattccttgaccgctgctacatcacaaccctcgatatcggtggcagtcacgcacaccgattaaggcctttaattgacgcccttggcatcctcaccctggttattacagacctcgatgcagggcttaataaagctgcaaaaccggtgcaaagaaacacaaatcagattacgaacaatccgacattgcggagctggatgaaactgatgcatctaggcagcacagtggatgaactgcttgagctaccagcgcaccaaaaagagcaccaaatcgacgacctgtactcggtacgcatcgcctatcaaactcctatttccaccctcctgcccgctactggtgaagcaatacaagctcttccaaatacctttgaagacagctttgtgcttagcaacgctggtcactttgcggaaaagacaaacggcacgggtctgatgaaggctttcgtaaaagttttgactgaagcgcaaacatcggaagccgtcggagaaggttttttcaacgaattacgcgaaggaaagaaagcagagtttgtgttgctcgttttgggcgacaaaaactttcccagcctcgaaatccctgagtacatcattgaaggcctcaactggcttgagtccaaattgcgaagcaagcaaaaagagcttctggtaattccgcccgagggcgcggaggtgacgccatga

SEQ ID NO: 77897 - DNA, 1848 bp, Yersinia mollaretii
atgaacgaggcagctgtcgcagatgccgacaccattatgcaggcttgcctgaatctggcagatccgaagagttttttcctttacgcaggtgcgggctcaggaaaaacccactcactcgtcgaggctatccgcgaactcaaaagccgcgagcgagaacgcctgacgttcgaggggcggtgcattgcggtgattacctatacaaacgcagcctgcgaggagattcttcgaaggctagagtttgatccactcgtggaagtctctaccattcacgcgttcgcctggcgcctaatccaaggattcgacaacgagatcagagagtggctaaggatcaaacttgcccaggacattgagaagatcgagggcgagctagcacgctcgagaggcgacaataaaacatctcgagcaaaccgacggaagctacaaagcaaaatacgcagacttgagactctcgacgagattactaagttcatctacagccctacaagtaacaacagagaacgacaagcactcaatcacgatgaggtcatcaagttgagcgcagcattcgctcctgaacgccctttgttggatgttctagtagaccgctacccagttgtattgatcgacgaaagccaagacacccacgctccagtaatggaagcttttctgaaagtccagcaattggcgcagacacgcttctgcctgggactactcggcgacaccatgcaacagatttacggtcatggagtaacgcgccttgataaagcaataccaggtgactggcggaaacctgaaaagatcgttaatcgccgctgtcctcgtagagtggtagaccttatcaacgtgattcgaagcgccgtagacactcatcagcagaccccaaagcctgatgccattcaaggtgttgtgcgcatgtactgcattaatcaaaaccaagaacaggcaccaaatcttgaggaaggcatcgctcattcgatggctgcaatcaccgacgacggtgaatgggctaccggccctaaaggccgaaagaccttgatcctcgaacataagatggctgggcggcggatggggttcgagaagctgttcacgtccttacacgcggttgagcaccttcaaacaggcttgttggatggaaccctgcccgcacttcgcattttcagcgaaggcgttcttcccatccttaccgcaaaggacgatcacttccttctacttgaagcagtacgctctcgctcttccttgctcagcaaggacgctatgcaatcaacaggggatcaatcggcccacatgcaacgtgtagaggacgcgacgcacgccctgctctctcttttcgaaggaaacgatccaacactgagcgaagtcgcaacgcttttgttgcaaacccaactgcttgatgtccctgaaaatctggttggggcaatggtgttgggagctcctggtgaggcgcccgatcctgaagatacgaacgcgataaccaattatgcctatcagctatttcttgagcgcccattttcggagctggcagcttttgcgacttatacagatggcctttcaccctatggtacgcaccaaggcgtaaagggactcgagtaccctcgagttatggttgtcatcaacgatgatgaggcggacggctttttgttcagctacgacaaattgctgggtgtgaaagaaccaacaaaaactgatcgagacaatgagcgtgatggcaaggacaacgcactagctcgtactcgcaggcttctctacgtaacgtgtagtcgtgctgaaaatagcttagcgattgtcgtatacacacctcagccggcactggccaagcgaaacgttgttgctgctggctggctccaagagaacgaggtcgaaatcctatga

SEQ ID NO: 77898 - DNA, 1926 bp, Salmonella enterica; identical to SEQ ID NO: 72180
  subsp. enterica serovar Typhimurium str. DT104

SEQ ID NO: 77899 - DNA, 1662 bp, Salmonella enterica; identical to SEQ ID NO: 72181
  subsp. enterica serovar Typhimurium str. DT104

SEQ ID NO: 77900 - DNA, 1926 bp, Salmonella enterica; identical to SEQ ID NO: 72180
  subsp. enterica serovar Typhimurium str. DT104

SEQ ID NO: 77901 - DNA, 1662 bp, Salmonella enterica; identical to SEQ ID NO: 72181
  subsp. enterica serovar Typhimurium str. DT104

SEQ ID NO: 77902 - DNA, 1926 bp, Salmonella enterica; identical to SEQ ID NO: 72180
  subsp. enterica serovar Typhimurium str. DT104

SEQ ID NO: 77903 - DNA, 1662 bp, Salmonella enterica; identical to SEQ ID NO: 72181
  subsp. enterica serovar Typhimurium str. DT104

SEQ ID NO: 77904 - DNA, 1926 bp, Salmonella enterica; identical to SEQ ID NO: 72180
  subsp. enterica serovar Typhimurium str. DT104

SEQ ID NO: 77905 - DNA, 1662 bp, Salmonella enterica; identical to SEQ ID NO: 72181
  subsp. enterica serovar Typhimurium str. DT104

SEQ ID NO: 77906 - DNA, 1926 bp, Salmonella enterica; identical to SEQ ID NO: 72180
  subsp. enterica serovar Typhimurium str. DT104

SEQ ID NO: 77907 - DNA, 1662 bp, Salmonella enterica; identical to SEQ ID NO: 72181
  subsp. enterica serovar Typhimurium str. DT104

SEQ ID NO: 77908 - DNA, 1926 bp, Salmonella enterica; identical to SEQ ID NO: 72180
  subsp. enterica serovar Typhimurium str. DT104

SEQ ID NO: 77909 - DNA, 1662 bp, Salmonella enterica; identical to SEQ ID NO: 72181
  subsp. enterica serovar Typhimurium str. DT104

SEQ ID NO: 77910 - DNA, 1926 bp, Salmonella enterica; identical to SEQ ID NO: 72180
  subsp. enterica serovar Typhimurium str. DT104

SEQ ID NO: 77911 - DNA, 1662 bp, Salmonella enterica; identical to SEQ ID NO: 72181
  subsp. enterica serovar Typhimurium str. DT104

SEQ ID NO: 77912 - DNA, 1926 bp, Salmonella enterica; identical to SEQ ID NO: 72180
  subsp. enterica serovar Typhimurium str. DT104

SEQ ID NO: 77913 - DNA, 1662 bp, Salmonella enterica; identical to SEQ ID NO: 72181
  subsp. enterica serovar Typhimurium str. DT104

SEQ ID NO: 77914 - DNA, 1926 bp, Salmonella enterica; identical to SEQ ID NO: 72180
  subsp. enterica serovar Typhimurium str. DT104

SEQ ID NO: 77915 - DNA, 1662 bp, Salmonella enterica; identical to SEQ ID NO: 72181
  subsp. enterica serovar Typhimurium str. DT104

SEQ ID NO: 77916 - DNA, 1926 bp, Salmonella enterica; identical to SEQ ID NO: 72180
  subsp. enterica serovar Typhimurium str. DT104

SEQ ID NO: 77917 - DNA, 1662 bp, Salmonella enterica; identical to SEQ ID NO: 72181
  subsp. enterica serovar Typhimurium str. DT104

SEQ ID NO: 77918 - DNA, 1926 bp, Salmonella enterica; identical to SEQ ID NO: 72180
  subsp. enterica serovar Typhimurium str. DT104

SEQ ID NO: 77919 - DNA, 1662 bp, Salmonella enterica; identical to SEQ ID NO: 72181
  subsp. enterica serovar Typhimurium str. DT104

SEQ ID NO: 77920 - DNA, 1926 bp, Salmonella enterica; identical to SEQ ID NO: 72180
  subsp. enterica serovar Typhimurium str. DT104

SEQ ID NO: 77921 - DNA, 1662 bp, Salmonella enterica; identical to SEQ ID NO: 72181
  subsp. enterica serovar Typhimurium str. DT104

SEQ ID NO: 77922 - DNA, 1926 bp, Salmonella enterica; identical to SEQ ID NO: 72180
  subsp. enterica serovar Typhimurium str. DT104

SEQ ID NO: 77923 - DNA, 1662 bp, Salmonella enterica; identical to SEQ ID NO: 72181
  subsp. enterica serovar Typhimurium str. DT104

SEQ ID NO: 77924 - DNA, 1926 bp, Salmonella enterica; identical to SEQ ID NO: 72180
  subsp. enterica serovar Typhimurium str. DT104

SEQ ID NO: 77925 - DNA, 1662 bp, Salmonella enterica; identical to SEQ ID NO: 72181
  subsp. enterica serovar Typhimurium str. DT104

SEQ ID NO: 77926 - DNA, 1926 bp, Salmonella enterica; identical to SEQ ID NO: 72180
  subsp. enterica serovar Typhimurium str. DT104

SEQ ID NO: 77927 - DNA, 1662 bp, Salmonella enterica; identical to SEQ ID NO: 72181
  subsp. enterica serovar Typhimurium str. DT104

SEQ ID NO: 77928 - DNA, 1926 bp, Salmonella enterica; identical to SEQ ID NO: 72180
  subsp. enterica serovar Typhimurium str. DT104

SEQ ID NO: 77929 - DNA, 1662 bp, Salmonella enterica; identical to SEQ ID NO: 72181
  subsp. enterica serovar Typhimurium str. DT104

SEQ ID NO: 77930 - DNA, 1926 bp, Salmonella enterica; identical to SEQ ID NO: 72180
  subsp. enterica serovar Typhimurium str. DT104

SEQ ID NO: 77931 - DNA, 1662 bp, Salmonella enterica; identical to SEQ ID NO: 72181
  subsp. enterica serovar Typhimurium str. DT104

SEQ ID NO: 77932 - DNA, 1926 bp, Salmonella enterica; identical to SEQ ID NO: 72180
  subsp. enterica serovar Typhimurium str. DT104

SEQ ID NO: 77933 - DNA, 1662 bp, Salmonella enterica; identical to SEQ ID NO: 72181
  subsp. enterica serovar Typhimurium str. DT104

SEQ ID NO: 77934 - DNA, 1926 bp, Salmonella enterica; identical to SEQ ID NO: 72180
  subsp. enterica serovar Typhimurium str. DT104

SEQ ID NO: 77935 - DNA, 1662 bp, Salmonella enterica; identical to SEQ ID NO: 72181
  subsp. enterica serovar Typhimurium str. DT104

SEQ ID NO: 77936 - DNA, 1926 bp, Salmonella enterica; identical to SEQ ID NO: 72180
  subsp. enterica serovar Typhimurium str. DT104

SEQ ID NO: 77937 - DNA, 1662 bp, Salmonella enterica; identical to SEQ ID NO: 72181
  subsp. enterica serovar Typhimurium str. DT104

SEQ ID NO: 77938 - DNA, 1926 bp, Salmonella enterica; identical to SEQ ID NO: 72180
  subsp. enterica serovar Typhimurium str. DT104

SEQ ID NO: 77939 - DNA, 1662 bp, Salmonella enterica; identical to SEQ ID NO: 72181
  subsp. enterica serovar Typhimurium str. DT104

SEQ ID NO: 77940 - DNA, 1926 bp, Salmonella enterica; identical to SEQ ID NO: 72180
  subsp. enterica serovar Typhimurium str. DT104

SEQ ID NO: 77941 - DNA, 1662 bp, Salmonella enterica; identical to SEQ ID NO: 72181
  subsp. enterica serovar Typhimurium str. DT104

SEQ ID NO: 77942 - DNA, 1926 bp, Salmonella enterica; identical to SEQ ID NO: 72180
  subsp. enterica serovar Typhimurium str. DT104

SEQ ID NO: 77943 - DNA, 1662 bp, Salmonella enterica; identical to SEQ ID NO: 72181
  subsp. enterica serovar Typhimurium str. DT104

SEQ ID NO: 77944 - DNA, 1926 bp, Salmonella enterica; identical to SEQ ID NO: 72180
  subsp. enterica serovar Typhimurium str. DT104

SEQ ID NO: 77945 - DNA, 1662 bp, Salmonella enterica; identical to SEQ ID NO: 72181
  subsp. enterica serovar Typhimurium str. DT104

SEQ ID NO: 77946 - DNA, 1926 bp, Salmonella enterica; identical to SEQ ID NO: 72180
  subsp. enterica serovar Typhimurium str. DT104

SEQ ID NO: 77947 - DNA, 1662 bp, Salmonella enterica; identical to SEQ ID NO: 72181
  subsp. enterica serovar Typhimurium str. DT104

SEQ ID NO: 77948 - DNA, 1755 bp, Streptococcus agalactiae; identical to SEQ ID NO: 72792

SEQ ID NO: 77949 - DNA, 1542 bp, Streptococcus agalactiae; identical to SEQ ID NO: 72793

SEQ ID NO: 77950 - DNA, 1926 bp, Salmonella enterica; identical to SEQ ID NO: 72180
  subsp. enterica serovar Typhimurium str. DT104

SEQ ID NO: 77951 - DNA, 1662 bp, Salmonella enterica; identical to SEQ ID NO: 72181
  subsp. enterica serovar Typhimurium str. DT104

SEQ ID NO: 77952 - DNA, 1926 bp, Salmonella enterica; identical to SEQ ID NO: 72180
  subsp. enterica serovar Typhimurium str. DT104

SEQ ID NO: 77953 - DNA, 1662 bp, Salmonella enterica; identical to SEQ ID NO: 72181
  subsp. enterica serovar Typhimurium str. DT104

SEQ ID NO: 77954 - DNA, 1926 bp, Salmonella enterica; identical to SEQ ID NO: 72180
  subsp. enterica serovar Typhimurium str. DT104

SEQ ID NO: 77955 - DNA, 1662 bp, Salmonella enterica; identical to SEQ ID NO: 72181
  subsp. enterica serovar Typhimurium str. DT104

SEQ ID NO: 77956 - DNA, 1926 bp, Salmonella enterica; identical to SEQ ID NO: 72180
  subsp. enterica serovar Typhimurium str. DT104

SEQ ID NO: 77957 - DNA, 1662 bp, Salmonella enterica; identical to SEQ ID NO: 72181
  subsp. enterica serovar Typhimurium str. DT104

SEQ ID NO: 77958 - DNA, 1926 bp, Salmonella enterica; identical to SEQ ID NO: 72180
  subsp. enterica serovar Typhimurium str. DT104

SEQ ID NO: 77959 - DNA, 1662 bp, Salmonella enterica; identical to SEQ ID NO: 72181
  subsp. enterica serovar Typhimurium str. DT104

SEQ ID NO: 77960 - DNA, 1926 bp, Salmonella enterica; identical to SEQ ID NO: 72180
  subsp. enterica serovar Typhimurium str. DT104

SEQ ID NO: 77961 - DNA, 1662 bp, Salmonella enterica; identical to SEQ ID NO: 72181
  subsp. enterica serovar Typhimurium str. DT104

SEQ ID NO: 77962 - DNA, 1926 bp, Salmonella enterica; identical to SEQ ID NO: 72180
  subsp. enterica serovar Typhimurium str. DT104

SEQ ID NO: 77963 - DNA, 1662 bp, Salmonella enterica; identical to SEQ ID NO: 72181
  subsp. enterica serovar Typhimurium str. DT104

SEQ ID NO: 77964 - DNA, 1926 bp, Salmonella enterica; identical to SEQ ID NO: 72180
  subsp. enterica serovar Typhimurium str. DT104

SEQ ID NO: 77965 - DNA, 1662 bp, Salmonella enterica; identical to SEQ ID NO: 72181
  subsp. enterica serovar Typhimurium str. DT104

SEQ ID NO: 77966 - DNA, 1926 bp, Salmonella enterica; identical to SEQ ID NO: 72180
  subsp. enterica serovar Typhimurium str. DT104

SEQ ID NO: 77967 - DNA, 1662 bp, Salmonella enterica; identical to SEQ ID NO: 72181
  subsp. enterica serovar Typhimurium str. DT104

SEQ ID NO: 77968 - DNA, 1926 bp, Salmonella enterica; identical to SEQ ID NO: 72180
  subsp. enterica serovar Typhimurium str. DT104

SEQ ID NO: 77969 - DNA, 1662 bp, Salmonella enterica; identical to SEQ ID NO: 72181
  subsp. enterica serovar Typhimurium str. DT104

SEQ ID NO: 77970 - DNA, 1926 bp, Salmonella enterica; identical to SEQ ID NO: 72180
  subsp. enterica serovar Typhimurium str. DT104

SEQ ID NO: 77971 - DNA, 1662 bp, Salmonella enterica; identical to SEQ ID NO: 72181
  subsp. enterica serovar Typhimurium str. DT104

SEQ ID NO: 77972 - DNA, 1926 bp, Salmonella enterica; identical to SEQ ID NO: 72180
  subsp. enterica serovar Typhimurium str. DT104

SEQ ID NO: 77973 - DNA, 1662 bp, Salmonella enterica; identical to SEQ ID NO: 72181
  subsp. enterica serovar Typhimurium str. DT104

SEQ ID NO: 77974 - DNA, 1926 bp, Salmonella enterica; identical to SEQ ID NO: 72180
  subsp. enterica serovar Typhimurium str. DT104

SEQ ID NO: 77975 - DNA, 1662 bp, Salmonella enterica; identical to SEQ ID NO: 72181
  subsp. enterica serovar Typhimurium str. DT104

SEQ ID NO: 77976 - DNA, 1926 bp, Salmonella enterica; identical to SEQ ID NO: 72180
  subsp. enterica serovar Typhimurium str. DT104

SEQ ID NO: 77977 - DNA, 1662 bp, Salmonella enterica; identical to SEQ ID NO: 72181
  subsp. enterica serovar Typhimurium str. DT104

SEQ ID NO: 77978 - DNA, 1926 bp, Salmonella enterica; identical to SEQ ID NO: 72180
  subsp. enterica serovar Typhimurium str. DT104

SEQ ID NO: 77979 - DNA, 1662 bp, Salmonella enterica; identical to SEQ ID NO: 72181
  subsp. enterica serovar Typhimurium str. DT104

SEQ ID NO: 77980 - DNA, 1926 bp, Salmonella enterica; identical to SEQ ID NO: 72180
  subsp. enterica serovar Typhimurium str. DT104

SEQ ID NO: 77981 - DNA, 1662 bp, Salmonella enterica; identical to SEQ ID NO: 72181
  subsp. enterica serovar Typhimurium str. DT104

SEQ ID NO: 77982 - DNA, 1926 bp, Salmonella enterica; identical to SEQ ID NO: 72180
  subsp. enterica serovar Typhimurium str. DT104

SEQ ID NO: 77983 - DNA, 1662 bp, Salmonella enterica; identical to SEQ ID NO: 72181
  subsp. enterica serovar Typhimurium str. DT104

SEQ ID NO: 77984 - DNA, 1926 bp, Salmonella enterica; identical to SEQ ID NO: 72180
  subsp. enterica serovar Typhimurium str. DT104

SEQ ID NO: 77985 - DNA, 1662 bp, Salmonella enterica; identical to SEQ ID NO: 72181
  subsp. enterica serovar Typhimurium str. DT104

SEQ ID NO: 77986 - DNA, 1926 bp, Salmonella enterica; identical to SEQ ID NO: 72180
  subsp. enterica serovar Typhimurium str. DT104

SEQ ID NO: 77987 - DNA, 1662 bp, Salmonella enterica; identical to SEQ ID NO: 72181
  subsp. enterica serovar Typhimurium str. DT104

SEQ ID NO: 77988 - DNA, 1926 bp, Salmonella enterica; identical to SEQ ID NO: 72180
  subsp. enterica serovar Typhimurium str. DT104

SEQ ID NO: 77989 - DNA, 1662 bp, Salmonella enterica; identical to SEQ ID NO: 72181
  subsp. enterica serovar Typhimurium str. DT104

SEQ ID NO: 77990 - DNA, 1926 bp, Salmonella enterica; identical to SEQ ID NO: 72180
  subsp. enterica serovar Typhimurium str. DT104

SEQ ID NO: 77991 - DNA, 1662 bp, Salmonella enterica; identical to SEQ ID NO: 72181
  subsp. enterica serovar Typhimurium str. DT104

SEQ ID NO: 77992 - DNA, 1926 bp, Salmonella enterica; identical to SEQ ID NO: 72180
  subsp. enterica serovar Typhimurium str. DT104

SEQ ID NO: 77993 - DNA, 1662 bp, Salmonella enterica; identical to SEQ ID NO: 72181
  subsp. enterica serovar Typhimurium str. DT104

SEQ ID NO: 77994 - DNA, 1926 bp, Salmonella enterica; identical to SEQ ID NO: 72180
  subsp. enterica serovar Typhimurium str. DT104

SEQ ID NO: 77995 - DNA, 1662 bp, Salmonella enterica; identical to SEQ ID NO: 72181
  subsp. enterica serovar Typhimurium str. DT104

SEQ ID NO: 77996 - DNA, 1926 bp, Salmonella enterica; identical to SEQ ID NO: 72180
  subsp. enterica serovar Typhimurium str. DT104

SEQ ID NO: 77997 - DNA, 1662 bp, Salmonella enterica; identical to SEQ ID NO: 72181
  subsp. enterica serovar Typhimurium str. DT104

SEQ ID NO: 77998 - DNA, 1926 bp, Salmonella enterica; identical to SEQ ID NO: 72180
  subsp. enterica serovar Typhimurium str. DT104

SEQ ID NO: 77999 - DNA, 1662 bp, Salmonella enterica; identical to SEQ ID NO: 72181
  subsp. enterica serovar Typhimurium str. DT104

SEQ ID NO: 78000 - DNA, 1926 bp, Salmonella enterica; identical to SEQ ID NO: 72180
  subsp. enterica serovar Typhimurium str. DT104

SEQ ID NO: 78001 - DNA, 1662 bp, Salmonella enterica; identical to SEQ ID NO: 72181
  subsp. enterica serovar Typhimurium str. DT104

SEQ ID NO: 78002 - DNA, 1926 bp, Salmonella enterica; identical to SEQ ID NO: 72180
  subsp. enterica serovar Typhimurium str. DT104

SEQ ID NO: 78003 - DNA, 1662 bp, Salmonella enterica; identical to SEQ ID NO: 72181
  subsp. enterica serovar Typhimurium str. DT104

SEQ ID NO: 78004 - DNA, 1926 bp, Salmonella enterica; identical to SEQ ID NO: 72180
  subsp. enterica serovar Typhimurium str. DT104

SEQ ID NO: 78005 - DNA, 1662 bp, Salmonella enterica; identical to SEQ ID NO: 72181
  subsp. enterica serovar Typhimurium str. DT104

SEQ ID NO: 78006 - DNA, 1926 bp, Salmonella enterica; identical to SEQ ID NO: 72180
  subsp. enterica serovar Typhimurium str. DT104

SEQ ID NO: 78007 - DNA, 1662 bp, Salmonella enterica; identical to SEQ ID NO: 72181
  subsp. enterica serovar Typhimurium str. DT104

SEQ ID NO: 78008 - DNA, 1926 bp, Salmonella enterica; identical to SEQ ID NO: 72180
  subsp. enterica serovar Typhimurium str. DT104

SEQ ID NO: 78009 - DNA, 1662 bp, Salmonella enterica; identical to SEQ ID NO: 72181
  subsp. enterica serovar Typhimurium str. DT104

SEQ ID NO: 78010 - DNA, 1926 bp, Salmonella enterica; identical to SEQ ID NO: 72180
  subsp. enterica serovar Typhimurium str. DT104

SEQ ID NO: 78011 - DNA, 1662 bp, Salmonella enterica; identical to SEQ ID NO: 72181
  subsp. enterica serovar Typhimurium str. DT104

SEQ ID NO: 78012 - DNA, 2310 bp, Yersinia enterocolitica; identical to SEQ ID NO: 77660

SEQ ID NO: 78013 - DNA, 1956 bp, Yersinia enterocolitica; identical to SEQ ID NO: 77661

SEQ ID NO: 78014 - DNA, 1926 bp, Salmonella enterica; identical to SEQ ID NO: 72180
  subsp. enterica serovar Typhimurium str. DT104

SEQ ID NO: 78015 - DNA, 1662 bp, Salmonella enterica; identical to SEQ ID NO: 72181
  subsp. enterica serovar Typhimurium str. DT104

SEQ ID NO: 78016 - DNA, 1926 bp, Salmonella enterica; identical to SEQ ID NO: 72180
  subsp. enterica serovar Typhimurium str. DT104

SEQ ID NO: 78017 - DNA, 1662 bp, Salmonella enterica; identical to SEQ ID NO: 72181
  subsp. enterica serovar Typhimurium str. DT104

SEQ ID NO: 78018 - DNA, 1926 bp, Salmonella enterica; identical to SEQ ID NO: 72180
  subsp. enterica serovar Typhimurium str. DT104

SEQ ID NO: 78019 - DNA, 1662 bp, Salmonella enterica; identical to SEQ ID NO: 72181
  subsp. enterica serovar Typhimurium str. DT104

SEQ ID NO: 78020 - DNA, 1560 bp, Salmonella enterica
  subsp. enterica serovar Typhimurium str. DT104
atgggcctagatggagatattgatgaagctttcgtgtatgtgcttgaagttggtccggacggctcacctataaatcctgaaacagttcctcgatctgaccgaaatcacatacaagtccactatctgccagccaggagagatcctactgaccacatagcatacggaacgagtgcgctgcttggccgcttgctacgtgccgtgaactgggaaaatgaacgagaaaaggtcaaagggttcaccgaccagattagtgagagcctggctgctaattcatcggttaatgcttttagctcccacctgaagaaaatatggggcaccctccataaaggcagctactttacagatcccaagattacttttgtggcatctgagatcgaggcgttgcttcgtcatttgtccgtatcattctcgcctggacatgatgacaatcttgtcgatttttctcgactcagtgacggtcagaagtcgatgctctatctatcgttggttctctcatctcaagctgttggtcgtgctgtccttgccggtgaggacgactcttttgaccctgaaaagttgcgtccgccagtctttactttaatagcccttgaggaaccagagaacagcctctcacctcactatttgggaagaattgttaacgctcttaactcaatgacgagtaacgaggatgctcaggccctagtcgctacgcatgctccgtcgatgttgcgacgtgtcgatccggaacatattcgatatcttcgacttactgaaacccggcaatcaagaattaagaaaatccaattacccgctaaaaccgatgaagcgcacaaatttgtacgtgaggctgtccaggcatttcctgagatctacttctctcgtttgattgtgttgggtgaaggggatagcgaagaaattgtattaccgcgccttttccaagcaaagggtgcgccagttgatgaatcagcggttacgattgctccgcttggaggtaggcatgtaaaccatttttggcgtctgttatccgaactgcaaatcccatttttgactcttctagatttagatgtgggcagatatcaagcgggctggggaagaataaagtatgtaaataaccaacttggtttgtatcaacctgaaaaggtactaccaactactttttctttatcagattggaatgatgacaaagtacctgttcgtacacatcatttctttgaaaacggcactaagagtgtatttttagagctggaaacacgtggtgtttttttctcatttccaatggatttagatttttcaatgcttcttgctttccctaatgcgtacggtgttcagcaggaggtttcagatgagtctacgattaaagccgttttgggtaagagccatcatggctcataccaatacagcggagacgagttaaatcttttctctacgtatcacaagctttttaaactgggtagtaagcccgctgcgcatatagatgctcttgctcaactgagcaacgaggaattgctggcgaacatgccaggatcatttggacgacttgcagatgccgtgatagccaagcttgcggagctgcccgagtga

SEQ ID NO: 78021 - DNA, 1662 bp, Salmonella enterica; identical to SEQ ID NO: 72181
  subsp. enterica serovar Typhimurium str. DT104

SEQ ID NO: 78022 - DNA, 1926 bp, Salmonella enterica; identical to SEQ ID NO: 72180
  subsp. enterica serovar Typhimurium str. DT104

SEQ ID NO: 78023 - DNA, 1662 bp, Salmonella enterica; identical to SEQ ID NO: 72181
  subsp. enterica serovar Typhimurium str. DT104

SEQ ID NO: 78024 - DNA, 1926 bp, Salmonella enterica; identical to SEQ ID NO: 72180
  subsp. enterica serovar Typhimurium str. DT104

SEQ ID NO: 78025 - DNA, 1662 bp, Salmonella enterica; identical to SEQ ID NO: 72181
  subsp. enterica serovar Typhimurium str. DT104

SEQ ID NO: 78026 - DNA, 1926 bp, Salmonella enterica; identical to SEQ ID NO: 72180
  subsp. enterica serovar Typhimurium str. DT104

SEQ ID NO: 78027 - DNA, 1662 bp, Salmonella enterica; identical to SEQ ID NO: 72181
  subsp. enterica serovar Typhimurium str. DT104

SEQ ID NO: 78028 - DNA, 1926 bp, Salmonella enterica; identical to SEQ ID NO: 72180
  subsp. enterica serovar Typhimurium str. DT104

SEQ ID NO: 78029 - DNA, 1662 bp, Salmonella enterica; identical to SEQ ID NO: 72181
  subsp. enterica serovar Typhimurium str. DT104

SEQ ID NO: 78030 - DNA, 1926 bp, Salmonella enterica; identical to SEQ ID NO: 72180
  subsp. enterica serovar Typhimurium str. DT104

SEQ ID NO: 78031 - DNA, 1662 bp, Salmonella enterica; identical to SEQ ID NO: 72181
  subsp. enterica serovar Typhimurium str. DT104

SEQ ID NO: 78032 - DNA, 1926 bp, Salmonella enterica; identical to SEQ ID NO: 72180
  subsp. enterica serovar Typhimurium str. DT104

SEQ ID NO: 78033 - DNA, 1662 bp, Salmonella enterica; identical to SEQ ID NO: 72181
  subsp. enterica serovar Typhimurium str. DT104

SEQ ID NO: 78034 - DNA, 1926 bp, Salmonella enterica; identical to SEQ ID NO: 72180
  subsp. enterica serovar Typhimurium str. DT104

SEQ ID NO: 78035 - DNA, 1662 bp, Salmonella enterica; identical to SEQ ID NO: 72181
  subsp. enterica serovar Typhimurium str. DT104

SEQ ID NO: 78036 - DNA, 1926 bp, Salmonella enterica; identical to SEQ ID NO: 72180
  subsp. enterica serovar Typhimurium str. DT104

SEQ ID NO: 78037 - DNA, 1662 bp, Salmonella enterica; identical to SEQ ID NO: 72181
  subsp. enterica serovar Typhimurium str. DT104

SEQ ID NO: 78038 - DNA, 1926 bp, Salmonella enterica; identical to SEQ ID NO: 72180
  subsp. enterica serovar Typhimurium str. DT104

SEQ ID NO: 78039 - DNA, 1662 bp, Salmonella enterica; identical to SEQ ID NO: 72181
  subsp. enterica serovar Typhimurium str. DT104

SEQ ID NO: 78040 - DNA, 1926 bp, Salmonella enterica; identical to SEQ ID NO: 72180
  subsp. enterica serovar Typhimurium str. DT104

SEQ ID NO: 78041 - DNA, 1662 bp, Salmonella enterica; identical to SEQ ID NO: 72181
  subsp. enterica serovar Typhimurium str. DT104

SEQ ID NO: 78042 - DNA, 1926 bp, Salmonella enterica; identical to SEQ ID NO: 72180
  subsp. enterica serovar Typhimurium str. DT104

SEQ ID NO: 78043 - DNA, 1662 bp, Salmonella enterica; identical to SEQ ID NO: 72181
  subsp. enterica serovar Typhimurium str. DT104

SEQ ID NO: 78044 - DNA, 1926 bp, Salmonella enterica; identical to SEQ ID NO: 72180
  subsp. enterica serovar Typhimurium str. DT104

SEQ ID NO: 78045 - DNA, 1662 bp, Salmonella enterica; identical to SEQ ID NO: 72181
  subsp. enterica serovar Typhimurium str. DT104

SEQ ID NO: 78046 - DNA, 1926 bp, Salmonella enterica; identical to SEQ ID NO: 72180
  subsp. enterica serovar Typhimurium str. DT104

SEQ ID NO: 78047 - DNA, 1662 bp, Salmonella enterica; identical to SEQ ID NO: 72181
  subsp. enterica serovar Typhimurium str. DT104

SEQ ID NO: 78048 - DNA, 1926 bp, Salmonella enterica; identical to SEQ ID NO: 72180
  subsp. enterica serovar Typhimurium str. DT104

SEQ ID NO: 78049 - DNA, 1662 bp, Salmonella enterica; identical to SEQ ID NO: 72181
  subsp. enterica serovar Typhimurium str. DT104

SEQ ID NO: 78050 - DNA, 1926 bp, Salmonella enterica; identical to SEQ ID NO: 72180
  subsp. enterica serovar Typhimurium str. DT104

SEQ ID NO: 78051 - DNA, 1662 bp, Salmonella enterica; identical to SEQ ID NO: 72181
  subsp. enterica serovar Typhimurium str. DT104

SEQ ID NO: 78052 - DNA, 1926 bp, Salmonella enterica; identical to SEQ ID NO: 72180
  subsp. enterica serovar Typhimurium str. DT104

SEQ ID NO: 78053 - DNA, 1662 bp, Salmonella enterica; identical to SEQ ID NO: 72181
  subsp. enterica serovar Typhimurium str. DT104

SEQ ID NO: 78054 - DNA, 1926 bp, Salmonella enterica; identical to SEQ ID NO: 72180
  subsp. enterica serovar Typhimurium str. DT104

SEQ ID NO: 78055 - DNA, 1662 bp, Salmonella enterica; identical to SEQ ID NO: 72181
  subsp. enterica serovar Typhimurium str. DT104

SEQ ID NO: 78056 - DNA, 1926 bp, Salmonella enterica; identical to SEQ ID NO: 72180
  subsp. enterica serovar Typhimurium str. DT104

SEQ ID NO: 78057 - DNA, 1662 bp, Salmonella enterica; identical to SEQ ID NO: 72181
  subsp. enterica serovar Typhimurium str. DT104

SEQ ID NO: 78058 - DNA, 1926 bp, Salmonella enterica; identical to SEQ ID NO: 72180
  subsp. enterica serovar Typhimurium str. DT104

SEQ ID NO: 78059 - DNA, 1662 bp, Salmonella enterica; identical to SEQ ID NO: 72181
  subsp. enterica serovar Typhimurium str. DT104

SEQ ID NO: 78060 - DNA, 1926 bp, Salmonella enterica; identical to SEQ ID NO: 72180
  subsp. enterica serovar Typhimurium str. DT104

SEQ ID NO: 78061 - DNA, 1662 bp, Salmonella enterica; identical to SEQ ID NO: 72181
  subsp. enterica serovar Typhimurium str. DT104

SEQ ID NO: 78062 - DNA, 1926 bp, Salmonella enterica; identical to SEQ ID NO: 72180
  subsp. enterica serovar Typhimurium str. DT104

SEQ ID NO: 78063 - DNA, 1662 bp, Salmonella enterica; identical to SEQ ID NO: 72181
  subsp. enterica serovar Typhimurium str. DT104

SEQ ID NO: 78064 - DNA, 1926 bp, Salmonella enterica; identical to SEQ ID NO: 72180
  subsp. enterica serovar Typhimurium str. DT104

SEQ ID NO: 78065 - DNA, 1662 bp, Salmonella enterica; identical to SEQ ID NO: 72181
  subsp. enterica serovar Typhimurium str. DT104

SEQ ID NO: 78066 - DNA, 1926 bp, Salmonella enterica; identical to SEQ ID NO: 72180
  subsp. enterica serovar Typhimurium str. DT104

SEQ ID NO: 78067 - DNA, 1662 bp, Salmonella enterica; identical to SEQ ID NO: 72181
  subsp. enterica serovar Typhimurium str. DT104

SEQ ID NO: 78068 - DNA, 1926 bp, Salmonella enterica; identical to SEQ ID NO: 72180
  subsp. enterica serovar Typhimurium str. DT104

SEQ ID NO: 78069 - DNA, 1662 bp, Salmonella enterica; identical to SEQ ID NO: 72181
  subsp. enterica serovar Typhimurium str. DT104

SEQ ID NO: 78070 - DNA, 1926 bp, Salmonella enterica; identical to SEQ ID NO: 72180
  subsp. enterica serovar Typhimurium str. DT104

SEQ ID NO: 78071 - DNA, 1662 bp, Salmonella enterica; identical to SEQ ID NO: 72181
  subsp. enterica serovar Typhimurium str. DT104

SEQ ID NO: 78072 - DNA, 1926 bp, Salmonella enterica; identical to SEQ ID NO: 72180
  subsp. enterica serovar Typhimurium str. DT104

SEQ ID NO: 78073 - DNA, 1662 bp, Salmonella enterica; identical to SEQ ID NO: 72181
  subsp. enterica serovar Typhimurium str. DT104

SEQ ID NO: 78074 - DNA, 1926 bp, Salmonella enterica; identical to SEQ ID NO: 72180
  subsp. enterica serovar Typhimurium str. DT104

SEQ ID NO: 78075 - DNA, 1662 bp, Salmonella enterica; identical to SEQ ID NO: 72181
  subsp. enterica serovar Typhimurium str. DT104

SEQ ID NO: 78076 - DNA, 1926 bp, Salmonella enterica; identical to SEQ ID NO: 72180
  subsp. enterica serovar Typhimurium str. DT104

SEQ ID NO: 78077 - DNA, 1662 bp, Salmonella enterica; identical to SEQ ID NO: 72181
  subsp. enterica serovar Typhimurium str. DT104

SEQ ID NO: 78078 - DNA, 1926 bp, Salmonella enterica; identical to SEQ ID NO: 72180
  subsp. enterica serovar Typhimurium str. DT104

SEQ ID NO: 78079 - DNA, 1662 bp, Salmonella enterica; identical to SEQ ID NO: 72181
  subsp. enterica serovar Typhimurium str. DT104

SEQ ID NO: 78080 - DNA, 1926 bp, Salmonella enterica; identical to SEQ ID NO: 72180
  subsp. enterica serovar Typhimurium str. DT104

SEQ ID NO: 78081 - DNA, 1662 bp, Salmonella enterica; identical to SEQ ID NO: 72181
  subsp. enterica serovar Typhimurium str. DT104

SEQ ID NO: 78082 - DNA, 1926 bp, Salmonella enterica; identical to SEQ ID NO: 72180
  subsp. enterica serovar Typhimurium str. DT104

SEQ ID NO: 78083 - DNA, 1662 bp, Salmonella enterica; identical to SEQ ID NO: 72181
  subsp. enterica serovar Typhimurium str. DT104

SEQ ID NO: 78084 - DNA, 1926 bp, Salmonella enterica; identical to SEQ ID NO: 72180
  subsp. enterica serovar Typhimurium str. DT104

SEQ ID NO: 78085 - DNA, 1662 bp, Salmonella enterica; identical to SEQ ID NO: 72181
  subsp. enterica serovar Typhimurium str. DT104

SEQ ID NO: 78086 - DNA, 1926 bp, Salmonella enterica; identical to SEQ ID NO: 72180
  subsp. enterica serovar Typhimurium str. DT104

SEQ ID NO: 78087 - DNA, 1662 bp, Salmonella enterica; identical to SEQ ID NO: 72181
  subsp. enterica serovar Typhimurium str. DT104

SEQ ID NO: 78088 - DNA, 1926 bp, Salmonella enterica; identical to SEQ ID NO: 72180
  subsp. enterica serovar Typhimurium str. DT104

SEQ ID NO: 78089 - DNA, 1662 bp, Salmonella enterica; identical to SEQ ID NO: 72181
  subsp. enterica serovar Typhimurium str. DT104

SEQ ID NO: 78090 - DNA, 1926 bp, Salmonella enterica; identical to SEQ ID NO: 72180
  subsp. enterica serovar Typhimurium str. DT104

SEQ ID NO: 78091 - DNA, 1662 bp, Salmonella enterica; identical to SEQ ID NO: 72181
  subsp. enterica serovar Typhimurium str. DT104

SEQ ID NO: 78092 - DNA, 1926 bp, Salmonella enterica; identical to SEQ ID NO: 72180
  subsp. enterica serovar Typhimurium str. DT104

SEQ ID NO: 78093 - DNA, 1662 bp, Salmonella enterica; identical to SEQ ID NO: 72181
  subsp. enterica serovar Typhimurium str. DT104

SEQ ID NO: 78094 - DNA, 1926 bp, Salmonella enterica; identical to SEQ ID NO: 72180
  subsp. enterica serovar Typhimurium str. DT104

SEQ ID NO: 78095 - DNA, 1662 bp, Salmonella enterica; identical to SEQ ID NO: 72181
  subsp. enterica serovar Typhimurium str. DT104

SEQ ID NO: 78096 - DNA, 1926 bp, Salmonella enterica; identical to SEQ ID NO: 72180
  subsp. enterica serovar Typhimurium str. DT104

SEQ ID NO: 78097 - DNA, 1662 bp, Salmonella enterica; identical to SEQ ID NO: 72181
  subsp. enterica serovar Typhimurium str. DT104

SEQ ID NO: 78098 - DNA, 1926 bp, Salmonella enterica; identical to SEQ ID NO: 72180
  subsp. enterica serovar Typhimurium str. DT104

SEQ ID NO: 78099 - DNA, 1662 bp, Salmonella enterica; identical to SEQ ID NO: 72181
  subsp. enterica serovar Typhimurium str. DT104

SEQ ID NO: 78100 - DNA, 1926 bp, Salmonella enterica; identical to SEQ ID NO: 72180
  subsp. enterica serovar Typhimurium str. DT104

SEQ ID NO: 78101 - DNA, 1662 bp, Salmonella enterica; identical to SEQ ID NO: 72181
  subsp. enterica serovar Typhimurium str. DT104

SEQ ID NO: 78102 - DNA, 1926 bp, Salmonella enterica; identical to SEQ ID NO: 72180
  subsp. enterica serovar Typhimurium str. DT104

SEQ ID NO: 78103 - DNA, 1662 bp, Salmonella enterica; identical to SEQ ID NO: 72181
  subsp. enterica serovar Typhimurium str. DT104

SEQ ID NO: 78104 - DNA, 2268 bp, Xanthomonas arboricola pv. juglandis
gtgctgataacaatggtcgaaatcgggaactaccggaagcttttggcagcgcgtatctccttcgctcccgacaagacggtgctggtgggcgccaacaatagcggaaagacatccgccatgaccgcgttgcgacgtttccttgtcgatacgcgcggttttaccatcaacgatctctcgctcgcgcactggcaagccctgaatgcgaagggggaggcttgggagacagcgatagctgcggacacagagttgcccgcgcccggcatcctagagttcctgcctcaactggatgtgtggctccaggtcaagaaaggcgagatgcattacgtgcaaaagctgcttcctacgctggattggcaggccgctcctctcggggtccggtttcgctttgagcccgaggacgccgtcaagttccagcaggagtacatcgcggctagaagaaaggcggccgacatcacgatcgctgcggccaaagctgcggaaggcaaggaggatccgccccaattggagctctggccgctcaatctgatcgactttttggagcggcggctgcggaccttcttcaaagtgaaggcatacctgctggacccggcgaaagtggaagagcccactgatggcgttgctcgcatgcaggccctctccgatgacgccgagcccattgagggcaatccactggacggcctcatccagatcgatgagatcagcgcacaacgaggtttcgggaccaccagtgaccgcatgcagcgcgaggatgcaggcgcagacgctcgcagtgcaggtcgactctccactcagcttcgctcctactatgacaggcacctggactggcgtgacgcgccggaactgaccgatatcaaagccatggaagcgctggagaaggcgcgcaaggctttcgatgacaggctatctgaagctttcgacaaggcgctgatcgaacttcagaagcttggctatccaggcatatccgacccaaaactgaagattgcgaccaagctcaagttgcaggacggcttgagccatgagtcagccattctgtatgaaattcccgcggccgcgggggagcacatgcaccgcttgccggaggactctaacgggcttggttaccagaacttggtctcgatggtcttcaatttgatgagctaccgcgatgcatggatgcgggtgggcaaggccggaacaggacacgatgtaaggcccactccgccgctgcacctgatgttggtcgaagagccagaggcgtatcttcatgcccaggtgcaacaggttttcatcaggcacgcctacgacgttctacgcaatgatcctaccttgggaaagtcgcttgatttcaggacgcaactcgtcgtgagcacccattccagtcacattgcccatgcctgcgattttgcggcgcttcgctacttccggcggcttcccccttccgagggccgcaagacccccaccgcctgcgtggtcaatctctcatcggtgttcggcaaaccggaccagacggcaaagttcgtgtcgcgctatctcaaagcgacgcattgcgacttgtttttcgctgatgccgccatcttcatcgaaggcagtgctgagcgcatccttgttccccatttcgtcgaacaggccgatttattcgagtacttgcggacgcgctacatcacctggctggaggtgggcgggagccatgcgcaccggtttaaaggtctggtggacaccctgggcctgacaacattgatcatcaccgacctcgacgcgaaggatccgacttccaatcaagccaggaccccggcgctcggcaagggacttgaagcgcgcaatgaaacgctgcgctcttgggcacccaagcagactgatgtagatgtcctcatgaggctggatgagaaggaaaaggccatcgtgtattccaatggctatgccgtgcgctccgcgtatcagaccggagagaaactgatgctcggagcagtcgatgtggaaatccatgccaacacgttcgaagacgccttgctctacaggaattatgatttcttcaaggcccgtaaggccactggcttggcgagcaagttccaggtgatcgccgacaccgcccaagacagcaatcagctgacaaccgctgtcgccgaggcgatcaaggacggtgataaggctgagttcgcccttgagctcttattcagcgacgacatcgagcaattacatttgccggcctacatcgtgcatggattgctgtggctgaatgagcagctgaagcgcaaagaggctgatcttgcgcccaaggcgagtgcagcatga

SEQ ID NO: 78105 - DNA, 1848 bp, Xanthomonas arboricola pv. juglandis
atgatcagtgaggccgccgcagtccccaacgatgaactcgatcgtcatgtagacgaggagatcaagaactgcctcgatcctcgggctcccagaagcttcttcctgtttgccggagctggctcgggtaagacccgctcgctggttggggcactggaccacctccgcgacacggccggcgcacgcctgagaatccgtgggcagaaggtcgcggtcattacctacacgaaggcggcacgtgatgaaatcatccggcgcacgcagtttgatcccatcattgcggtgtccacgatccacagctttgcctggaccttgatcgaaggattcaatcacgacatccgagagtggcttcgagtttcactccaggccgacattgaggatctgcaggccaaggaagccaagggacgtgcaggcacgaaaacatccgcgggcaggatcgccgacatcgcgtccaagacacgacggctagcccgactcgacaccaccaagaccttcatttacagccctgacggagataaccggggcaggggctcgcttaatcacgccgaagtgctacatctggctggggattttttgaagtccaaacccgtgcttcggcacatcctgcgcgatggctatccctacatacttgttgatgagagtcaggatacaaaccgtcacattgtggaagccttgttcaccttccaggccgcgcacaaggacgaagttgtagtgggcctcttcggcgacttgatgcagcgcatctacggcgatggtcacccgggcttgggcgaaaacctgcccagtgactgggccacaccgactaagcggctgaactttcggtgcccccggcgagtcattgagctcatcaacaagatccgcgagtcaaccgatcagcagacccagatcccccgtagcgccgcgatcgaggggcatgtacggatgtacgtgcttccatccgaagggatcgataaggttgccgcggaaaaagccatctgcacacacatggccggccttactgctgatcaggagtggctggatgaggatgcggtcaaagtgctcatcctggagcatcgtatggcggcccttcggatggggtttgatgatttgctggcagcgctctatccggtaacacagtttcggacgtcgctgctggatggctcactgcccgtagtcaacctcttctcaaacctgatcctaccgctatgggacgccaaggacgacaaatttggcaccacacgaatcatgcgggcagcgtcacccttgctgagcccatctgcgctgaagcatgctcaagatcagtttgagcagctgggtagggcgcaggcggcagtggatgcgctgattgaactgctcgatagcaatccgtccgtgacgtttggtgaagtcctacataacgtggccaagaccggaatttttgcgatccccgacatgctcaatgtcgccttggctgccgccactgctgaagcgaacgacgctgaagacaagcaggagcgtagcgatcgagacaaggccatcgccgagttcctcacgaccccctttctgcaggtacgggcctatgccaagtacgtgagtggcaaagcgcgttttgatacgcatcagggcgtgaaaggactcgagttcccacgcgtcatggtcgtcatggacgatcacgaggcgcgtggttttctattcaagtacgaaaagcttttcggcggcggcgctgacgacagccaaaccgcgtcgactcgtcggttgttctacgttacctgcagccgcgcgcaacggtcgcttgcattggttgcctatgcctccaatccggcaagggttggggatcagctcctgatcacaggctggttcaagccagaagaggtcttgatcggcctgccgtaa

SEQ ID NO: 78106 - DNA, 1698 bp, Vibrio sp. J2-12
atgtatatcaaaaaggtaacgatcaacagctacaggagcttccgctttttcgaagcacagcttcaaaagctaactgttgttattggtgaaaacgatactggtaagacgaactttttcaccgcactttcgttaccgttaagcggcaaccaaatagacttcaaccagaagcgtttgagtgtatctgatatcaacaaagatgccgttattgattttctaacatctgttgtcaacggtgacactgaagagaatcaactaaataagatccctaaagtatcagtaaccgtagagttcgcagatcctaaagatgcttatgaaacagcacttttggctaagtggattgttgcggatggagatgaagaaacttacaaaatcagatacgactttaagcctaaagacgacaaagacttgcttgaggtcgtgaagaaatcgctcgctggaaagactttagatgatattaactggtttactctacccgttgagctatacgactaccaagtcgtatctgtgaacaacgaaaaacctatcgcatacagtgacttaaaacacgtcagtgtccatagcatcaatgccgagcgagatgacttttcagaaagcagttcaatgaagtccaatagcattttcaccaagctgcttatgaacactctcaacgatgatgacaaaggtcagatcaatacagcctactctgagttttttagtgctattgaaaagactgaaacattcgacaaagtcattggaactaatgacgattttgagaattacgacagtattatcaagcagcttgagtgcactcctaacttgcctaacttgaagaacatcttatcgaacatcactttgaaatacggaaatgaatttctgtaccaaaaaggcttaggacaacgaaatcttatctacatcctcatcctgtttgcttactacaagtcatgtggtgatacattcaacttgtgctgtatagaagaaccagaagcacacttgagcgttaacaaccttcgtttagtgagagacttcattgagaaaagctcaagcaacagtagctcgcttgtacagactatcatctctacccacaacccatctatcatcaacaagctcaagatctctaatgtgttggcgtttactggcgagaaagcaattagtctggcagatactccaaccaaactagtggactacctaagaaagagacctaatttcgacattctaaagctgctgttcgcaaacaaagtcattctcgtagaggggccaacagaagaaatgctgatcagcacttatttgtctaaacaaccaacccttaacgacatagatattattccaattggtcaacgtggttacgccactttcttagatatatggctcgccttgaacaaagataaccagaacaagaaaattggtgtagtccgtgattatgacaattcagatgctgctaaaaagagacacgatgcttatgacacagcgcacgcgaatgtcactgtaagaacaacgaagcactacacacttgaaattgacttagtggaagcagaagacaacctagctttgctgaatggtttattcgaaatggatggagacctcgacgctgtttccagtcacatgattaatggtaaaacagcaagaatgcttgatgtgtgtgatgcaatggttgatgaagagaaaccacgagatatcaagttaccagctcatatctcagagattatcgaggctctatcatga

SEQ ID NO: 78107 - DNA, 1371 bp, Vibrio sp. J2-12
atgattgaagtccaaattgctggagctggcgcgggaaagacgtatggcttagcaaaaactttgatagatcatatcaaagcttgtactagtcacaaaaagacatttgcactgacatacacaaactcagcgacagcgaagatagagcaagagataatcaaacaacatggctttattccgtcgaatctctgtatacagacagtacatagcttcttgttgaacgaaatcatctatccattctcgtcattcactctcggtgatgtgtataacgacacatcaataatgatatctaatcctaagtacaaaaatggtctttttgcacgacttagaaaaatgaatgtcattcatacagacaatgtatacaacatcgctaaacagattgttgatgaaactgccagtaagcacagtaacaaagctaagaaagtaaaagtccgcagactgttaactattctagggagttgctttgacaagatattcatcgacgaagtccaagacttagataaagatgcgctccgctttttcgaggttctaggcagcaacaatattgacgtttacatgattggagatccaaaacaagcaatcaagtttccccaagcacttgatacttttgttaataatgtaactccaaaagaatacgcaaatatcttaccaatcaacaatcaaaccagacgagtacctacagaggtcttagcggtatcaaacagtttctgttatgaagaccagcaacaagagtcactatcagaagtggtcggtgaactcatgtacatagaatcgactgatggtagatacgacgagctactaacgaactacatcgatacaaaacaacttgtttgtatcgacaaaaaaaatggtcgttatacaacttcgtctaaacacaaacacgcattcccacgagagatcgaggaaatgattcgtgattccaaacacaagaaagataaaactttgtttgttaaagccgctttttctgactttatggacgatgtaatcaatgaggataataagcgagccataagcaaactcattactcggcactcattgactctaaataaacagcacttcgcccaattacatgaactgtgcaattcatgcacaaaaaatgacgttcagttcaagatccaaagcatcgactcgatcaagggattggatgcagatacgtgtgtaatcatactcagctctaacaccctgaaatatgtaacccaaaatggtattggcaaaacgaatcgttttaataaagagtggaaacgagtctatgtagctcttactcgtgccaagaagaggctagtgttggctttagatcacgagttactcgctaaagaagatatggcggctgttagggactcgataggtgaattgggttttgttaaccataactag

SEQ ID NO: 78108 - DNA, 1704 bp, Vibrio sp. J2-15
ttggaaatatcaactctccatttaaaaggctatcgcaattttgaagatgcggttatcaactttaattcaagtactttagttatcggagggaatgatattggtaaaagtaacatgcttcatgcacttagaattttgcttgataagacactctctgaagccgatttagagccttcagagctagactttcatataggtagcgagcatgtttttaaagatgtggaaatcactattttctttaatgatgtaaaagaagatgcggttctttctatcttgaaaggtaatgtcagtgactgcggtgaaaccgttattcgatacacagctcataagcaagatcttaactacaagatattcattggacaatcaatcgaagacttacaagagattcctagccgcttttacttaaagtatttgaacctcaaatatatccaatcacaaagagatctagaacgagtcataggaagagaaaaaaagcagttgttgcgtattgcccagaaaatgctgactgaggctgaagttttagacgacgaaacccttgcttctgaaattagccaagatctatctgaattgaacgaaaaaatatccaaactcaaatatgtcagttcggctacgaatgatatcaataaagaattaaaaaaactggctcatcaccatgcggattactctgttcagttagatacgggatccatagaggttaatgattttattgataaacttcagcttggtgctatgacaaatggttctaatgtaatgcttggtggagatggtcgtaataatcagatcctactggcgttgtggaaagcaaaaagcattgtcgaacaagatattgaccatgaggtcatcttctatgtagttgaagaacctgaagctcaccttcacccgcatcaacaacgtaaacttgctaaatacttagtgagcgaattacctggtcaaacaatactatcttcccactctcctcaaatagcatcgaaattttcaccagactctattgttcgccttttgcctaaaggcaaatcaacgagagcagctagtaacggatgctctcaatgtatcgtaaatggatgggaagcaatgagctatcgcatgagtattttgccagcggaagctttcttctcaaatggagtgttcttagttgagggaccttcggaaatgctgttctatcatgaactagcaaaatatttagatcttgacctcgacttcctaaacctatcgattctatctgttgatggcatttctttcgctgtatatataagtattttggatgctctagaaatcccttgggtaatgcgaactgataatgatatatcaaagataaaaggtaaagacgagtggcaatatgcagggatcaatcgttgtctacgtgcagcaggttttgcgactttgcctcattcaaagcaaaagctattgccgatagatgcatataataatggcacttggaaaaatgtctcagatcacatcaactgcaaaggaatctacctatctaaagttgacttagaaactgatttagttaacgagctatccgagcctattttaaaagcattgagtagagactcagaagaaagtgcaattaagtacctacaaggcaaaaaggctcttcgcatgcgagccttattaagtgcaatagaaagtgaactaagttctatttcactcggtgatttggcgcaaccattatataaattagctgagaaagcaaaggtaaactcgtga

SEQ ID NO: 78109 - DNA, 1620 bp, Vibrio sp. J2-15
gtgagtacgtttaaaccaactccccagcaacaatctgctattgagtatacacaaagtatgattattactgcttgtccaggaagtgggaaaactacagtgatgaaagagaaagttagaaatacaaccctctatctacctccccacaaaggtgttattgcaataacgtttacaaaaaaagcaagtgcagaacttaaaaaaaagtgtactgctaatgctcatgatacgaaacagagttattttggcactattgacagtttttgcctaaaagaaatcatcttaccctttatctctagggtttggggaaagcctgaaatagagttgaaaacagtaaagaaactacatcctgctcaagcccaatactttcaaaaaaagtacacatccccaacatatgaagatatttcttctgactctggtttcaagaaactttatgaggagggcttattgtggatgacatcttttgctgcactagctttatacatactaaagcattctaaggcagcgctgcgatacatttctgctaggtactcgcatgtttttatagatgaatatcaggattcatctttatctcaacatcaactatttcttagtttatttgatcaaggtttaactgcaaccgccgtaggagatgcttggcagtcaatttatgagtttagaggcggagattccaaattattgacagagcttaccgaaaatgaacatttcaagcacttcgtgattgacataaatcaccgctgtcatgcctcaattgtaaattatgccacacggttaatggatcctaatgctactttgctaagtcatgctcatgatgatcttagagtacatcgcttgcatctcgctggaaacctaacaaatattggtaaggtcttatctgacttcgtcaagcagctaaaagaaaaacatgctatcgagaatgaatcagatattgctatattggctaaaaaagagaaatcattgtttttatgcacacaaggcatagaaatcgattatcgcctatacaatgatagccctctagatgaatctagctcatcggattgtgcagatttttactctgacttgcttgctttcagatatggtgctatcggtacaatacaagatctaattgatatacatttcgacttagtttctgccaagcacatatccatatctaaattacgcatactaattggaaagttacgaagtgaacaaacagtagaagaattggtctttaagttcagagagttagcttcattcattggaatactgaatacgactgatacggatcgggcattaagattaaaatttaacgagccttcgttcatcaaacaatttacgccaattgcaaaaaatgaagtccaagttatgactcttcataagtccaagggattggagttcaagtatgtcttccatctagatttagaacaatggtcttttccatatatggaaaaaggggataactgggatgatctccgctatccaagcttaatgcaagatacaaacttacactatgtggggataacaagagcagaagatcattgttatcttatccgagctgagtaccgacaaaacgtatcaggtaaagattcaaaatcaagagagtcatacttttggtctttaccgcatttagcagggctatatacgtaa

SEQ ID NO: 78110 - DNA, 1824 bp, Salmonella enterica subsp. enterica serovar Derby; identical to SEQ ID NO: 71786

SEQ ID NO: 78111 - DNA, 1893 bp, Salmonella enterica subsp. enterica serovar Derby; identical to SEQ ID NO: 73681

SEQ ID NO: 78112 - DNA, 2400 bp, Yersinia pseudotuberculosis; identical to SEQ ID NO: 76456

SEQ ID NO: 78113 - DNA, 1869 bp, Yersinia pseudotuberculosis; identical to SEQ ID NO: 76457

SEQ ID NO: 78114 - DNA, 2136 bp, Yersinia intermedia
gtgtatatatcttttttaaaaataaacaactttagaaagtttggagagaatgacaacgttatcggttttgttaaatcacatagtgaatcaccacaaaataatttagtcgcgtcctcaaccacactagtgattggtaaaaataactcaggtaaaacgactgtaacgaaagcactagaacttttgcactctgactcagaaaaaattacaggccatgactttaattataattattcaaaaaacatccttaaagaaaatttgaatgataaacctcacataacaccaaagctatcttttgaaattgaaattatattagatgatataacgcatgacctcatcggtgatttccaaccttttatcgatgctaaaaaagcattaaatgagggagtgcgaaaagcaaatataattattgagtatgaagttaaagtattggctgattacaaatctaaaattgaagagcttaaagtattttacttaagtaataaatgcaatccagagggcatttttagaaaatatctagacatattgtccaaaacgcaatttagaagaagggtaaaaaattatcaaaatgtaaatgttgatacattaaccccaaaaaatatcatcgatttgagagttatctcagcggccaaaaacattcatgacaaaaaattattgacaaaatcatttaataaaataataaagtatatgtatgaatccgatgaggtagagtataaagggatattaaatttagtagatggtaacaatgaaagcttaacccaaaatattaaattgaaacatcaatcaggtgttgagaggattttagcaaaaatcatatcagataaagatattgggattgaactcagatctgaattgacatttgataagttaatgtctgatttaataacttatgaacataaggatggagagtttcttgttcctgaaagccaattcggtctaggttatgcaagtctagttagtattatcggtgaaataattgattacacaaatcaaagtttgaaagaagccactcagagtaagataagacttttgtgtattgaagaacctgaagttttcatgcatccacagatgcaaattaattttatcagacacatccaggaagcattgaatgaaattctatcttctcatgttgaaaatttaaactctctgaaaagccaaattctcatcacaacacactcctctcatattttgaatagtgtaattcatagcagtaatacttttgatgatattaattatatttacctcaggaatgggaatgctgcgaacgttttactaaaggatagagatatagcaaatacggttaaaaaaacattacaatttgaattcattaagaaacatataaaacatcaaactccagatctatttttctctgatgctataatatttgttgaaggtattacagaggagcgggttttaaattcatacattgaagatgattccgttctcaatcgaatgaatatttccgtttttagaattgatggggctcatgcaaaagtttacgcaaagcttattaacaaaattcaaatcccatccttgatcattactgatattgatttcaaaatagatacgaataaaacagataccaatataattgaagacattgaagacattgaagacattgaagacattgaagacagcggtaagatagttggccaaatatctaatctttcagaagatttaataacaacaaatgcaacactacgccacttttttaaagacagaagaattacgtcattaaaagattattatgtaaaagataatctgatggttgtttttcagaaggatggagtttgtataccaaagtcgagcccagaaattacttactatgccactagttttgaagaagcattaattttaaaaaattatgacaatattttactattagatattcttctacgagtcataaaaaaagaaacaataaaaatacttggtgaaccaagtgacgtttgtaacatagctcataattcaaggaaaattcaaaagttattagccaaaaaaaagagtgatttttccaataaacttattttttctttagttacgtcggaccaacctaagcccgctctcccagattatattttgaaaggacttgagtggctcgcgttaaaattaaaaagagatggcgtaacctatgaaatttga

SEQ ID NO: 78115 - DNA, 2049 bp, Yersinia intermedia
atgaaatttgaacttaaccaagaacaagctaaagtcgaaataaatatcgaaatagagctttttaaactgataaaaaacgcgcaatccttctatttcatttctggagccggatcaggaaaaactcatgctctcattactggtgttaacaaattcataaatgataactattcacaactgatattaaacaatcaaaaaacactatgcattacttatactaataatgcggctgatgagataaaacatagattaggggataatgatttagcaataacttctacaatccattcttacatatgggattttgttaaataccatatggatttattgcttgatgaacatattatttttttggatgaagaaataaaaaaaattcacaatgagatatatgaattagaaacaaaaaattcaaccttattaaaaataagaagtttgaaagaaacccaactaagtgaaataatagaatgcatccttgaagataagaatgaattttatgaatcgttgatatcagcctctaagttctgggagtatcttaaatctattgctggtgacgaatcttttaatcacctaaaaggtaattatcagaatttgtccagtgctcttaaaaaactagtcagatctctagagtttaagcagtgcatatgtaaaataaaggaaaaagaagccaagttcacctcaataagatacttcaatactaaaaatatcgaggtcttatataaaaatatcattggacataatactttgttaatgtatgcatcccgtctgattaaaaaataccctttgttatccaaatgtattattgacgctcacccacttatttttattgatgaataccaagatactgatgaaaatattattaatttatttttagaggttcatgatattgcaaaaaaagaaaacaagaaaatatgtttgggtttttttggcgaccctatgcaaacaatatataaagacaacatgcataaagaatcgcataacctaaaaaaattggttaagaatataaacagaagatcgcatcagaatattgtttcatgtattaacaaaattagaggaagcaatcaagatgttcaacaaaatccaataaaaatatacagtgagcaatgctacccgtcgctgactgtcgaaaaagaagaaaactataccaatgactatttatcttctataattaaaaaatataaaaacaaatggaatgtaaatgaaaattcaaagctagcatgtctcgttctaaaaaatgaaatgctatctcaactctctggttttgaccccctttttgctataatgctagatatctaccagacagagcatgctaaaggatttgagatgattggttctgagtttttatttagagaaattagatatgcaggttctttaccatctatcctacatgatttactgatgccactttatctcttaaatagaaagtctgacttttcaatttcagacttcttcaatagagagtccatccaaaaatataacctatcaaatgttttaagctccatagaattaattgaatcattaagttttaagtgtttaaggggttttacatgtgaattatctaaaatatatggaaaacagaattcggaaattcaagcactgattaattataattttcatattataactgatggtttagatggtgcgaaagagaaaattattgacacctgcaggttgagagataaaactaagctcccgcttttattggatgaattgtttgaacttgatatggaacagttttttttatggttagactttatttatcaaaactattcagattctttggtttcatatttaacctgccacgcttctaaaggtctggaattcgacaatgtgataattttcctttcagattctttcaatagaaaagagggttatttttctaatcttttaaattcagaaataaattccagcctagaccctcagcttgaatcggcaagaagattactatatgtttcaagttccagggccataaaaaacttaaaagtatatctttttacaaataaagaaatagataagtccaaaattgatcatttattcacccaggaaattagctaa

SEQ ID NO: 78116 - DNA, 2034 bp, Yersinia pseudotuberculosis
atgcaacttaagaaaattttcatctccggttttaaaagcatttcgaatgaaagtcctcaaattattcaccttgaccatgaattaactacatttattggccataacggaactggcaaaagtacggctatggaagcgctaaataagctgttctcggtagatcattcactacgtggtatatcaataaatgacttccataacgcggatggtgggaacaatgaaaagagcaaaagtttaataatagaagcctggtttagcttccctaaaccaaatgaaggaaaaatttctatccctcctttaattgaacacctcaccattgataaatctgatggagtcattctttttagggtgcgattagagagtaaactttcctttgaagcaaacccgatgggagatattgacgaagacgtctgggtggttaacaccagtgacgacgtggttgaggagagcagtaaacagaaactttccgctgcagtaagaaactccatccaggtgagttatgttccagccaatagagatcccttattgcaattgaagtattcatcgaaggcggtgcttggtcgtttgctaaaggcgattgagtgggttggaggcagtcaggaagtcatagaggagcaagcagcgcaactaaacgcattaacgaagagcaatcctgcaatgaatgagattgcggtggcgattaacgccagttggggtaatatctacaaggggcgttatttgtcccaagcatcacttaactttccactcgctaatatcgatgaaatactgaaactgattcaacttcagtttaatcctgacgaaactggcaacacggtaaatgtagatcgattaagcgatggacaaaaatcattggtctatttttctcttataaaggcgatgtttgatattgataagaagaccagggagttgatttcctctggagaaacttctaattttaaccctgaaaaaatgagattgccgatttttagtatgatatccttggaagaacccgaaaaccacctttcgcctcattacttaggcagaataattaagttggtgaaagattatagtcgtaatgaattgtgtcaggttattatttcttcccattcttcttccattttaagccgaatcgaacctgagcaaatacgtcatttcagactggataaggattcaaaaagcacggtggtgaatgcgttaacgttgccggaaaaagaagatgagctttctaagttcattaaagaagctgtaaaagcttatccagagatctatttttctaaactggtgatatttggtgagggagatagcgaggaaatcataatacctaaggtacttgagctacactcaacggaaattgatagtcattccatctctgttgttcctcttggcggacgtcatgtgaatcatttttggcgtctgttgaagtcgttgcagatcccctttattactttgctggattttgatattgatagaaatggcggtgggtttggacgacttaaatatgctattgaacaattagctgagtttagtgaaagtggaagcacttatatccataaagatattgcagggcttataccgtcatgggatgacgcacgggacccaatagagttcaccattaaatataacgacggagcgacaataaatattgttgatgaattagaaaagtgcaatgtttatttttcttctccgctagatattgactatgcaatgattgaagctttccctgatattttttgtgagaaagatgaagtttatggtgaaagaggcccccaaaataccaagaaaaaagaaggtgaagaagaacaagatgagctaataaaagcagtattaaaaaaaggaaactccggcattcgttacggattttcagctgattatctaaaatattttctgtggtatcgctatcgctttttatccaataaaagtaaacctgcatcacatatcagaatgttttctaaaattgaagaaaagtatacgccagaagaaatgagagcaaaattgccttcagagctaattagggttgctgaaaagacagtaacattactggagggggttattgaatga

SEQ ID NO: 78117 - DNA, 1665 bp, Yersinia pseudotuberculosis
atgaccatacaatggcaaccttcagaaggaattacaccaacacaggagctaatggatattattctgtgtgatcaatccatttctgtacttgccggtgcaggagcgggtaaaacagaacttatagctcaaaaatcgaattacttgttgcagacaggaaagtgcatgtggcctaaacgcatattatgcctttcttataaaaaagaggcacaggagaatattaaagagcgagtaaataaaagatgtggacaaaaaggcgagcgttttgattcgtatactttcgatgctttttgtaagagcattgttgaccgttttaaggatgttttacctgagcataaaagacctttaaatagttatgacttagtattcaacgccaaggccagtaatggtaagaataagttatcttttgatttaattagaagtctggctgtagagattttaaaaaatagagttgatattgttgatcttttttcttttacctatccgcatgtttttattgacgagtttcaagatacacgttctgatcagtatgaattgattaaaattctttttaaagatagaggaacacaattgctagctgtaggcgatatcaatcagagcatcatgttatgggctggcgccagaaaaactgtatttgaagactatgaaagagaatttaacactaccagaaaactactggtgcaaaattttagagccagtgatgaaattcaggaagtattgagatgctttattcactttgtacaaaatgatgccaatttttcgccaataacaaagaatgtcgagaattgtactatccattgttatgatgatgagatttctgaggctgatggcattgctgataaaatagaaaactttatagcttccggtattaaagaaaaagagatttgtgtgctggctaaacagcagtcagaacaatatacggaaaaactccgagataagttaacgaagaaagggattagaaatcttgatatgtcggaactgcaagacgtcttgaaagagcccttagggcgaatatttgctgctctgttcaaggtttatacatcacgatcatcatcaagctatactgagctctgcgaattataccttactttacatagagttgctcgtggtgatgaaaaagaagactcgttgattaaagagctgtcggataaaatagcggcaaatagagaaatattgggtaactcgcccaaccctgatttattgatatcctatattaaggatattatgagtttttttgggttaaaaaaaatgatggggcgatggaatcaatataagtccgctgattattggagtcaggtctggctcagtcttgaacgacacttgcgctacacaataggcgcaacgaactctcttaacgaagctgcactgatgtttcaggcggaaaattccgtacaagttatgaatgtgcacaaatgcaagggattagaatataaggtggttatttttcttggtttagaggatcaggccttctggaactataataaagcaaaatttgaaaatgattgcgttttctatgtcgcgttatccagagcgaaggagaaaatattagtcacgacagctaagcatagagaacacaggataaataatggatatgacaatagaaaatctaactatcagatggttatgccggtatattcatttttgatagatcattgcaagttcaaatga

SEQ ID NO: 78118 - DNA, 1698 bp, Vibrio cholerae; identical to SEQ ID NO: 71760

SEQ ID NO: 78119 - DNA, 1377 bp, Vibrio cholerae; identical to SEQ ID NO: 71761

SEQ ID NO: 78120 - DNA, 1698 bp, Vibrio cholerae; identical to SEQ ID NO: 71760

SEQ ID NO: 78121 - DNA, 1377 bp, Vibrio cholerae; identical to SEQ ID NO: 71761

SEQ ID NO: 78122 - DNA, 1905 bp, Vibrio cholerae
gtgaaactgcaatatatccgcctctcaaattttcagagtttcggtgctaggccaacgaaactaactcttgatgatattacttatctgattggtcccaatggatctggcaaaacagcggtacttcaggctttatgccgtttgtttgcctttgatccttcactacgtcgaattcagcgttctgattttcatgtcccgcatgatgaacaggaatctccagaagaaagagaattatggattgaagctgatttctcatttcccgaattggaagatgaagaagacaactcgactgtcgcacctcactttagtcacatgcgtcttgatgagcctgatggggtcccacgggtacggtatcgtttaactgcgacaatgggttttgatggggatattgatgaaagttttgtctatgtaactgaagtcgaacaggatggttctcctctgaatcctcaaacagttcccagatctgagagaaaccaaattcaggttcactatttgccagcaaggagagatccttcagatcatattacatacgggaccaatgcgctgctcggtcgcctgcttcgggctgtaaattgggatgacgaacgtgaagaaattaaggaactcactgatcaaattagtgataatttggctggaaatccctcggtcgatgcgtttagttcccatctgaaagagacgtggggtgctctccataaaggcagttactttaccgatcctagaattacatttgtagcatcagagatcgaagcactactccgtcatttgtctgtatcgttctctcccggacatgatgaaaattttgtcgatttttcccggcttagtgatggtcagaaatcaatgttatatctgtcgttagtgctttcatcacaagctattggacgctctgttcttgccggtgaagaagactcttttgatccagcaaaattgcgtccgccagtttttaccttgatcgctcttgaggaaccggagaacagcctttcgcctcattttctggggcggattgtcacagctctgaataccatgacgtgtaatgaggatgcccaagccttaatcgctactcacgctccgtcaatgttgcgacgtgtcgatccggaacatattagatatctccgacttactgaatcccgtaagtcaagaattacgagaatcaaactaccagatgaaaccgatgaagcacataagtttgttcgtcaggctgttcaggcatttccagagatttacttttcacgtttggtcattcttggtgaaggtgacagcgaagaaatcgtcttgcctcgtctgttacaagctaaaggtgtgccagtcgatgaatcagcggttacgattgcaccgttgggcgggagacacgttaaccatttttggcgtttgttgtctgcattaaaaattccttatttaaccctgcttgatttagatgtggcaagatatcaagcgggatggggaaggtttaaatatgtaaatgatcaattaatgaagtattgccctgagaataagcttcctaaagatcatggcattcctaactgggattctgacaaagataaagttcgggattattttaactatattgaggcgtttgaaaaacgaggcatatttttttcatttccaatggatctggatttttcaatgcttcttgcttttcctgacgcttacggtgttgaaaatgaagttccggacgactcaacaataaaagcagttttgggtaagagtcatcatgattcatcgcaatacagtgatgacgagttaaatcttttttcttcatatcacaagctttttaaactcggtagcaaacccgctgctcatatagaagccttggcacagttgagtgacgacgatttagatttggatatgccaaaatcgtacgaacgccttgttgataaagtgaaagcaatgcttgaggagctaccagagtga

SEQ ID NO: 78123 - DNA, 1662 bp, Vibrio cholerae
gtgatatcttccgacgcttggctgccagcggatgggttgacgctagagccgaatgctttacgagcagcgaaagagcaagttagctgccttgctctgacggctggcccgggtgcaggcaaaacagaaatgctggcgcagcgagctgattttctcctaaggactggaaactgtcgttatccgaagcggatattggccatttctttcaaggttgatgctagtaaaaacttgaaggaacgaatccagcgtcgctgtggccaagaattggcttcccgttttgatagctatacatttcatgcgtttgcaaaacggattatcgatcgttttcgagtcgtgcttactggtaatgacgcgcttgatgcggattacacaattggtgaaagaagaattacaagaaggcaaattacgtttcgagagctggttccgctggctattcagatcgttaatatttcttctgtagcaaaaaatgccatacgccaaacttacagtgatgttttcttggatgaattccaagactgtactgatcagcagtatgaattggtcaaggtcgttttccaagggacgagtattcgtcttacggctgttggtgataccaagcagaaaatcatgggatgggccggagccttggacggcattttccaaacttttgcagtggattttaatgcggttccgctgaacatgtaccgaaactttcgttcaaagccctgcttgcttcggatgcagaacgagattattcgtgtacttgacccttcttctgttatgccagaagagcaacttgaaggagaggaaggggaagtttttgcctgggaattcgacaatgctcaagtagaagctgaatatttggctaatttgattgataactggatcagactggaggaaataccattatccgaaattgctgtattagtatctaaacagcttgatctttatgctgttaacttgatgtcagagttggataacagaggtataccttaccgaaatgaacaacagatgcaagatatcacagttgagcctgttgccagactcattgttgattatttgtcctgtctttatgggcagcgggagccgaaagcatgggttcgtttaatggaacagttgattccgtttgccgatgacgaaattcagtctgttgttaggcaagatttccaacaatttatcaaggaacagagaaaggaagcggcaacaatagggggagttgatgagcatttttccggatggtggggatttgtgcgtcgatttctaaagaaagtaggaaaagagattcttgtggctctctctcctgactatgagtcacacaccagactaaaagaagttgttagagagacaaaagcccacattgaagaattgcttgaacttgctcctgatttactgcaagccttaacccgtttttctgatgatcaggctgtacgtattttgactatccataagagtaaaggcttggagtttgactctgtcattatgatggctgttgagaatgaaattttctttggtgatgcagatgctaatcgatgtgctttttttgtcggtgtttctcgcgcgaaaaagaggtttgttcttacgtatgcaaaagagcgagataagcctgataattattcagggatatggagaacgaatcgctcagctcagttagaatattttggatatgcatctccttttgtgaagtga

SEQ ID NO: 78124 - DNA, 1965 bp, Vibrio cholerae; identical to SEQ ID NO: 71918

SEQ ID NO: 78125 - DNA, 1893 bp, Vibrio cholerae; identical to SEQ ID NO: 75901

SEQ ID NO: 78126 - DNA, 1698 bp, Vibrio cholerae; identical to SEQ ID NO: 71760

SEQ ID NO: 78127 - DNA, 1377 bp, Vibrio cholerae; identical to SEQ ID NO: 71761

SEQ ID NO: 78128 - DNA, 1698 bp, Vibrio cholerae; identical to SEQ ID NO: 71760

SEQ ID NO: 78129 - DNA, 1377 bp, Vibrio cholerae; identical to SEQ ID NO: 71761

SEQ ID NO: 78130 - DNA, 1698 bp, Vibrio cholerae; identical to SEQ ID NO: 71760

SEQ ID NO: 78131 - DNA, 1377 bp, Vibrio cholerae; identical to SEQ ID NO: 71761

SEQ ID NO: 78132 - DNA, 615 bp, Vibrio cholerae
ttgaagctttctaatgtgttggcgtttactggcgagaaagcaattagtctgtctgatactccaactaagctagttgactacctaagaaagagacctaacttcgacatcttaaagctgctgtttgcgaacaaagtaattctcgtagaggggccgactgaagaaatgctaatcagcacttatctgtctaaacaaccagccctcaacgacatcgatattattccaattggtcaacgtggttacgccactttcttagatatatggctagccttgaacaaagataaccagaataagaaaattggtgttgtccgtgattatgacaattcagatgcggctaaagccaaacatgatacctatgacacagcgcatgcgaatgtcactgtaagaacaacaacaaactacacacttgaaattgatttagtagaagcagaagacaacctagctttactaaatgatttattcgaaatggaaggcgacctcgacgcagtatccaagcacatgattaatggtaagacagcaagaatgcttgatgtatgtgatgcgatggttgatgaagagaatccactggatatcaagttaccagctcacatcgctgaggtcatcgaggcggtatcatga

SEQ ID NO: 78133 - DNA, 1377 bp, Vibrio cholerae; identical to SEQ ID NO: 71761

SEQ ID NO: 78134 - DNA, 1698 bp, Vibrio cholerae; identical to SEQ ID NO: 71760

SEQ ID NO: 78135 - DNA, 1377 bp, Vibrio cholerae; identical to SEQ ID NO: 71761

SEQ ID NO: 78136 - DNA, 1698 bp, Vibrio cholerae; identical to SEQ ID NO: 71760

SEQ ID NO: 78137 - DNA, 1377 bp, Vibrio cholerae; identical to SEQ ID NO: 71761

SEQ ID NO: 78138 - DNA, 1698 bp, Vibrio cholerae; identical to SEQ ID NO: 71760

SEQ ID NO: 78139 - DNA, 1377 bp, Vibrio cholerae; identical to SEQ ID NO: 71761

SEQ ID NO: 78140 - DNA, 1698 bp, Vibrio cholerae; identical to SEQ ID NO: 71760

SEQ ID NO: 78141 - DNA, 1377 bp, Vibrio cholerae; identical to SEQ ID NO: 71761

SEQ ID NO: 78142 - DNA, 1698 bp, Vibrio cholerae; identical to SEQ ID NO: 71760

SEQ ID NO: 78143 - DNA, 1377 bp, Vibrio cholerae; identical to SEQ ID NO: 71761

SEQ ID NO: 78144 - DNA, 1698 bp, Vibrio cholerae; identical to SEQ ID NO: 71760

SEQ ID NO: 78145 - DNA, 1377 bp, Vibrio cholerae; identical to SEQ ID NO: 71761

SEQ ID NO: 78146 - DNA, 1698 bp, Vibrio cholerae; identical to SEQ ID NO: 71760

SEQ ID NO: 78147 - DNA, 1377 bp, Vibrio cholerae; identical to SEQ ID NO: 71761

SEQ ID NO: 78148 - DNA, 1698 bp, Vibrio cholerae; identical to SEQ ID NO: 71760

SEQ ID NO: 78149 - DNA, 1377 bp, Vibrio cholerae; identical to SEQ ID NO: 71761

SEQ ID NO: 78150 - DNA, 1905 bp, Vibrio cholerae; identical to SEQ ID NO: 78122

SEQ ID NO: 78151 - DNA, 1662 bp, Vibrio cholerae; identical to SEQ ID NO: 78123

SEQ ID NO: 78152 - DNA, 1698 bp, Vibrio cholerae; identical to SEQ ID NO: 71760

SEQ ID NO: 78153 - DNA, 1377 bp, Vibrio cholerae; identical to SEQ ID NO: 71761

SEQ ID NO: 78154 - DNA, 2139 bp, Klebsiella variicola
atgtatatttccaaactgaccctggtgaattacaaaaacttcaagaacacgtctctgcggtttcacaagggagtgaacaccattatcggggaaaacggctcagggaaatctaacatcctgcgagctattcgcctcctgcttgacgacaatatggtgcgttctgcttatcgtctggaagagggcgatttcagccgatcactcgaccaatggcaggggcactggatcatcatcagcatggagtttgacgagatcaccactgatgaatccgttcaggcactctttctccacggtacggctcccttggacgatgggccaatacataaggccacatataatctcattttccgacccaaaaaagacatcaggttgaagctggcagccttagaattgtttgattttaaggaactctcggagattcgtgacgcaatcaccatcgatgattacgaaacgcttttcactggacggagcaatgctgatttcggaaatccagcggtataccgaagtatcgttggagattttgatatatgtgatttctcatcagagacggagtttccggaaatcggggcaaaggtgccgggcttcctttcagttacgaaagaggtctcgctgacttttatccaggccttgcgcgatgttgtttctgagtttcacaacaatcgcactaaccctttactcactttgctgaagagcaagagtggagatatcaatccactaacgatggaaccaatctccgagatggtccgcggacttaatgcctcaatcgaaggacttgaggatgttcagtcagttcgcaatcatattcgtgagaccattaaggacgccgcaggtgaaacttactcccctgcttcactctcaatcaagtcagatctccctgaagaagcagataaactttttcagtccctgcgactattcgttggtgaatcagaagaagggtacgaaggtgcaattcatgagctgagccttggcggtgccaacctaatatacctgactctcaaactactggagttcaagtaccagcgggaaaagctagccatggccaatttccttttgattgaagagccggaagcgcatatccatactcatattcaaaaaacgctgttcgatcgcatcgcatatagcgatgcgcagatcatttacaccacgcactcaactcacatctccgaagtcagtaatgtaagcaatgtaaacatactgggccgtcacggagcgttttgcgaggcctatcagcctgccagaggtctagatcccacccaaatcaatagcatccagcgttatttggacgcggtgcgtagtaatctcctcttcgccaaaagcgtgatactcgttgagggggatgtggaggagatactgataccaatactgattaagcttgtactgggcgtaagcgttgacgagttgggcatcagtgtcatcaacattcgtagcacaggattcaagaatgttgcagttctcttccatgacctacgtattaagaaacgatgcgccatcatcactgatttggataaggccttctttaatatcaccgtacaggcaactgataatgcaattgtggcaaagttaaaggcaaaagctgcgggatctcagaaagccggtttagaacggcaggccgatttgaccgagttcacggcagaaaatccatggattgaaaccttttacgccaaacacaccttcgaagtcgactttgtcgcagccggcaaccaagaggctatcgtccagaccattccgaaggtttacaaggatcagggaaccagggaagaggcgaagctgcaactcaagtccggagacctgcaacaaatgggtagtcgtacgctgacaatggctcggcaagagggtaaggggtggttcgcgcttttgctcgctgaatacctcactccccaagtccagatacccgaatacatcatacaggccatccattttgcacatggcaaatttccgcgttcccttattgtcagaattctccagtatcgcgctgaataccgatatggagcagatgtggcaaatctgccagcgaaacaattatttcttcaggagataaatcgttttgcgcaaggaggtattggcctggctgagttcaggataacaattggacgtttattaccgggagaccccattattgtattcttagggaagttgcaatga

SEQ ID NO: 78155 - DNA, 1785 bp, Klebsiella variicola
atgaggttcgtttgggatccaagggacctcaatcctgaacaggcggcagcagtgacagagccatcgagcatttttctgatcgcttgcccgggtagcggaaaaacgcgcaccctgacctacaaaattgcctatgaactctctcgtcgaactgataagcggctcgttgttgccattacctacacccaccgtgcagccgatgagatccaggaacgtattgaagatttgggcgttgatacttctgggctatggattggtaccatccatgccttttgcctggagtggatccttaagccatatggcatttattcgcctgaacttgcgcgtggttaccgcgttatcgacccgtacgatcgtgagcgtctgctggagaggctgtgcgctcagtataaaggtatcactcactgggattgtgactactacgttactgaaacgggttatcaacttggctgtgtcgatacgagaaaacatcttattattcaaaacgttttgaagaaatattttaaagagctttcatcaagccgacagatcgacttcgaacttatcctttggtatgcgtactgcttgatgcgggacagacctcctatcgcagtactgctctctcgcgtgttttcccacatcctcgtggatgagtatcaggataccaaacagattcagtactctattttgacgtcgatacttcgcgctggaaggggggagaccaaaatactcatcgttggtgatccgaatcaagcaatctatggctcactgggtggctacgctatgccattagatgaattccgtgcgcaagccggaatcccgataaaggagtttgcgctcagcctaaactatcgctccagtgagcgaatcatcagctatttttcgaactacagcgtacacgctagcaaaatcaccggtgctggcaaagatgctaaatttcccagccggattacctataatcaaaaggttacacgcagcaatgttcatgatgagattgtaaggctgattcggaagagtctagacaacggctactcacccgaaaacatctgcgtcctcgctccacagtgggttttgcttgcctccacgactcgaaaactagttgcaatgttgcctgatcagcaatttgatggcccaggcctcatacctttcagtaataacttcgataatttctggttcaaggtttccaaggttttactgacggattcttccccagcattacttatcaggcgactgcgttgggcaaacgaagtaataagagatcttgatagtttcggcgttgatactaagacactgacaccgagaatcttgctgcgggagagtaacgcgctcacggtcaatgagttggacggactccgctacctggaccaggccttcaccgagctgctcaagaggctcaatatttctccggaaattcatcctgcgctcttgactcatcgagaggcttttttcagcagctcagctgcgcgaatagagcgtctgcaaaaggaaggagcgacatacatcaatcaaatatccgtcttcaaaaaagtctttcgcgaaagaagcggcatcactgtctccaccattcatggtgtcaagggtgccgagttcgacgtcgtcatcgcctttggattattggagggcatggtaccgcacttcaatgaagtgaatggacatgttgccgcaagcaagctcctctatgtcttgagctctcgtgctcgaaaaaatcttcatttaatctcggagtcagaacgtcagagaggaagatacagtagctattccgcgaccgaattactcgcggcctgcatctttaattatgacgaggagtaa

SEQ ID NO: 78156 - DNA, 1905 bp, Achromobacter piechaudii
atgaagcttcaaacgatccggctctcgaacttccaatcattcggagcggtgcccaccgaaattcggctggagcagattacttacctcatcggccctaatggctcaggcaagaccgcagcactccaagctctgtgccgtatgtttgcttttgatccatcactgcgccgaatcgtgcgctcggactttcatgtcccatccaacgaggcagcaccgcctgctgagcgtcagctatggatagagatcgactttctgttcccggaactcggcgatgacgatgacaatagtacggtagcccctcattttggccatatgcgccttgacgaaatcgacggcacaccgcgagtgcgtttccgcatcaccgccaccatgggcttggatggggatatagaagaaagcatggcctatgtgctggacatcaatgcagatggctcgccgctgagcacagctcaagttccccgatcagaacgcaaccatatccacgttcattacctgcccgcacgccgtgatcctgccgatcacattgcctacggcgccaatgcactactgggacgcatgctgcgtgcggtgaactgggatgcagagcgaactgtcatcaagggcctgaccgaccaaatcagtgacagcttggctgccaatccatcaatcaatgcgttcagcgcaagcttgaagtcggcatggagcgttttgcacaagggtagcttctttgccgatcccaagctcacatttgttgcgtctgagattgaagccttgttgcggcacatgtcagtgtcatttacgccgggccatgatgaacagttggtcgacttctcacgactgagcgatggtcagaagtcgatgctgtatctgtccttagtgctgtcctcgcaagctatcggtcgcgcggtcttggctgaagatgacgattctttcgatgcagacaagctgcgcccgcccgtgtttacggtggtagcggtcgaagagccagaaaacagcctctcgccgcactaccttggacgcatcgtcaatgcgctcagcacaatgaccagggatggtgacgcgcaagcactgattgcaacacacgcgccgtcgatgctgcgacgtgtcgctccagaacatatccgctatctgcggctgacccaggagcgaacaacgcgcgtcacgcatatcctgctgccagatgctgctgatgaggctcacaagtttgtgcgcgaggccgtacaggcctttcctgaagtctatttctctcgcctagtggttctgggagagggagacagtgaagaaatcgtgttgccacgtctacttcaggccaaaggggctccggttgatgagtccgccgttacgattgcgcctttgggcggcagacacgttaaccatttctggcggcttctttccaccctgcaaatcccttatctgacactgcttgatctcgatgtggctcgctaccaggctgggtgggggcggatcaagtatgtgaatgatcagttcgaaaagtatcggccagaacaaaagttaccgaaggaccatggcattccaaaatgggactcaacaaagcacatggtccgtgagtacggacactaccttaagctgcttgagaagcgagatgtttacttctcatatcccatggatctagatttcgctatgttgcttgcatacccagatgtgtatggtgcgatagaggaagaccccgaggatgacacgatcaaagcagtcttggataaaagccatcacgacgcgagccaatacagcgaagacgagcagcagctgttcaacacctaccatcaacgtttcaagcttggtagcaaacctgcagcccacattgatgcactggctcagctgactgatgaagagttgctggcggatatgcccgcatcgctgagcagattggctgatgccgttatcaccaaactcacggagttgccggagtga

SEQ ID NO: 78157 - DNA, 1677 bp, Achromobacter piechaudii
gtgattgcagtcgatgcctggaagccttcagatgggctgactcttgaaccgaatgcactattagcagccaaggagtgcaagcacagtcttgcactgacggcaggccctggagctggaaaaacggaaatgcttgcgcaacgtgcagactttttgctgcgcacaggaacctgtcgttatcccaaacgaattctggccatttcgtttaaggtggatgccagtagcaacctgaaagaacgggtcaagcggcgctgtggttccgagcttgccatacgatttgacagctatacatttcatgctttcgccaagcgaatcatcgaccgtttccgtcctgtgctgacgggcgaatatgcgctagatgcagcgtacaaaattgcggacagaaagcctagaccatcacggaccttgatcgaattttccgatctggtgccgtttgcgatcgaaattctgcagcagtctgcggtcgcgcggaacgccatccgtcaaacctacagcgacgtcttcctcgacgaattccaagactgcaccaacctgcagtacgagctgctcaagctcgcctttcaaggcacgagcattcgcttgaccgccgtaggcgacactaaacagaagatcatgggctgggcaggagccatggatggcatctttccgactttcgttgccgactttgccgccgctccgctcaatatgtaccgtaactttcgttcaaagccgcgactgcttcgcctgcaaaacgacatcattcgcaagcttgacccatcttccatcatgcctgatgagcagcttgccggagacgaaggcgaggtattcgcctggcgcttcgaagatagtcgtcaggaggctgactatctcgctggcttgattgaaggctggataaagaccgagcagttgtcacctgcggagattgcagtcctaattcgtaatcagctcgacctgtacgccgatcatctgatggcggcgctggagatacgtggtatcccgttccgtaacgagcagcagatgcaggacattacggtcgagcctgctgcacgtttgatcgtggactacctctcctgtctctatggccagcgcaagcccaaagcctggatccggctcatgaatcaactcatcccttttgctgatgaagagattcagtcgaatgcgcgcaaggaccttgatcggctcgtcaagcggcaacgaaaagagatagccattgccgaactggtcgatgagcctttctccggctggtgggagttagttcgagcattcttgaagcaggtcagtatcgaaacgctggtgtcgcttgccccggactacgagtcgcatgatcggttgaaagaggtgattcgcgataccaaggcgagaatcgaggaattgcttaagctggagccttacctgcccaaggcacttgagcggttctcagacgaccaggccgtacggatcctgactatccataaaagcaaggggcttgagttcgattcggtcatcatcatggctgtcgaaaacgaaaccttctttggcgatcaggatgaaaaccgatgcgcctatttcgttggaatttctcgtgctaaaaagcgcttggtccttacgcatgccgatcaacgggagcgtccagcgggacattcgaaacgctgggatgtgcaacgcacagctcaaaatgaataccttggctttgtcacgccgtttttgaaaaaaacgcaatag

SEQ ID NO: 78158 - DNA, 1704 bp, Escherichia coli; identical to SEQ ID NO: 77328

SEQ ID NO: 78159 - DNA, 1623 bp, Escherichia coli; identical to SEQ ID NO: 77329

SEQ ID NO: 78160 - DNA, 2217 bp, Escherichia coli; identical to SEQ ID NO: 75810

SEQ ID NO: 78161 - DNA, 1788 bp, Escherichia coli; identical to SEQ ID NO: 75811

SEQ ID NO: 78162 - DNA, 2076 bp, Acetobacterium bakii
ttgaaaattaaaaccattcatatatccaattatcgaaaatttgataatgttaaattaaatatggaagataatatcactgttatcgctggtgcgaataacagtgggaaaacttcacttgtcgaactttttaattctatattcaataacactagaagtaaattatgttgtgatgatttttcaattattgaatgtcaaaaatggagtaatagcatatatcctattgtctattctgcttttacaacggggaaaccaaaagaagatgtaataacagatatctgcaaagaagtcttgtctgttacgaaatcagaagaggtagcgttgatgcccccaatcgaagtgaaaattcaggtggattataatggaaatgaagatgatattcggcattttgctgattatatcatggaatttgagccaaacaatacgagtttttattttatctatcgttatgcattgaatgttgaactcttcagaaaaaccttagataatgaatacgagaagtttttaacacggtttattaaactaacgcgcgatgaaaataaggagattgatgctattcgcattattaaagaaatgctcgttctgctatatgccaactcatgtgaggaaacagcaaatttttccgataaggcatataagaacatagtggctatggacatgtcgtcgttcaaaagcctatttaattatcataatattatggctgggcgaaatttagatgacgaaagttctgatagaacaaaaattttgagcaaaaacatgattgatattgccagtcaggaagatgactggaaggatttgattaaaaaccttccagatcagattattcaacctattcaagacgcaaagattcaggaaaaagtacggatcgcttcacttgatactctgagtgaaacaatggaggcaatttctataactaatggtggtcatgcgggaaacatagtcattgatatgaatgtgactgaggaagcagtccactctttactaaaaagcattacatgtgctaagtatcaagcggatgatcattatttaagcgaatcttcacaaggtctaggatatagtaatcttatctatattcatcttcaattagagaaattcaggaaaacaattgatccgctaattgtgaacttctttgtaattgaagaaccagaagcacatatgcatcctcagatgcagaatgtcttttcacaatatctaattaactattataatcgtgaaaaaggtattcagggcgtattaactacgcactcgcatgaggttgttcgaactgcttcaatttctcaactccgagtgttacgacaagttagccctttcaaatgcaacacatatgatttgcgtgagttccaaaactcaattgcgtcaaataaggaattgttggatttttatgattggttttataccatcaattttcccgacattatctttgcggataaaattattatgtatgaaggggatactgagaggatgttaataaagtacatattgcgctcaaaagaattcgaactgttgagaagtcaatatgtttcttttgttcaagtcggaggagcatatgcatataattacaagcctattattgaatttttgggtattaaatcggtcctaataactgatttggattatgataaagattcgtctaatatcgcagacgttttgatttctggaactacgaatacaacaattaataagttttcagagatcattctagataatccagcgccaacggtacaagtgttgtatgactggaaggaaaagtctcctcttattgtagtggggtgtatttgtcttgcctttcaaggaaaaagagactactattctcgaacacttgaagaagcaatgcttgcgcgacattatggtgttacagctttagatgtcaaactcaaaaaagaatggatagagaaacgaaataaagacaaattgaagtttgttattcctcgagagggagatgaatgtagtattcgtacgatcgttttacacacatcaaatagaaagacagattttatgtattcagtcattctcaataatctggtagattctatgctgcctgcgtatataaaggaggcattattgtggctgacagcttga

SEQ ID NO: 78163 - DNA, 220 bp, Acetobacterium bakii
gtggctgacagcttgaaaaactgttttcttgttaatgcccctgctgggagtgggaaaacgacacaaataaaagcaatggtaaagaagtgtatcctcgagaatccgagagataatattttatgtataacatatacaaaccgagctgccgatgagctgtccagagatgtagatgcgaagaatgtttttattggaacgattcattcatttctcaatagcttca

SEQ ID NO: 78164 - DNA, 2028 bp, Clostridium homopropionicum DSM 5847
atgtatttaaaaagcttgaaaattattaattttaggaaatttggatcagaaaataatacggtagagtttgttgatgcacaaagttatcaagaacaaaagaattcaaaggaaataaatattgcgccaacaactacattaatagttggaaaaaacaactgtgggaaaacaacgattattcaagccttggacaaacttataaatgataatagcttaaagtctaatgattttaacttttcatatataaaaaaattattgaattcatatcaagcttctactgaaaaatttgatcttccttttattgaatttattgtaggtatcgggattgataaaaataatacagatttaattactaatcttattccttttatgacattagaggatataaacaaatcgaaattggatatttttattaggtacgaagttgaagatgctgaaatatttattaataatataaaacaattactacaaaaaaaataccgtgatgaaaatttaatatttaataaatttttagaaataattgatatatctaactttaaactaaattattataataagaatggagagagcataaaacaatttaaattaaaagatttaatggaattgaagtctataaaagcaaataatattgaaggggagaattgcttatctaaagcatttagcaaaataattgaatacagatataatatcttgttgggaggagataaagaaaaattagagtcaaaaattatcgatattaatagtgacttgacaaaaaaattcaatagtcatcatacaaaatatataaatgactctttaggtcaagttgtatctaatgataaattgaaagtgttattgagtgctgatttaactttccaaaggcttatgaatagtttagttaagtataaatatgttgaagaaaatttgtatattcctgaaaatcaatttggcttaggatatacaaatttaatgatgataattgcagatttgattgactatatggagaaatatccagagaattcttttaatagcaaagttaatttaatatcaatagaggagccagaaacatttatgcatcctcaaatgcaagagctttttataaaaaatataaataatgcaattgcaactcttttggaaagtaagcataaaaatataaacagtcaattgataatcactactcattcatctcatatattaaatagcaaaattcatagtggcaatacttttaataatataaattacataaccatcgaaaaaaattacgctaatgtagtgaacttaaatgatgaaaaaataacaccaaaaagtgatacaaaagaaaatgatttgaaatttctaaaaaaacacataaaatacaaagtttcagaactctttttttcggatgcaattattttggttgaaggtgtaacggaatacacgcttctgccttactatattgataaaaatgacaaattgaataagtattacatatcagtttttaatattgatggtgcacacggacttgtgtatcgtgaattaataaaattattaaaagttccaactttaataattactgattgtgatataaaaaggttcgatgatgaaaaggaaaaatttgcgcaaatttctagtttaaaagacaggattactacgaatcaaactattatcaaaaataataacgataatagcaaattggatgttttacctgaatatattgaatatcaaaatatgtatattatttatcaagggaaaataaatagatattatgctacaagttttgaagaagcctttatattaactaactacaacaatatattattaaataacgttttgaaaaaaataaaacctaatatttataaagaaattattgttggaaataatttttccaataataaaaagaattcttataaatggcaatgtaaattatctaatgataaaagcaattttgcaaatgaattgttatacgctttaataatcgaagaaaataaagctgaaatccctttacttcctaaatatatagtaactggacttgaaatattagctaaaaaactaaagggagatgaatcaaaatga

SEQ ID NO: 78165 - DNA, 2064 bp, Clostridium homopropionicum DSM 5847
atgaatctaacaaaaatatcttctcaaaatgagacaaaagagaaaaaaattattaaagtaatttgtaattgtgttgataaaaagaaaagtataatttttagctctggagcaggtgcaggcaaaacatatgctcttgtagaatgcttgaaatatgtaataagtacttataacaaagaactaaaatatcataatcaaaaaatcatctgtataacatatactaatattgccaccaacgaagttaaacaaagattaggtaatgcaagcacagtattggtatctactattcatgaaagaatatgggattttataaaaaattataaaaaggaattggtgcaaatacaccgagagaacttatcgaagaaaatagaagaaatggaacaaaaaataaaaacagctaaagaatatgagcaatatcgtaaacttaacgatgaacaaaaaaaagctttacagaaaataatgaatgaaagtaaggatatatattataaatattataattttaatgctaaagattttaagaaaggattaaatgatattttaactgatttccccggtattttaaataatgttagcaatttcaaaataatcattaatactatttttaagttatcaaattatcatatatgtaaacacaatattgacgtaagcaaaccaagatatacgtctgtagaatataattcaacctacaatagtgatcagcttcataaaatgagaataagtcatgatactttattagattatggtttaaaaattattgaaaaatatgatttattaaaacaaataattattgacaaatatccttttatattcattgatgaatatcaagatactaatgaaagtgtagtaaaaataatgaattgtttacatcagcattcaatcaaaattgggcatgaactttttattggatattttggagatgttgcacaaaacatttataacgaaggagtaggcaagaaaataacacaaattcaatctgacttaaaaccaataaataaagaatttaatagaaggtcaacaaaagaagtcattgatattgcaaataaaattagaaatgataatattgttcaaaaatctatttttgaagattgtgttggtggaagtgttaagttctatactggaaattcagacgatgttagcaattttatagaaaaatatttatttgagtgggaaataacacatcggaatccactacattgtttcgttttaacaaataaaacagtttcaaagtatagtggttttgaaaatttgtacaatgcattgagtgatacagatacatatagtgggtctaattatggccaattaaacaccgaattattaagcaatgacatatcaaaacttggtgaaattcccagcttattatttaggataataaaattaaatgataatattgaaaataataaaactcaattaaaagatattttgccgtcagaattatgtataaatatgaatttagaaaacctagaaaatttagttttattattaaaaaagatcacaggaaatacattgggagaatatgtacaaaatatttcccaaatatattctaaagatatcgaaggaaaatataaaaaaataatagacagggtttttgatattgacaacatttcgtttgaaacttttaaaagctttcttaccgaaaaattattttctaatttaaatgatagtgatgtagaaaatgcaaatacagttatacaatcattgttaaatataaatataaacgaatacaaattatggtataaatacatattgaatgaatgtgatgataaaataatttatcatacatatcatggaactaaaggattagagtttaataatgttataataataatggaaaatgcttttgggaaaagtagaagttattttgattttttctttaaaaattacactgaattaaaaactctgaatgatgcagataaagataaatttgagcaaattagaaatttgttatatgtttctgtttcaagagcaattacaaatttgagaatattatatactgatgatgtaacaaattttaagaatggaattgaaaagatatttggacaaatatacacatatcaaaataataattaa

SEQ ID NO: 78166 - DNA, 2268 bp, Xanthomonas campestris; identical to SEQ ID NO: 78104

SEQ ID NO: 78167 - DNA, 1848 bp, Xanthomonas campestris; identical to SEQ ID NO: 78105

SEQ ID NO: 78168 - DNA, 2295 bp, Xanthomonas campestris
atgcgcattcagcacgtagagatatctaacttccgaaagctgctttctgtgcgaattgacttcgctaatgagaccacgctgcttgtaggtgcaaacaacagcggcaaatcatcggccatgctggcactccggagatttttggtttcgaagggatcttcttttcggctccaggatctgactctttgtcatttcgccaagcttgacgaaattggtaaggagtgggagaccccaccagcaaactttgaaattcctacagccaaggactgggccgactggctccctagtctggatatctgggtgtcggcagatcaaggagaattccacttcatccgcgatctcattcccagctttgcgtggcgcggggggcttgtgggaatgcgtttcctgcttgaaccagatgatatgaatatgctgtacacggactatcgcaaggagcgcgcgagggttgcagagcttgaggatgctttagggaaggaggacccgcttggtagcccgctgacgctatggccacagagcctccatgattacttgaaccgtaggctgggagataaattcaaggttcgttggtatcgcctagatccgcaacaacttaagaagcctcacaagtcgactcgaatggctcaaatgcagcaattgagtcctacctccctgcctctggaaagcaatcccctcagtggattaattcgagtacacgagatcaatgcacagcggggattcggcgaccattcggacgacaatcaaggcgataacactagacccagcggtgcccgaaaactctcggaacaactcagatcctattactccagacacctagatccaggtgacagcccagatatctcagatctcgaagcgttgcgggcgatagaagcagcccagtcggcattcgataccaggctaagtagcagcttcgaatctgctattaaagaggtcgagggattgggctaccctggccgcaatgacccacgcatcaaagtcgcaagtcgcctagcagcaaccgacggcatgaaccatgaagctgccgtcctttttgagttggattcaattcagggcgccccaggagcccctcctcttcatttacctgagaccgctaacgggttgggatatcaaaacctgatatccatgattttccggctgatgggttttagggatgagtggctaagaaaaaccagggccgccagcgcgggggtaatagaccgcgtcgagcccatccacctcgtgctcattgaagagcctgaagcccaccttcatgttcaagtgcagcaagtgttcgtgcggcacgcctaccaagttctatgccgagacgcgttgcttgaacgctacccaaatctgaagactcagcttttggtgagtacgcactccagccatgtaactcatgaagtggagtaccagaatcttaggtatttcaggcgactcccagcagggatgtatggcataggtgtaccggtgtcgacggtctctaacctctctaacgtgttcggcgatggaacaaagacgaagaagttcgtaaccaggtacctacgggcacagcacgcggacatattcttcgccgacgccgtcatcttggtagagggctcagcagagcgaatgatgctgccgcattttttgcggaataagtttacattccttgaccgctgctacatcactacccttgatatcggtggcagtcacgcacaccgactaaggcctttaattgacgcgcttggcatcctcactctggttattacagacctcgatgcagggttgaataaagcggcaaaaccggtgcaaagaaacgcagatcagattacgaacaatccgacattgcggagctggatgaaactgatgcatctgggcagtacagtagatgagctgcttgagctgccagcgaatcaaaaagagcaccagatcgacgacctgtactcggtgcgcatcgcctatcaaactcctatttccacccacctgcccgctactggtaaagcaatacaagctctaccaaatacctttgaagacagttttgtgcttagcaacgccggtcactttgcggaaaaaacaaacggcactggtctgatgaaggccttcgtaaaagttttgaatgaagcgcaaacatcggaagccgtcggagaaggttttttcaacgaattacgcgaaggaaagaaagcagagtttgtgttgctcgttttgggcgacaaaaacttccccaaccttgaaatccctgaatacatcagtgaaggcctcaactggcttgagtcgaaattgcgaagcaagcaaaaagagctgctggtaattccacccgagggcatggaggtgacgccatga

SEQ ID NO: 78169 - DNA, 1848 bp, Xanthomonas campestris
atgagcgaggcagctatcgcagatgccgacaccattatgcaggcttgcctgaatctggcagacccgaagagtttttttctttacgcaggtgctggctcaggaaaaacccactcactcgtcgaagctatccgcgaactcaaaagtcgcgagcgagaacgcctgacattcgagggcaggcgcattgcggtgatcacctatacaaacgcagcctgcgatgagattcttcggaggctcgagtttgatccactcgtggaagtctcgaccattcacgcgttcgcctggcgcctaatccaaggattcgacaacgagatcagagagtggctaaggatcaaacttgcccaggacattaataagatcgagggcgagctagcacgctcgagaggcgacaataaaacgtctcgagcaaacagacggaagctacaaagcaaaatacgcagacttgagactctcgacgggattacgaagttcatctacagccccgctggcgacaacagagagcggcaagcactcaatcacgatgaggtcatcaagttaagtgctgcattcgttcctgaacgccctttgctggatgttttagtagaccgctacccagttgtattgatcgacgaaagtcaggacacccacgctccagtaatggaggcttttctgaaagtccagcaattggcgcagacacgcttctgcttggggctactgggcgacaccatgcaacagatttacggccatggagtaacgcgccttgataaagcgataccgggtgactggctgaaacctgaaaaggttgttaatcgccgctgccctcgtagggtggtagaccttatcaacgtgattcgaagcactgcagacactcatcagcagaccccaaaacctgatgccattgaaggtgtagtgcgcatgtactgcattagtcaaagccaagaaaaggcaccgaatcttgaggaaggaatcgctcattcgatggctgcaatcaccgacgacggagaatgggctaccggccctgaaggccgaaagaccttgatcctcgaacataagatggctggacggcgaatggggttcgagaagctgttcacgcccctacacgcggttgagcaccttcaaacaggcttgctggatggaaccctgcccgcacttcgcgttttcagcgaaggcgttcttcccatccttaccgcaaaggacgatcactttcttctgcttgaagcagtacgctctcgctctcccttgctcagtaaggacgctatgcaatcaacaggggatcaatcggcccacatgcaacgtgtagaggacgcgacgcacgccctgctctctcttttcgaaagaaacgatccaacactgagcgaggtcgcaacgcttctgttgcaaacccaactacttgatgtccctgaaaatctggttggggcaatggtgttgggagctcctggtgaggctccagatcctgaagatacgaacgcgatgaccaactacgcctatcagctattccttgagcgtccattttcggagctggcagcctttgcgagttatgcggatggcctttccccctacggtacacatcaaggggtaaaggggctggagtttccacgagttatggtcgtcatcaacgatgaggaggcaggcggcttcttattcagctacgacaaattgctgggtgtaaaagaaccaacaaagactgaccgggacaacgagcgtgatggcaaggacaacgcactagcacgtactcgtaggctgctttacgtgacatgtagtcgggctgaaaagagcctggcgattgtcgtatacacaccccatcctgcactcgccaagcaaaacgttgttactgctggctggcttcaggagagcgaggtcgaaatcctttga

SEQ ID NO: 78170 - DNA, 2268 bp, Xanthomonas campestris; identical to SEQ ID NO: 78104

SEQ ID NO: 78171 - DNA, 1848 bp, Xanthomonas campestris; identical to SEQ ID NO: 78105

SEQ ID NO: 78172 - DNA, 2295 bp, Xanthomonas campestris; identical to SEQ ID NO: 78168

SEQ ID NO: 78173 - DNA, 1848 bp, Xanthomonas campestris; identical to SEQ ID NO: 78169

SEQ ID NO: 78174 - DNA, 2295 bp, Xanthomonas campestris
atgcgcattcagcacgtagagatatctaacttccgaaagctgctttctgtgcgaattgacttcgctaatgagaccacgctgcttgtaggtgcaaacaacagcggcaaatcatcggccatgctggcactccggagatttttggtttcgaagggatcttcttttcggctccaggatctgactctttgtcatttcgccaagcttgacgaaattggtaaggagtgggagaccccaccagcaaactttgaaattcctacagccaaggactgggccgactggctccctagtctggatatctgggtgtcggcagatcaaggagaattccacttcatccgcgatctcattcccagctttgcgtggcgcggggggcttgtgggaatgcgtttcctgcttgaaccagatgatatgaatatgctgtacacggactatcgcaaggagcgcgcgagggttgcagagcttgaggatgctttagggaaggaggacccgcttggtagcccgctgacgctatggccacagagcctccatgattacttgaaccgtaggctgggagataaattcaaggttcgttggtatcgcctagatccgcaacaacttaagaagcctcacaagtcgactcgaatggctcaaatgcagcaattgagtcctacctccctgcctctggaaagcaatcccctcagtggattaattcgagtacacgagatcaatgcacagcggggattcggcgaccattcggacgacaatcaaggcgataacactagacccagcggtgcccgaaaactctcggaacaactcagatcctattactccagacacctagatccaggtgacagcccagatatctcagatctcgaagcgttgcgggcgatagaagcagcccagtcggcattcgataccaggctaagtagcagcttcgaatctgctattaaagaggtcgagggattgggctaccctggccgcaatgacccacgcatcaaagtcgcaagtcgcctagcagcaaccgacggcatgaaccatgaagctgccgtcctttttgagttggattcaattcagggcgccccaggagcccctcctcttcatttacctgagaccgctaacgggttgggatatcaaaacctgatatccatgattttccggctgatgggttttagggatgagtggctaagaaaaaccagggccgccagcgcgggggtaatagaccgcgtcgagcccatccacctcgtgctcattgaagagcctgaagcccaccttcatgttcaagtgcagcaagtgttcgtgcggcacgcctaccaagttctatgccgagacgcgttgcttgaacgctacccaaatctgaagactcagcttttggtgagtacgcactccagccatgtaactcatgaagtggagtaccagaatcttaggtatttcaggcgactcccagcagggatgtatggcataggtgtaccggtgtcgacggtctctaacctctctaacgtgttcggcgatggaacaaagacgaagaagttcgtaaccaggtacctacgggcacagcacgcggacatattcttcgccgacgccgtcatcttggtagagggctcagcagagcgaatgatgctgccgcattttttgcggaataagtttacattccttgaccgctgctacatcactacccttgatatcggtggcagtcacgcacaccgactaaggcctttaattgacgcgcttggcatcctcactctggttattacagacctcgatgcagggttgaataaagcggcaaaaccggtgcaaagaaacgcagatcagattacgaacaatccgacattgcggagctggatgaaactgatgcatctgggcagtacagtagatgagctgcttgagctgccagcgaatcaaaaagagcaccagatcgacgacctgtactcggtgcgcatcgcctatcaaactcctatttccacccacctgcccgctactggtaaagcaatacaagctctaccaaatacctttgaagacagttttgtgcttagcaacgccggtcactttgcggaaaaaacaaacgacactggtctgatgaaggccttcgtaaaagttttgaatgaagcgcaaacatcggaagccgtcggagaaggttttttcaacgaattacgcgaaggaaagaaagcagagtttgtgttgctcgttttgggcgacaaaaacttccccaaccttgaaatccctgaatacatcagtgaaggcctcaactggcttgagtcgaaattgcgaagcaagcaaaaagagctgctggtaattccacccgagggcatggaggtgacgccatga

SEQ ID NO: 78175 - DNA, 1848 bp, Xanthomonas campestris
atgagcgaggcagctatcgcagatgccgacaccattatgcaggcttgcctgaatctggcagacccgaagagtttttttctttacgcaggtgctggctcaggaaaaacccactcactcgtcgaagctatccgcgaactcaaaagtcgcgagcgagaacgcctgacattcgagggcaggcgcattgcggtgatcacctatacaaacgcagcctgcgatgagattcttcggaggctcgagtttgatccactcgtggaagtctcgaccattcacgcgttcgcctggcgcctaatccaaggattcgacaacgagatcagagagtggctaaggatcaaacttgcccaggacattaataagatcgagggcgagctagcacgctcgagaggcgacaataaaacatctcgagcaaacagacggaagctacaaagcaaaatacgcagacttgagactctcgacgggattacgaagttcatctacagccccgctggcgacaacagagagcggcaagcactcaatcacgatgaggtcatcaagttaagtgctgcattcgttcctgaacgccctttgctggatgttttagtagaccgctacccagttgtattgatcgacgaaagtcaggacacccacgctccagttatggaggcttttctgaaagtccagcaattggcgcagacacgcttctgcttggggctactgggcgacaccatgcaacagatttacggccatggagtaacgcgccttgataaagcgataccgggtgactggctgaaacctgaaaaggttgttaatcgccgctgccctcgtagggtggtagaccttatcaacgtgattcgaagcactgcagacactcatcagcagaccccaaaacctgatgccattgaaggtgtagtgcgcatgtactgcattagtcaaagccaagaaaaggcaccgaatcttgaggaaggaatcgctcattcgatggctgcaatcaccgacgacggagaatgggctaccggccctgaaggccgaaagaccttgatcctcgaacataagatggctggacggcgaatggggttcgagaagctgttcacgcccctacacgcggttgagcaccttcaaacaggcttgctggatggaaccctgcccgcacttcgcgttttcagcgaaggcgttcttcccatccttaccgcaaaggacgatcactttcttctgcttgaagcagtacgctctcgctctcccttgctcagtaaggacgctatgcaatcaacaggggatcaatcggcccacatgcaacgtgtagaggacgcgacgcacgccctgctctctcttttcgaaagaaacgatccaacactgagcgaggtcgcaacgcttctgttgcaaacccaactacttgatgtccctgaaaatctggttggggcaatggtgttgggagctcctggtgaggctccagatcctgaagatacgaacgcgatgaccaactacgcctatcagctattccttgagcgtccattttcggagctggcagcctttgcgagttatgcggatggcctttccccctacggtacacatcaaggggtaaaggggctggagtttccacgagttatggtcgtcatcaacgatgaggaggcaggcggcttcttattcagctacgacaaattgctgggtgtaaaagaaccaacaaagactgaccgggacaacgagcgtgatggcaaggacaacgcactagcacgtactcgtaggctgctttacgtgacatgtagtcgggctgaaaagagcctggcgattgtcgtatacacaccccatcctgcactcgccaagcaaaacgttgttactgctggctggcttcaggagagcgaggtcgaaatcctttga

SEQ ID NO: 78176 - DNA, 2268 bp, Xanthomonas campestris; identical to SEQ ID NO: 78104

SEQ ID NO: 78177 - DNA, 1848 bp, Xanthomonas campestris; identical to SEQ ID NO: 78105

SEQ ID NO: 78178 - DNA, 2268 bp, Xanthomonas campestris; identical to SEQ ID NO: 78104

SEQ ID NO: 78179 - DNA, 1848 bp, Xanthomonas campestris; identical to SEQ ID NO: 78105

SEQ ID NO: 78180 - DNA, 1736 bp, Xanthomonas campestris
ggaaaccctgggcgtatcatccgcaacaacttaagaagcctcacaagtcgactcgaatggctcaaatgcagcaattgagtcctacctccctgcctctggaaagcaatcccctcagtggattaattcgagtacacgagatcaatgcacagcggggattcggcgaccattcggacgacaatcaaggcgataacactagacccagcggtgcccgaaaactctcggaacaactcagatcctattactccagacacctagatccaggtgacagcccagatatctcagatctcgaagcgttgcgggcgatagaagcagcccagtcggcattcgataccaggctaagtagcagcttcgaatctgctattaaagaggtcgagggattgggctaccctggccgcaatgacccacgcatcaaagtcgcaagtcgcctagcagcaaccgacggcatgaaccatgaagctgccgtcctttttgagttggattcaattcagggcgccccaggagcccctcctcttcatttacctgagaccgctaacgggttgggatatcaaaacctgatatccatgattttccggctgatgggttttagggatgagtggctaagaaaaaccagggccgccagcgcgggggtaatagaccgcgtcgagcccatccacctcgtgctcattgaagagcctgaagcccaccttcatgttcaagtgcagcaagtgttcgtgcggcacgcctaccaagttctatgccgagacgcgttgcttgaacgctacccaaatctgaagactcagcttttggtgagtacgcactccagccatgtaactcatgaagtggagtaccagaatcttaggtatttcaggcgactcccagcagggatgtatggcataggtgtaccggtgtcgacggtctctaacctctctaacgtgttcggcgatggaacaaagacgaagaagttcgtaaccaggtacctacgggcacagcacgcggacatattcttcgccgacgccgtcatcttggtagagggctcagcagagcgaatgatgctgccgcattttttgcggaataagtttacattccttgaccgctgctacatcactacccttgatatcggtggcagtcacgcacaccgactaaggcctttaattgacgcgcttggcatcctcactctggttattacagacctcgatgcagggttgaataaagcggcaaaaccggtgcaaagaaacgcagatcagattacgaacaatccgacattgcggagctggatgaaactgatgcatctgggcagtacagtagatgagctgcttgagctgccagcgaatcaaaaagagcaccagatcgacgacctgtactcggtgcgcatcgcctatcaaactcctatttccacccacctgcccgctactggtaaagcaatacaagctctaccaaatacctttgaagacagttttgtgcttagcaacgccggtcactttgcggaaaaaacaaacggcactggtctgatgaaggccttcgtaaaagttttgaatgaagcgcaaacatcggaagccgtcggagaaggttttttcaacgaattacgcgaaggaaagaaagcagagtttgtgttgctcgttttgggcgacaaaaacttccccaaccttgaaatccctgaatacatcagtgaaggcctcaactggcttgagtcgaaattgcgaagcaagcaaaaagagctgctggtaattccacccgagggcatggaggtgacgccatga

SEQ ID NO: 78181 - DNA, 1848 bp, Xanthomonas campestris; identical to SEQ ID NO: 78169

SEQ ID NO: 78182 - DNA, 2295 bp, Xanthomonas campestris; identical to SEQ ID NO: 78174

SEQ ID NO: 78183 - DNA, 1848 bp, Xanthomonas campestris; identical to SEQ ID NO: 78175

SEQ ID NO: 78184 - DNA, 2268 bp, Xanthomonas campestris; identical to SEQ ID NO: 78104

SEQ ID NO: 78185 - DNA, 1848 bp, Xanthomonas campestris; identical to SEQ ID NO: 78105

SEQ ID NO: 78186 - DNA, 2268 bp, Xanthomonas campestris; identical to SEQ ID NO: 78104

SEQ ID NO: 78187 - DNA, 1848 bp, Xanthomonas campestris; identical to SEQ ID NO: 78105

SEQ ID NO: 78188 - DNA, 2295 bp, Xanthomonas campestris; identical to SEQ ID NO: 78168

SEQ ID NO: 78189 - DNA, 1848 bp, Xanthomonas campestris; identical to SEQ ID NO: 78169

SEQ ID NO: 78190 - DNA, 2268 bp, Xanthomonas campestris; identical to SEQ ID NO: 78104

SEQ ID NO: 78191 - DNA, 1848 bp, Xanthomonas campestris; identical to SEQ ID NO: 78105

SEQ ID NO: 78192 - DNA, 1733 bp, Xanthomonas campestris
aaccctgggcgtatcatccgcaacaacttaagaagcctcacaagtcgactcgaatggctcaaatgcagcaattgagtcctacctccctgcctctggaaagcaatcccctcagtggattaattcgagtacacgagatcaatgcacagcggggattcggcgaccattcggacgacaatcaaggcgataacactagacccagcggtgcccgaaaactctcggaacaactcagatcctattactccagacacctagatccaggtgacagcccagatatctcagatctcgaagcgttgcgggcgatagaagcagcccagtcggcattcgataccaggctaagtagcagcttcgaatctgctattaaagaggtcgagggattgggctaccctggccgcaatgacccacgcatcaaagtcgcaagtcgcctagcagcaaccgacggcatgaaccatgaagctgccgtcctttttgagttggattcaattcagggcgccccaggagcccctcctcttcatttacctgagaccgctaacgggttgggatatcaaaacctgatatccatgattttccggctgatgggttttagggatgagtggctaagaaaaaccagggccgccagcgcgggggtaatagaccgcgtcgagcccatccacctcgtgctcattgaagagcctgaagcccaccttcatgttcaagtgcagcaagtgttcgtgcggcacgcctaccaagttctatgccgagacgcgttgcttgaacgctacccaaatctgaagactcagcttttggtgagtacgcactccagccatgtaactcatgaagtggagtaccagaatcttaggtatttcaggcgactcccagcagggatgtatggcataggtgtaccggtgtcgacggtctctaacctctctaacgtgttcggcgatggaacaaagacgaagaagttcgtaaccaggtacctacgggcacagcacgcggacatattcttcgccgacgccgtcatcttggtagagggctcagcagagcgaatgatgctgccgcattttttgcggaataagtttacattccttgaccgctgctacatcactacccttgatatcggtggcagtcacgcacaccgactaaggcctttaattgacgcgcttggcatcctcactctggttattacagacctcgatgcagggttgaataaagcggcaaaaccggtgcaaagaaacgcagatcagattacgaacaatccgacattgcggagctggatgaaactgatgcatctgggcagtacagtagatgagctgcttgagctgccagcgaatcaaaaagagcaccagatcgacgacctgtactcggtgcgcatcgcctatcaaactcctatttccacccacctgcccgctactggtaaagcaatacaagctctaccaaatacctttgaagacagttttgtgcttagcaacgccggtcactttgcggaaaaaacaaacggcactggtctgatgaaggccttcgtaaaagttttgaatgaagcgcaaacatcggaagccgtcggagaaggttttttcaacgaattacgcgaaggaaagaaagcagagtttgtgttgctcgttttgggcgacaaaaacttccccaaccttgaaatccctgaatacatcagtgaaggcctcaactggcttgagtcgaaattgcgaagcaagcaaaaagagctgctggtaattccacccgagggcatggaggtgacgccatga

SEQ ID NO: 78193 - DNA, 1848 bp, Xanthomonas campestris; identical to SEQ ID NO: 78169

SEQ ID NO: 78194 - DNA, 1701 bp, Pantoea sp. CFSAN033090
atgttgattgaaacgctctatatttccggattcagaaattatcatgaagctgaaattaacttcagagagtcaacgctgattattggtgcaaacgatatcgggaaaacaaacctcctttttgcactgagacttttactggacaaaagcctgtctgagttagatctggaacctaggattaatgatttccacatagaccaggatggcgtacagtcaaaggaaattgaaatagtcgtccgatttggtgaagtcagggaagatgctgtcatctcaaaactgagtggatatgttagtgaggatgatgagctttatattaaatatcatgcttgtcagtccacaatggatttcacaatcagcctaagccacgacggtttaagttacgatgaggtgccaaaccgtttttatctgaaataccttagcctgaagtatatcaattcccagcgagaccttgagaaatacatccgtctggaaaaaaagcacctgttgaggctggcacaggatgttcgcagtgaagagcagagccaaagcgacggcgaggtattcaccgtcctgaaccatttgctggccgaggtaaatgaaaaggttcgtgagatcagttatgtggcttcggcgacttcagagcttaataccgaacttcgtaagttatcttacaaccatgagcggctaacagtacaactggatacgggcgcgataggcgtggaccagttcattgagaaacttgaactcagtgccagcactaacggtaaaaagctcatgctgggtggagacgggtttaataatcagatacttctcgcactatggaaagccaaaagccttcgagaacatgatgtcaccagtgaagttgtcatttactgcattgaggaaccggaagcccacttgtttccacatcagcaaagaaagcttgcttcttaccttatcgaaaacctgccaggtcagtctattgtcacctcccactctccccagattgccgttaacttccggcctgacagtgttatcaggttatgtgcaagcaaaggttccacaaaggcggcaagcaacggatgctctgcctgcatcagtacagcttgggacgaaatgggatatcggatgagtatcattccggcagaagctttttttgccagtgcggtactcttggttgaggggccttctgaagtcatcttttatactgagcttgccaaggcactaggtctcgatctcgatctccttaacatcagcattctgtccgtcgatggcgtgcagtttgaagtttacaaaaaaatactgcaggccctgcacattggctgggtggcacgtacggataatgatgtggcgaaggtaccgcacaggcaggagtggagttataccggcgcaaaccgtgcgctgacgctatgcgggctgtcaaaaggcggacatgtttcccacgaaatcacgtcacgggaacggcataatgaatggggaagggttactcccctcattaacgcaaatggggtatttctttcaattactgatcttgaaggcgacctctcttatgattttactgctcacctcctggatttctcaggagcagcagatgctgatgctgcggctgatttccttcgggacaagaaggcgataaaaatgcgggcattactgaagcacaaacggcaatttttagctgagctggctgataaagatattgcccgtccacttttagcagtgcaaaaactagtgcggggtgagaaatga

SEQ ID NO: 78195 - DNA, 1620 bp, Pantoea sp. CFSAN033090
atgaggctgactgctgaacaacaggatgctgtggaatttacggaaaacctcgtcatcacagcctgcccgggaagtggtaaaacaacaattcttacccataaaatttcccaggtgctgacagattgcagagcgcatcagggcgtggtctctttatcttacacaaataaatccagcgatgaactcaaggcgcggtgtataaatttaagcaaagacataaaggctagctttttcgggacaacagataagtttttactgagcgaaatagtgatacctttcataaagcatatatggagctgttcgtcaacggggccggaagtaattaaagccagcaacttggatgcggaggatagggaaatacttaccccgtattacatgcccgataatttgccagaaaataacacagagcatggtatggccgctctggaaagactgtatgaacggggcgtaattatacttgaaatggttcctctcatggctttatacatcatgagtgaatctctcgcgtgtcagcgatatttaaaagtcagatataaaggggtatttgttgatgaatatcaggatacaggcttctttgctcaccaggtattcaggctactcgcgggattgaacattaaacttactgtagtcggggatgttgaccagtccatttatctctatgcgcatcgcagcgcagactctctcaaagattttatccgccaccctgatttcactcataaacagatcactttgaatcatcgatgccatccttcaattattaactatgcaaaccggttgaaagatcctgagtgcatgctgcttgatagcgacagtcttgtggtttatcacaaaagtgtgacaggagatcaggccaatatcgctgcctggattgacgcccaagtggcaggattaaaaaagcatttttccatcgaaaataataaagatattgccatactagtccggagcaacctgtgtgctgagatgattgccgacaatctgagaacggcctcaagaacatacctggacgataacttaagtaaggccggagataaggtatcaggactggttaaagcattgctgcattacagatacgataaaaaaacaacggctcagcttgtccttgatgattacctcagcgctgttgccaaacggagcgacgtagttctggcccgcaaactcatccggcaggtacgtgtcacttctgatgccaacctgccagaagctatcagactggctgttttttcatgtaccggttgtgaactcagtgagactcacattaccggaataaacgatgcgcttacggtaccccgcattaaaaacaactatttgcatgtccgggacgatgaggtccaaatcatgacgttgcacaaatcaaaggggctggaatttgacgttgtaatgcatctggatctgtatgactgggtgttacccgcaagggagtatgtcaaaggcagctacgatgttgtttttcagaatgaacagcagtgtctcaacctccactatgttggcgttacacgcgccagaaagggagtgattctgatgcattcgaccaagcgatacaatgctaaacgagagttaaaaacgggaaacccctctcagttccttactaggccgggactgaaaggtttatttaaagaattataa

SEQ ID NO: 78196 - DNA, 2268 bp, Xanthomonas campestris; identical to SEQ ID NO: 78104

SEQ ID NO: 78197 - DNA, 1848 bp, Xanthomonas campestris; identical to SEQ ID NO: 78105

SEQ ID NO: 78198 - DNA, 1788 bp, Xanthomonas campestris
atgagaatttctaggatcaggttgatcaatttcgccaatttctcggatattgatatcgagacaggtgagagcattgtcatcgttggcgaaaacaaggtcggcaagagcaatttcattcgcggcctgcagttgatccttgatcctggtttgtccgaacgcgacagacagttgggacttgagcacttctgggatgggttgggtgaagacaaggttggcgagactgtggaagtgtcagttgatctaacggactttacggacgatccgcggttgatggcccacctcaacgattgcgtgattgatcctggcccacccatggtggcccgactcacctaccgcttccagcctaagactggcctggggcatgccccggaatcgttgaaggactatgagtatgtgatcttctgtggcgacgatcccgatatgcgtattggcggcgcacttcgccggatgttgccaatagatgttcaagtagcactgcgtgacgctgaaaaggaccttgcgagttggcgcaattcgccattgagaccgctcattgaggatcttgccgcgtcgttgaatgatgacacccgtgaggagattcagaatcaggtcgacaaagcacagcgagagctggctggtcacgaggaagtggtagcgacagcagaacggattagcgaacggctaatcgccatcgctggggagcaacatgccgttccgatgtcgctcggacttgcgccaactcgagtcgacgcattgctgcgcagcctgcggctgctgatcgacaacggcgtacgcggagtcggcgatgcgagcttgggaaccgcgaacctgatcttcctggcgctgaagagtctcgaactcgaccgcctcgtttccgatggagagcgcgaccacaccttcttcgtagtcgaggagcccgaagcgcacctgcacccgcacgtgcagcgtctaatctatcgttacttccttggcacgggggcggaagatggtgatgaacagccaccgctaacgacaatcctcactacccattcgccacatatcgcaagcgttgcgccgatcagatctattgtcctgctacgccatgacgcagcggaaggcaagactgtcgcggtatcgacagcaaacgcacctttcacgcagagggatgaagaggatctccaacgttacattgacgtcactcgcggcgagattttcttttctcggggggtgattctggtcgaaggcgacgccgagcgcttcatcgttcccgcgtttgccgaggtactcaatattcccctcgatatgcttggaatcactgtgtgctcggtgggggggaccaacttcaccccgtatgtgaagttactgggccccgaaggactcaacatcccccatgtgatcctgacagaccgtgatccgaccaacggtaatcatccattggtccgcaggcggcttatcaatgtccttgacgtgattgagggcggtgtcgatcacgaggaattggatgcggacgaagtgatcgagcttgccgagcagtacggatacttcgtcaacgagaacacgttagagcccgaactatttgcaggtggactggcggaggacatgcaggaggtaatccgggaggagcttcctcgattgaggagagaaactctgaatgcgttgcagcaatgggtggacgatcctgctcaaattgatgaagacttgctgctcagattaatcgagaggatcggaaaggggaggtttgcgcaggcacttgcgccgtcggtgtcagaggacgtctgtccggcttacattcgttccgctctggagcatatccgtgatgccatcgcgtag

SEQ ID NO: 78199 - DNA, 645 bp, Xanthomonas campestris
gtgctcaatcgaaatagcgtcgcgtggcgtagcgaggaggaactcgctgcttgggccgaggcttacgaggccggtcttcgcgacgagggcctaattgactacgatgacatggtggtcttcggtcagcgcttgatcgccgataacaactgggtactacctctggtccaggcaaaatttcccgtgctcgtggtggatgagtatcaggatctaggcgtggcgcttcatcgcatcgtcaaacgccttgccttcgacggtggggtccggcttttcgcggtcggtgatgcggatcagtcgatatatggatttacgggggctgatggcgcgttgctcatagaattggcggctcgcagcgacattgagcccgtccagcttcaattgaattaccgttctggcgcagggatagtaactgcgtcagagatggcgcttggagaagcccgaggctatcaagcgagcgatcctgcgcgacaaacgaccatcgaattcttactgcgcccgggtggtatggcagatcaggctgcgcacgccgtcgcgcagatcattccggcggccttagcctccaagccgggacgaacgttgggcgatatcgcgatcctatacaaagattatcgcgcaggcgatatcgtggctgaagggcacctcgaacaa

SEQ ID NO: 78200 - DNA, 2268 bp, Xanthomonas campestris; identical to SEQ ID NO: 78104

SEQ ID NO: 78201 - DNA, 1848 bp, Xanthomonas campestris; identical to SEQ ID NO: 78105

SEQ ID NO: 78202 - DNA, 2268 bp, Xanthomonas campestris; identical to SEQ ID NO: 78104

SEQ ID NO: 78203 - DNA, 1848 bp, Xanthomonas campestris; identical to SEQ ID NO: 78105

SEQ ID NO: 78204 - DNA, 2295 bp, Xanthomonas campestris; identical to SEQ ID NO: 78174

SEQ ID NO: 78205 - DNA, 1848 bp, Xanthomonas campestris; identical to SEQ ID NO: 78175

SEQ ID NO: 78206 - DNA, 2295 bp, Xanthomonas campestris; identical to SEQ ID NO: 78168

SEQ ID NO: 78207 - DNA, 1848 bp, Xanthomonas campestris; identical to SEQ ID NO: 78169

SEQ ID NO: 78208 - DNA, 2268 bp, Xanthomonas campestris; identical to SEQ ID NO: 78104

SEQ ID NO: 78209 - DNA, 1848 bp, Xanthomonas campestris; identical to SEQ ID NO: 78105

SEQ ID NO: 78210 - DNA, 2268 bp, Xanthomonas campestris; identical to SEQ ID NO: 78104

SEQ ID NO: 78211 - DNA, 1848 bp, Xanthomonas campestris; identical to SEQ ID NO: 78105

SEQ ID NO: 78212 - DNA, 2295 bp, Xanthomonas campestris; identical to SEQ ID NO: 78168

SEQ ID NO: 78213 - DNA, 1848 bp, Xanthomonas campestris; identical to SEQ ID NO: 78169

SEQ ID NO: 78214 - DNA, 2268 bp, Xanthomonas campestris; identical to SEQ ID NO: 78104

SEQ ID NO: 78215 - DNA, 1848 bp, Xanthomonas campestris; identical to SEQ ID NO: 78105

SEQ ID NO: 78216 - DNA, 2226 bp, Vibrio alginolyticus
atgaaaattagctttgtagacattcaaaacttccgaaagttgaagcgctgtcgcgtggagtttgcgaaggagcagacacttttagttggggcgaataatagcggaaagacatcagcaacagatgcgttgatttgttttctcgataagggcaaaaaaataacatcaaccgattttacattatgtaactgggttgcattgaatgagtttgctgaatcatggatgaaacagggagcaactttagcagaactgcctgaatggcaaccttattgtccttcgttagatgtttggatagacgcagatgttaaagaagttcaaagagtttctcatcttatccctactttaaagtgggatggagaacctttaggtgtccgattgatatatcagccccaagatctagataggctgcgagaaaactatgtacgtgaaagagatgctgtagttaaggtaaacaaagataaacagctatcactttggccaagagactttaaagactaccttaaagaaaagttacatgttgaatttgaaatcaaagcgtacttacttgatccctccaagaaagatgagacccaaacgctatcaaatgactctatatgttttgagtctgatccatttcagggtatttttcgagtcgatacaattgaagcacaaagaggtttttctgaccctcactcagatttaggaaagtcaactagcagcttatcttcacaactaaacgagtactacaagcgccatttgaatccatctgatatgcctgaggccgaagatttagatgcgttagaggcagttgaaaaggctcaaatcgagtttgattctcgattggataaagcctttgaaaaaactcttggcgaaataaaggagcttggatatccagggtttaccgatcccgatattaagctatcgagcaggttgaacccgatcgatactttagagcatgatgccgccgtaatctttgatgttagaaaacagaattttggtgacaatacattttctcttcctgagcaatacaatggattgggttacaaaaacttgatccacataatttttcagttgattactttccgagatcgttggttgaaggtcggaaaaataggcaaaaagcgctcggaagaagacgcggcgattgaacctatccatttagttttggttgaagaaccagaagctcacctccacgctcaagtacaacaggtttttgttcgtaaagcctataaggtacttagagagtatggaaccgttgacgctaacttaactacccaaatggttattagtacccactctagctacgttgcttatgaagcaggttttgaatcccttcgttatttcaaaagaaaacctgcttctaaaggacaacctactcctcaggcagaagttgtgaaccttgcgacagttttcccctccgagaagaaaaatgaaactgatgtatcgtccacgaacaaatttgtttcaaggtatctaaagacaactcattgtgacttgttctttgctaatggggtaattctggtagagggagctgcggaacggatgcttctaccacatttcatctccaatcatcatcaggatttgagacgaagctatatttcaatattggaaattggtggtgctcatgcgcaaaggttacgtcctcttattgagctactaggtttaccaacattagtcattaccgatactgatgcgtgtgactcgctagggaaaaaagctcgcccgaaaagaggagcttctttagagtttggcagtgaaacactaaaaagttggtttgaatttggtaatttgactttggacgacctgcttgacctaccacctgagcaaaaagttcaaagtaacgttcgcgtatctttccaatatggcattcagacaaaatttacgccgaaagcgagaacgacgaaagaagtcattccttatacgttcgaagatgcagtagctctgacgaacttggagttatttaggaagctaactaagtcaactggaatggtaaagaaaatgcatttggctacgaaaatgacaacactaaatgcttgttgcaatgccatgtataaagctctcgatggagagaaagctaaaatggctttagatctactatatgacgttgaaccaaacgagctgcttgttcctgaatacataagcgaggggctggattggctagagggtgagctagagacgatgagtttagaatacacatgggcaccagaagatcaagcctctgaaatcatggaggaaatgattggtgaataa

SEQ ID NO: 78217 - DNA, 1863 bp, Vibrio alginolyticus
ttggtgaataagcctaacagcctaatcggggtcgatcatgaaatctacggatacctaaaccttgataaccccaagagctttctattatttgctggtgctggttcaggtaagactaggtctctagtaaatgtattacaagaaatacgagagaagaacttaggtcggcttatccaaaatggtcaacgggtcggggtcataacatataccaatgcggcgtgtaacgagattcaacggcgcttgtcttatgatccattgttccatgtatccacaatccatagctttgtttgggagatgattaagccgtttactgaagatattaaagggtggcttaggacaaaacttagtgccgatatcgaggagcttgatttaaaaatctcgaacgctagagacatcaacggtaagacagctcagcaaaatattagaaagagagaggctaaagctacgagattggacgatttacgattagtcagaaaattttcgtactcgcctacaagtaataggatcgaaagaggcacggtttctcatgaagaagttatacagatcactgcaactctattgaatgagagcccgttacttcaaaatatacttacaaataggtatcccatacttttaatcgatgaaagccaggataccagaaaagagctcatggaggctttcattcaaactcaaagtttgaatcgttcgaagttttctcttgggttatttggagatctcatgcaaaggatctacggaggagggaaacatgatttagagtcctccttgcctgacgattggaagaccccttcgaaaacgattaattaccgctgcccgcagcgagtagtagagttaattaacagtattcgtgaagaggatgataagaaaaagcaggagccaaaagctggtgcgccgcttggagtcgttaggttgtttattgttgattctgatacagcaactaagcgagatgtagaagtttcaattagagctaagatgtcagctatttcagaggattctttgtggcttgagccaaatcagataaaagctcttactctggaacatgcaatggcagctatcaggggtaactttgataagttttatttgccacttgcaacagttgatggtctcagagattcgttacttaacggaacaaatgcttctttaaggtttttgtgtagtagcttgttacctcttattgaagcgatcagagttcgagatgagtttgccatcgcaaacattatcaaaaagtattctggtgttattagctcgactaacgcggatttttgtttagatcctatatcgactcttaaaaatactgatcagtcggttgaagaaattagggccatagtctgggagctagatcctcctttagcgcaggtattgcttttgataaaagcttacaagctactttatattcctgatgaactaaatgctcttcttgtagaatcatccagcctgaaaaatgatgatgaggaggagaacttgagccaacggtcaattgcatggaatcaggctcttttagctcctatcagccatttggcaaattacgcgctttatattaatgaagagttagggtatggaacacatcaaggagttaaagggttagagtttgatcgtgttatggccattatggacgataacagtgcaaatggattcctgttccgctatgaaaaactatttggtgcacaagagttatcccagacggatatacgaaatcaatcagaaggcaaagactctgttctatcaagaactagaaggttgttttatgtgatatgtagtagggcagaaaagagtttagctgtcgttgcatataccaaagatcccaaagctgtaaagaggaagagtttagagtctggctggtttactcaagatgaaattgaaatgatgtag

SEQ ID NO: 78218 - DNA, 1872 bp, Burkholderia multivorans R-20526
atgccaaattatgcgccagaaagcggcgttgccatcacagacgtccgtgtcagcaactttcgctcgttggccaatattgaggtcgaactcaacgacttgaccgtgctcattggagcaaacaatgctggaaaaacgagcttccttgacgcgatgttcgcggctatcggctccgggcgcaagctgttggggcaagacgacattcggctgatgcacggcgaggcgatgccgccaaaagaccggcgggttgtggtcgacattcggattcgccctgtcgacgaaaacggaaaggtcgtcgacaagttcccggagggcagcttctggacggctttgtggggggccggcatcgtgctggacgatcacgattttgatgagttcatggcctttcgcacggtgctggcttggcgtgtcgaaaaagcagactacgtcgtcgaaaggctctttctcaaagaatggaaaccgtttgaggagtggattgacacgccgacgcaagacaagccaatcacggcggcccaactcgaacccgtcgccttgcattatatcgacgccaagcgcgacctggaggacgacatgcgccgccaaggctcgttctggcgacggatgaccgaggatcttgggttgtctggcgacgaggtggccgaattggaggctgcactaacggggatcaaccagcagatcgtagacaaaagctcgatgctccaacgcctgaagacgaacttgtcggacttgcaggcagtggtttccgccgacagcgctggcatcgacatcgctccggtcgcgcgaaagctgcgagacctatcgaaaggcgtcgacgtgtcgttctcgacggcgggagcccagtcgttcccgctcgcacgccacgggatgggaacgcggagcttggcctctctgctcgttttcagggcgtttaccgcttggcgcggggacgtggcggcgaagaacaacgacaaattgcattctgttctggccttggaagagccagagtcgcaccttcatccgcaggcgcaacggtcgctgttcgcacatatcaagaaaatcaaggggcagcgcgttgtcagcacccactcaccgtatttcgccggccaagctcaattagaggatcttcggcttttcatcaagaagggcggagatactggagcgcgtaagcttgatttgtcgaagctcgagaaggccgacgatatccgcaagttgcaggagacggtcatcgaatcgcggggggacatcctctttgcaagggccgtggttttgttcgaagggcagacggaagagcaggcgctgccgatttgggcggaagcgtattggggagcgtcgattcacgaattgggcttcagcttcgtgcgggcgaacgggacagactacttcccgttcatctggcttgcgaagagccttgaaatcccgtggtatgtcatgggggacggagagcagaagccggtcagcgacctggaggcggccttgaaaaaagcggggcagccgaacatcgcttcgtctcctaacgtggtcgtcgtgtcctctggtaagaacttcgagacacagttgttggaggatggctatcttgccgaaatcgaaaccgctttgaatgaagcgcacggtcgagagtcgtttttggacgaattcatcgacaagcatcatgggctggaattggcgaaggggaagggcgtcagggactacaaaagcgatggaggtagaattcgcgccgcagctgatgccatgaaagcgtccaaaacacgtctcgccaagccgttagcccgaacgatctccggcttgacggacccggagagacgttttccgaaacacgtcgagaggctatttgcggtcatcggagagaatcacggaattcacaagctggcagtagaggcggaggttgaggaacaatga

SEQ ID NO: 78219 - DNA, 1836 bp, Burkholderia multivorans R-20526
ttgcgcctgtcgacgctgcaagcccaggtcgtcgaacatgtcgacggcgcgttgctcgtggtagccggcccgggttccggaaaaactcgcgtgttgacggaacgagtccgctcacttctcacgagtgttcctggccactttcgtgtgctggcgctgacgtttaccaacaaggccgcggacgagatgcgtgatcgcctctccgacttgggtgaaaatcggcagcgcgcattcattggcaccctccacagcttctgcttggaaatgctggtggagcgagggaagcttgtgggcgtggaaggcgagccgcacatctttgaacagcataaggaccggaaggaaattttgttggaggcgattcggcaggaccctgttcttgacgaggaggtcaatcagatcgtcgatcgcaaagagcgcaatcggcgagtcgacaactggcttcaaatgatctcgcgcgtcaaggcgcaccccatcacttgcgccgtgctcagtgatgagcttgacaagcgggtcctggatgcctatgacgccgggttgcgtgcttgtggtgcttacgacttcgacgatcttttgctgcttggttaccggctgctgacgaacaatcccaagctggcggatttttatcggaggctttacaggttcgtgtgcgttgacgaagcgcaggatcttaacgaagcgcaatacgctctgctttgtgcgctctgcggagattcgtataaaaacgtcatgatggtgggggatccaaaacagtcgatatatggattcaacacctcgagcccggaatacatggagaagttccggttcgagttcgcagcgaaactgatcgagctgaccgagaactttcgatcttcgcaggcagtggtgaacgttgctcggtccatcgatccgaattacttggttgacgcccagcttccgatcaagggcgacgctcgcgtgttcgttggagacgacgaagagcacgaggcgcggttgatagttgacgagcttgaactgctgtttgcccaaggacaccccgatgttgagggcggtgttgagccgtcgaaatgtgcgattctggggcggacccgtttcgctttgctcgcaatagagaacgaactgcgccggcgcaacgttcccttctacaagcgattgaccgctaatcatgaaaacgagtccgacctcgtcgacgagttccacttgtcgttgcgcatcttggcgaacccgagggaccggctccatttggcggcgttggcaacgaagtgggtgacgcagccgcctgaaacggcaacggacgccatggttgcgctgtcgcagatggcgcggagtgcggccgagcagcgagccaaggccgtggcggaagcggtcgcttcgattgttcagaacacggcacgcctagaccttatgccggcgttcaagctattgaggggttatgccgactccctggacgagaattctaggcgcgcgatctatgaggacgtagccgtctttcagcaagaatgggaccaataccttcgctccgacggcacgtcgcgcaccttgtccggttttatgagcagcaaggcgttgggggccacccaaaaggcccatcgcgacggcgttgccctgctgaccgttcactcgtccaaagggctggaatttgacgccgtgtttattgcagggatggcggaaggaacgttccccgactatcgggccgttggcaaagtgcgcgagatggctgaggaaagtcgcaacgcgtttgtcgcggtcacgcgatcaaagcgcttactttacctcacctatccccgggtcaaactcatgccgtggggcgattataaggctcagcaggcttctcgattcgtatccatgtctgggattagttaa

SEQ ID NO: 78220 - DNA, 1776 bp, Providencia stuartii; identical to SEQ ID NO: 72896

SEQ ID NO: 78221 - DNA, 1899 bp, Providencia stuartii; identical to SEQ ID NO: 72897

SEQ ID NO: 78222 - DNA, 2259 bp, Vibrio parahaemolyticus
atattacagggagacaccgtgtacttagaaagcctgtctattgaaaactatagaaagttccgaaacaaaaacaatgtaattaactttgtagagccaagtaacatagagtcaatggaagctagtgaagaggatagcaagtctgttatagggccttctactacgctaatcatagggaagaacaatgcgggaaagaccacgatagccaatgctttaaggcttttatgtgagaatagtcagcccaagtcaacagactttaatgtagattacatatcagaattacatgataaatacctctctgagagtgtcgaacctattcccctaccggaattaaaatttcaacttgtagctaaagttgatatgaataaaagtgatctaatgacaaacttactagagtttgcaagtgtcaaagggtctggattaagtagtgtaaaaataactattaaagtagaagtttcggaagcaacggcatttgaggaagctataggtaaattcgttaaacatgtgaaagatggcaatttaccacgaaatgaaagcattaatttgttatatgatttgttagagcaatcttcagactttcttgagctaaatgaagagagtaagttatttaaaatcaagtactatgacagtcgcggattcgaagcgaagagattttctcttaaagagttgataaaccttcgagaaattaaagccaatagacacttgaaagatgggattcttacagatgtatttaataaaatagttgggtttcaatttgagagtgacgaagttggaaagaacaacctagaaaaagaaataaagagcattaatgaaacattaacaacatcaatagaaagcaaaagcaataatgtatcatctgtgctaagaaagattgaagacaaaagtcatgttgacttagacctgaaaggtaatgttacttatgatagcttagtgagaaatctcattaagtataatttttctgataatggtgattatattcctgaaagtcaatttggtttaggttatatcaacctcctaaacattattggtgaaataatccattacgtagatagctataagaaagacagttacaatagtacaattaacctcctgtttattgaagaacctgaagcttttatgcaccctcaaatgcaggagttttttatcaatcgaatagataatgcagttcaacatgcactagatatcgcgaataaaaactcagatgacaagaaggtgctaaactgtcaaattgccataacaacacactcatcacacatagttaatagcaagattcatagtagtaattcttttgacaacattaactatttgactgtgttggataaagcggcaaatgttatcaacctgaatgactctgttgtttctggtcatcatggtaaagaaagtgacgaattaaagttcataaagaaacacataaaatataaagtttctgaactctttttctccgatgcgataatatttgttgaaggagctactgaagaagcattacttcaatactatatagataaagatgacgtgttgaagaactcttatgtatcaattttcaatataaatggagctcatggtaaagtttatttacctctagcaaaagcattaaaagttccttgtttgattattactgatcttgatataaaaaggaaagattgtcaaaagagcattaagcatagtaaagatgatgacaattgtgattactgtgggcacaaaaaaggtgaaagtgatactcagagtgtgaaagagtacactcaaatatcaagcttggataaactaataacaacaaatcccactataatttcattcaagaagttacaaaacgaagaagatttggaagatgaggaaacgactgagaatgaatcaagtgattcattagaagatcttatctactatacagatgaaaatcttcatgtggttttccaaaaagataagattaataatttttatgccacaagtttggaagaggcatttatattaacaaattctaataacgaaattctaaacgaaactcttagaacttgtaaaccgacgatctatagaaaaattgtgggatcgcagggatctgaatctttaggcaatttaatatctaaatcttttgaaattcaaagaaagctctctaagagtaaaagcgacttttcaagtgagttattatacagatgtatcatttctgaagaaaagcctacaccagtattaccacagtacattcaagatggatttaattggatgaaggagacactcacctctagtacatcaatgaaaaatggagatgagtaa

SEQ ID NO: 78223 - DNA, 2130 bp, Vibrio parahaemolyticus
atgagtaatagaattgaggaagagaagcaactactacaatcaatatttgatgtagtagaaataggtaagagcttcaggtttagtgctggtgcaggctcaggtaagacgtacgcattggttgagtgtttaaagtacttattaaaaacacaagttgcaaagctgagtaaaaataaacaacagataatctgtattacatatacaaatgtagctgttaatgagatcaaagagcgacttggcaactccgaactagtaatcgtttcaacaatacatgaaatgctatgggatattatacagaggtatcagcctgagcttgtatctatacatttagataaattaaaaaatgaactagaaaaagttgaggatgaactagaaaatgaccctgataataagctgggtgtttttaacacattattaccagatgagaaatatagttatgttagtctagttaaagagagtaaaaatacgtattaccgaaatagaaattctagagctgcagaatttaaggccgcttatactgagtatcatgaagattatggtaaagctgctgttaacaagtggcaagcaaattacgggaagttcaaagaggtagcgaaaagagtttacaaaaaggatcgatatgaaactgccattgacaaaatagagagtcaagaaaaaggatatacacaagtatcatatgatagtatatttaatgccgatcgattggacaaaatgaaattcagtcacgacactttaattgagtattctgaaagaatggttagtgattatccaatattacgaaggataattattgataaatatccatacatttttgtcgatgaatatcaggatgcgcatcctttagtaataaatataatgaaaaatcttcatgattactctgaagaaaaaaatagaaaatggttagttgggtattttggagatactgctcagacaatctatgatgatggaattggttctgaaatagatacacttcaccctaaagtggaggttatttataaaaagtacaaccgacgttctcagaagcaaatcatagatgttgcaaacattattaggaatgatcaaatagaacaagaaccaatatttgatgataagttgaatggtgatgttcgttttcactatgtaaataacataaacgaagatacttgcaggatattgattgctgaaaactttgtaaatgagtttcaatcatcgttaggtaaagattctgaaattgattgtctagttttgacgaatagactgatggcagaaatgaatggttttggtgaggtctatgagtcatttcgagaagctgaaaatatatactttgatgatctaaatacaaaattactgtcacatgagttagaaaaattagagcctataataagggtaatctacaagttacttagttcttatttgtcaatagaagatagcagcaccactttctacgacctttttggtgaaaaggggcgttccattagtttttatgatgctcacagctttgtgaaaattcttaaagaaataaatccaacaagtcttagcgaacttttggctgcaatatcagattaccatttagcaaacccacattcgagttgcttagatatctttgtcagacgttttctaggggctaaacaagatgaaatttctgactatggaagcattgattcactagttagaggtggattgagagatttgatgattattagagatcatgatgacgatatcttgaatgatttacaaatagataaggtaaataaagtcctaaatatttcaatcgaagtttggtcaaaatgggtaaggtatattaaaaaagaacaatctggaaagattcgataccatacctatcacggaacaaagggtgaagagtatcaaaatgtagctataataatggagcatagttttggttctggaaatcatggtcgaaataaatttaaaaaattcttcgagtttagaggtagtgatgaaaaagctagaattgaagctctaaaagatgaagatgtaagagacaaaattattaatactcaaaatttggtctacgtagcatgctcaagggctgaaactaatctctggttgatatatttggatgatatatccgatataaagaatggaattgaatctattttcagtcaaattgagttgtgggataaagtcgattaa

SEQ ID NO: 78224 - DNA, 1731 bp, Pseudomonas syringae pv. actinidiae
atgcatttaacaagcttgagcattcgcaacttccgaaactttttgtcaatcaatatcccactcgtcggcaacatcgtgttgctgggcgaaaatcgtgtcggcaaaagcaacctgctgtttgccattcgattggtgcttgatcccactcttcctgactcgatgcggcagttgaagctgtcagatttctgggacggttgcgatctcacaacaaaccctcagattgaagtgcatctggatttcgcagacttcgacagcgacgacatgctggttgccctgttaactgacttccgtatagctgccaacccaacggtcgcgcggcttagctatgtctatcgcaagaggtctgatatctctggcgtcccacagtcgagcgaagattgtgagttcgtcgtctacggtggcggtgatgaatcccgcagcgtgcccaatcgtgtacgccgccgtatcgcgctagatatgcttgatgccttgcgtgacgcggaagggcagcttgcatcctggcgacactccccacttcgacctttgctggaggatgcatttgcttcagtcagtcgagccgatctggagggtgtcgccgctgatctagaggctgcgacggcgaaaatggagggtttcccatccgtcaaaacgcttgaggaatcgctacgcagtggcatccgcgatttagctggcagcgcgcatgatcttgacgcacggctgcgcttcgcaccgactgacccgcttcggcttgtccgttcgattgccatgttcatcgacaatggaaagcgtggcatcgctgaggcaagtctgggctccgcgaacgttgcccttatcgcacttaagttggccgagttcgcctggcgtcgtgaaaaaaacgagcgcaattattcgctactttgcattgaggaacctgaggcgcaccttcacccacagctacagagaggggtcttcgacaaactcttcaaaaaccctgacgcggcgcaagcactgatcgtgaccagccactcaccgactctggccgcaatcgcgccgttgcgctcaatcgtaatcctgcggcgaatgccagacggtttgtccaaggcttactctcttgcctcgctacccgtgacagctgaagagctcgacgatattgagcgctatctcacctctactcggtctgagttactcttctctagaggcgtgattttcgtcgagggtgacgcggaagaggcattgctccctagcttcgccgatgcactggggtacaacctcgatcaacttggcataaccgtttgcaacgtggcaggagtgaacttcaatccctatgtgaagctggctggtagcctcggcctgccttacgcagtcgtcaccgattgggatccgctagacggcacaaaacctccgctcggcaaagcgcggacggtcggtatttgggacgcctattgcgaagttaaccccgcagcgaaaccattaccgcccgagggacgcacatggtgcgaaacagcccaattcgcggaatttagtggtgtctgggcaccgtgtgggatatttctgaacgatcagaccttcgaagtcgctgtagcaaacactcctagtctccaaggggcgctgctggacatccttgacgagcagggattcggatctattcgatcggggcgcattaaggcctggcgttcgggtacccccgtcaatcctgctcagctattggcgatggtttccgatatcggcaaaggtcggttgagtgcgaaacttacgagcaagctgcctggctaa

SEQ ID NO: 78225 - DNA, 1794 bp, Pseudomonas syringae pv. actinidiae
atgtggtgtcccgtgtctaatcggctcgcgttgacacaggcacttgcagaactcaaacccaatggtgcgcaatatgatgcagcacttgaacgcggtcactgcgtggttctggctggccctggaagcgggaagactaagaccctgaccactgccatggcgcgtgcgctgatggacgatgtagtcgatccgcggggagtggcttgcattacctataataacgagtgcgcgacggagctcgaggaccggttagctagattcggcgttggtaacagcgaccgtagcttcatcggtactgttcatagcttcgcgctcactcaagttattgcgccctacgcccgctgtatttctaagctccttccagacgattttcgcgtcgcaacaagtggcgagtgccgaacggcagtcgaggccgcttataaatcagtttttggcgatacgggtaatgctcacgaccgctggcgcttcgccgaagagaagcgacgtagggatgttgaccgtacttgccccgcctggaaggggaagaatctggaacttgttacttttatcgaggcttatgaagcggagctgcgccacaaggcactcatcgatttcgatgacatgccgctcatagcctttcgaatgattaaggaacacaattggattcgtgacgcgcttagagcccgattccctgtcctgtttgttgatgaataccaagatcttggccacgcgcttcatgaactggtactgctgctttgctttgaaagtggaattcggctgttcgctgtcggtgatgctgatcagtcgatctatgggttcaacggagctaaccctggcttgctgcaagatctcaccgcacgtgacgacgtcaaaacgatccatctgcgcttcaactatcgctcaggtgcgaagatcatcagagcctccttgggagcgcttggcgaagagcgagattactgcggtatggacggggctgcagaaggagagctgaacttctggccggtagagggcgaccacgatcagcaggcccgatacatttctgaggtcgccctgccctcactgcttgctcgaggattccagcttgatcaaattggaattctttaccgcgctgcctggctcggagataaggtttccgacgcacttaagaagacgagcatcgccgtcttgcgcacggatggtaatgcgctggtaagacgtaactcccgtcttgctcgttttgtcgaagcctgtagtcggtgggtgacaggaggatggcgtgacgcctcgccgccttatcaccaactgctcggccaagctctcgcgatcgtctatggcggacgagtaagcggggctgaagagcaggcaatgaccctacagttgatgaccttcttacgcagaggtatcaactgtaacgagactactcatgattggctgactcgttttggtcgcgagttgctcacgccttggcaggggattgcccgaaacacccatcaggaatgggaggtatggtcggagctggtggcgcggactgacccggcacggggtctggatatgccacttactatcttctctggacggatagatggctctggtcgagtgaccttaagcaccctccacagcgccaaaggccgcgaatttgatgtagttatcctgtttggtatcaacgcagaagaccttccaaactggcgcgataccaagtcagagcgggcgatgcgtgaggcccggcgtctcttctatgtaggcgtgactcggcctcgaaaggaattgtgcatggtcttcgagaagggtaatcactcgccttgggtcgccgaactctatcggcggagccgacaggagtga

SEQ ID NO: 78226 - DNA, 1029 bp, Pseudomonas syringae pv. actinidiae
agttactgccgcataactggaaaccagtttagttacacaagacgggatggccggacggatacgaagactcagctgctagtgagcacgcactcaagtcatatcacccatgaggtagagtacgatcaccttcgctatttccgtcgtctgccggcgggcatggacggcgtgcaggtacctgtatcgaccgtttcaaacctatcgacagtgtttggcgagggttcctacactcaaaaattcgtcactcgttatcttcgggctcagcatgctgaactgttctttgccgacgcagtgattttggttgagggcgctgctgagcgaatgctgttgccacagtttttgcgcactcacttcaagtttctcgatcaatgctacatcagcatcctggatattggagggagtcacgctcaccgacttcggcctctggtggacgcacttggaatcgtcacattggtcatcactgacctggatgctggaaaggccaaagcggcaaaaccggttcgccgaggcgccgacctctcgaccaacaacccaaccctcaagcactggcttaggatgaaggccgcttctgcaaaagtggatgaccttctcgaaatggccgacgagctgaaatgccaggagctcgatgagctttttgctattcgaatcgcctaccagactcccatcttggtcgctcttgatcagacggggcctctaccggttgaggtgctggcgaatacattcgaagacagcttagtactgaccaatgcagcttactttgcatcacgctccggtcgtggtcttgtcggtcagtttgcccgtgcactccaatcggccacgacctctgaggagctcggtgagagctttttcgaggcgcttcgagatggcaacaaggcagagtttgctttggaggtactgggggcaactacctttcctatgctgacagtaccggattacatacgtgaaggcttggtatggcttgaatggaagctgcgcaagaaacagtcagaattggtaattgttacagcctcccctggggaggagattgtatga

SEQ ID NO: 78227 - DNA, 1848 bp, Pseudomonas syringae pv. actinidiae
atgagtgtgctgccagatgctgaccaggtgatccagcgatgcttggatcttgataatcctaccagctttttcctttacgcgggtgcaggttcgggcaaaacctactcgcttgttgaggcggttctaaactttaaagaacgggcatcggagcgcttgcgggtcgaaggtagacagatcgctgtcatcacctacaccaacgcagccgctgaagaggtgatgcgccgactggaacacgatccgctggtttgggtatccactatccattcctttgcgtgggagatgatcaggggattcaacgacgacattcgagcctggatcaaggtcaaactggccaatgatattgccgatttggagggcaaactggctaaagcccggggtgaaaacaagacctaccgggctaacaaagcagaccgggatagaaagcttaagcggctagaaaacattgatcacgttgttgattttacctatagcccaacgggtgaaaaccgtggccatcaggcgctcaaccattcagacgtcattggcttggccgcggactttatccagcggcgtccgctactcgatgttttggtggacaagcacccggttctgctcatcgatgagagccaagacaccatggcccgactgatggaagctttcttggtggttcaggctgaggcatccgatcgtttttgcctaggcctgctaggcgacaccatgcagagcatctacggacacggtatgcaaaaccttgcttgcgccgtgcctgaagactgggccaaacccgagaaggtcttgaacaggcggtgtccggtacgggtggtggaactgatcaacgcaatcagggcccaggccgacacgcatcagcagtcgccgcgtcacgatgcgcctttggggacagtgcgcatgtattgcgttcgaagccagccaatgtcgacctttcaaatcgagagtgaggtcgccaggcgcatggccgatgtcaccggagatagcgtctggaattcagggatggagggaaggaaaacgctgatcctggaacacaagatggcgagccgacggatgggattcgacggcgttttcgttcctctttatcaggtcgaccacctgagaaccggcttactcgatggcacacttccggtattgcgagtgttccttgaaggtgtgatgccaatacttgatgcggcgcagatagacagcttcaaactgatggaggcagtaaggcttcgctcaccactgttggcccgggagcggttggcagcggctcccgaccaggcgttgacgatagcgcaagccggtagaggtaccgaaggtttacttgagctgttcgccgatgcagatccgttgataagcgatgtcgtgcgggtacttgcgcatacgcatcttctagatctctcagatcgccttcgtgttgcattcgagatgggggcgacagacgaagactttcctgacaccggcgatcgggaagcgcttgaagtccatgcctatagactgctgattggagcccctttctcgcagctcaccgcctacgccaagtattgcagtgagctatcgccttacggtacgcatcagggggtgaagggtctcgaatttcccagagttatggtcatcattgacgacaaggaagcagcaggctttttatggaattacgagaaagctctcggtgtagtgccaccctccactggcgatatccaaaaagaggcggctggtgaggacaatgcgctgactcggacgcgcagactgctatacgtgacttgcagtcgcgcgcaggaaagtttggcaattgtcttctacacagctgacgccgagggcgcgctggccagtatcgtcaaagcagggtggctgcacgaacacgagattttgatcatttag

SEQ ID NO: 78228 - DNA, 2133 bp, Vibrio parahaemolyticus
atgtatattaataagttaaagattgttaactataagaacttcaaacactctacttttaaattcaagaaagacgatgtaaataccataatcggtgaaaacgcggcaggcaaaacaaacgtttttcaagcaatgaggctagtacttgatgagtctctaccatctaattccaagcacttagacaaagaagattttcaccgaggacttggacatccatttgggcattggatagtcataagcgttagctttgaagagctatctgagtctgaggaagagcaggtactagctaactacattctaaatgattcaggtcaaccagaacttgatgacaagggaatttatacgttcatttatagacctaagtttcatatacgccaagacctgtacgagctaacgatggaaggcaagacgctacggaaacgacaagaaatgtttgagagttacatcaaacagaagcaaattagtcgtgaaacatatgaagcggtagcctttgtccgaacaaagttagattttacgaatcaagacacatacatctctcacgtgggtgattttgataagttagtttttcctgaccctagccaagaaagtagttctgaactaggttgctacaaaccaccctacttctcactagtaaaagaagttgcatgcacttacgttaaagctcttagaaacgtagtggcagatttaaagtactacaaaacgaatcctttgtatcggttgctgactttaaaaagtgagcaaatagaagatagaactgatgtagtaaaagacatccttaacgtaaatgagaaaatatcttcaattccggaaattgaagcactgagtagcgatatatcttcttctctccttagtacagtaggttcaacttatagtcctaaaataaatgtctcgtcacagttgccagaagactttactgagcttatccaatcgcttggtcttgtggtagaagactcatcgcactatcaaggaacaggtaggatagaagaccttagtttagggggagccaatctaatctatcttgcacttaaattgtatgaatatgaagcaataagagacacagaggagcacattactcactttcttttgattgaagagccggaagcccatatacacaaccacatccaaaagacactttttgacaactttaacttcaagaacacccaagtatttgtttctacacactctacacaaataagctctgcctcaaagatatcagcaatgaatatactttcgaggaagaacaatcacacagaggtgtttataccagctaaaggtttagaagaagacgagattaaatgcatagagagatacctagatgcaattcgcagcgatgtgctcttcgctaaaagtacgattttggtagaaggtgatgcagagttaattttgatacctgcgatggtcaaaaaggctctaggcgtttccttagaggaggttgggatcagcttggccaaaatggatgggacagtcttctcacacatttcaaatctctttagtcctgagaggattcaaagcaactgttcaattcttacagatctcgatgaggcttttgttaaggaaatcgacgactctttgtcgttcgcgaatgctgactatattaaatcacagttaaacgcagagaaatccggcgaaacgcgtaagaaacgtttagacgagtacactaagaacaacccttttgtgagtgcgttttatgcacaaaataccttcgaaacggaacttgtaaaattcgaaaacaataggaaattaattgaaaatgtcattaataaaacttacacccagcaagcaactgcgaagaaggtagtggaaaatttaaattctccgaatattccacttagaaatttcaccatactcaaatttgcagagaaaataggcaaaggttggttagcaacaaaaatatgcaaccacatgaacattaatgtacaaatcccagactacatcattaaagcaattaagtttgcaatggcggaaagcaatcaagttgagatttttacaaaaatgatggattacaatgtttcgcatcatcatatggacaaagtatatatggcagattttgtcagactttctacttatgaggaaaagcgcgactcatatttaagaacatttgaaaatgattcactgtgtaggttaataggtgcttga

SEQ ID NO: 78229 - DNA, 1746 bp, Vibrio parahaemolyticus
atgccatatagaaatttgaccatggagcagatggaagctgtaaggtttgatgataatttgctgttatcggcttgtcccggttccggtaaaaccaaaacattggtttccaaactttgttatctgctggaaaataaagagagtctaagaataggtaaacgaaaaatagttgcgattacctatacgaatgtcgccgctgacacaattaaagaacgtcttctctcatatggaatagacagcagtgctctctggattggcactattcactcgttttgtcttcattgggtaataaaacctaacatcaacttgattcctaggttatgtaaaggctatgtaatcattgatgagcatgagaaacaggccaaaatagatgaactaaaagagaagtatcacatcaataaattcgagagagttgagacaaagttaggtctagactacaaacctgtgtattcaagaggagttgctctatttgatcttgtcagagaatatcacctctatcttggtcaaaatagactaatcgattttgacctaattattaatctcagctataggttactaaaggaaaattcttttcttggacgaaggctgagtaaattgttctcacacttattggttgacgaataccaagacacatccgatatacaatatgaaatattaagttcagtagtcagtagacaacagaccacagttacattcgtaggagataaagagcaagcgatttatactggtttaggggccgtcgttaaggataagacagatctcaaagaaactttcaaacttgattctatagcggaaaaatctcttacaggttgttttagaagtagtcagaggattgttgattactacagtaactatcaagacggtaacatcgatatacagtccatgtctaaactcaaggacttcgcttctgttgtccatttagataacaccattcataaaaatgatttagctgaatatgttgctaacattataaaaacacaccttgctcaaggaatagaacaacgagaaattgtagttctatgtcctagttggtttgctgttatggagctttctaggaggctcgaagagttttcagatgacttcagcatcgatggttttctcgtatctccaattccaaagaatcaagacaatatttggctaaatctaattcgactggcattacttgagcctagtgttgaaaactatattaaaaggcagagaattgctaagacgttatcagaatttctttatgacataagggaaactgatgaacttatacagccaaaaaagatattgagagcagtaaactctctttctataaaagctgttggagccattgaaaaatggatagaagggattattaaggatttctacttaaaattaaatcttgagtataataataactctctaggtgctagttctatgagaagtcttctagatgcaactgcacaacgcatgaaatcctatagtatgaattatgaagctagtgatttacatcgattcttttgtgatccttcaggagtaaagatcacctcatgtcactcaacaaaaggtgatgaatatgacgttgtaatatgtactggactattaaaaggcaaagtgccgcattggcaggatataaggaatagaagtatgcagcatcagaattatgtagctcgaagacttttatatgtagttgcgtctagggcaaaaaagcatttatatatgatttctgaaaatggatatgtaagtaattcaggttatcactacgtaaaaacagaacagttatag

SEQ ID NO: 78230 - DNA, 1746 bp, Achromobacter sp. DMS1
gtgtatctggcacaactgagaatatccaacttcaggaaactacagaaagttgatctgagcttccagcctggactgaacgttctggtcggctctaacaacgtcggcaagaccgctgtcgtcgatgcactgcgtgcgctgcttgcggggcatgatgagccgtacccgcgcctcgacagcgaggatatgcaccggcccaagggcagtgctccggcgggcgacatcgagttccagtacgtctttcgtgatttggacccggatgacgaggccgacttcctggcagcgctgaagcccgacgcactcggcaagctcgaagcgcatatcaccatccgctactcggaagccgacaagacgggaaggctgcgtgccaagcgctggtgtggcgaccacgaggacatgggcttgaccgcagacatgatggagaacttgcgcggtgtctatctgccaccgctgcgggacgcttcgcaaggactcaagcccagtcgcaccagccaattggcccggttgtttcagctcctggctgacgacgcgggacgtgatggcatcaacgacgcgctgaagaagctcgacgaggagttgaagaagcacgagcctgtcgtcaacactcacacagccatcaagaaccggcacggcacgatgcttgggccgcagcttgcccaaattctggatcttggcctgagcggtagcgactttcagcggctggcgtcgcgcctgtcgctggtggtggacacgttcgagattgagcagaacgggcttggcttcaacaacttgatcttcatggccgtcgtgctcagtgagctggccaagaacccggaagcaagctatcgaggcctgatcatcgaggagccggaggcgcacctgcacccgcaacttcaggcggtactgctggactatctggggactatcaaggccgtcgagggcgagaagcctgtccagttgttcgttacaagccactcccccaacttcgccagcatcgccgatctcgacagccttgcctgcctggtcgatacggggagctccgtggagacattctttccgcgtacgatcgccttcggcaaggggaagcgagagaagctggaacgttacctcgacgtgacccgtgccgagttgttctttgcccgccgtgtgatcttcgtcgaaggcgcggccgagttgatgctggtgagcgtgttggcggagaagtgcgggcataggctgcgcgaacacggcgtcagcctgatcagcgtcgaaggattgaacttcgactcgttcctgccgctgttcggcgaaaaggcactaaagatcccggtcgctgtcataacagacgcggacccggtcggcgaacccgacggcgacggagaaccgcaggcggcctaccccgcgcccggtactgctgtgaaggtgtcggacaacaccgccaagatgaaggaaggcgaggatgccttcgtcaaggtattccacggtctcaagacattcgaatacgacttggccctgcatgccgacaaccgtgtcgcgatgctggcggctctcaaggaactgcacccgaagatcggcgaaaccgtcgcagtagcggtcgaagccgcggaaggcgatgcggccaaggcgcgcgcccttttcagcggcatgtttgagcgcccgcaaaacaacgtgcagaaaggccgcttcggccaggcactcgcgcaggtgattgccgatggcgccgcgtgcgtagtgccggactacatccgcgaggcaatcacccacgcctgccaagtcaaggagcccgagtag

SEQ ID NO: 78231 - DNA, 1740 bp, Achromobacter sp. DMS1
gtggcccagccgtccgaagagcagttgcaggtcatcggcgcaccaatcgcaccgatgtccgtagttgcctgcgctggcagcggcaaaacgttcaccgccgtacgccggctggcgcagatgcgccgacaactcggtgacaaccgcggtcgcgtcgctctcctgtcattttccaatgtcgccgtggatacctttcggcgcgaataccagaatctggtccagaaggtgccctccagcgtcgcccacggccgcgtcgagatcgacacgctagacaccttcatcaccggcaacgtgctgcgcccacacgcgtatcgcacgatgagtgcgcagcaggccgcattccttgtgatgggcggggaagcattcctgggcggcttcaggttccagacgaacacgtatcctcgcgagatcacgcagatgcaagttggcatcgacaacaacggtgtccatttctgctacgcggacaacgaccggacgcttaggctggataccgcgcaagcgacgcgcctagtgcatcgtcttggacaggtaggtgcctatacacacaacctcgggcgctactggtgctaccgcaccctggcagaacagcccggcatcctgcgcgcccttgtccgccgctatccgcatattctgatcgacgaagcgcaggacatcggtacggctcatcaggccatcattgagcagcttgtcggtgcgggctgccaggtctcgttgatcggtgatccaaaccaaggcatctacgagttcgccggtgccaatggggcattcctgacacggtacggtcagcgggaaggtgtcaacagtctccacctgaccaggaacttccggtctgtgccagcgattttggatttggccaatcggctgtcaacgcgagcagacaccgcggacaggttagtgcccgatacgacgcatggcgctttcttcgtgtcctaccggaacgccgaacgcgagaacctcatcgccgctttccaggcggcggtgctggcggccgacctgaagctggaacgctcagccgtgctgtgccgcgcccgggacatggccaacaagctcggcggcaacgaaggggcgccaggccagggaaccgtcaaggctcttgcacaggccgccatcctgcgcgaccggcaccaggactatctcggcgcgttcaagctggtggcttccggcatcgtcggtctacttgccaacccgccgcaaggactggtggcaaggatcacgcagcctgcgcgctatccgggtgatcgaatgctgcgacggctcgtttgggcattcacgcgcaatccggattcggggctaccggccgcgacattgaccggggacacgcagtggcatccgctgctgttggaacggacgaggacattgctggcacaaatcgcacaagaccacggcttggcgagcaccagcaacctgggcaacaagctcgcaaaaagggggttgtccaatgccccgctgatcaccgccgctgacttggcagcgaacgacgacgcaccgcgcatccgagtggacacagtccatcaggcgaagggcgaaagccttgatgctgtgctgtacttggcgaaccgggaacacgccaatgcgctgctggccggcgtagacaccgaagtcgggcgcatcggctatgttgccgtgactcgcgcccgcaatctgctgtggctcggtgtaccggccaatgcgctggaggaattgagacccgtcttgcttgaacgggggtttcaggaagccggcgcagcgatagccccagcgtag

SEQ ID NO: 78232 - DNA, 2298 bp, Pseudomonas syringae pv. aceris; identical to SEQ ID NO: 71964

SEQ ID NO: 78233 - DNA, 1872 bp, Pseudomonas syringae pv. aceris; identical to SEQ ID NO: 71965

SEQ ID NO: 78234 - DNA, 1932 bp, Pseudomonas syringae pv. aceris
atggtggcgactgatgcgctgaatgagactcatgacacaagccgtgtaggcgagactgtttgcctacatactccaatggccaaggttcgacggtatcgtccattctgcaacggcatcaccatcaaggatgtggaaatgcaactgacacgcgtcgccatacgcaacttccgaaattttaaagatctcgacgttcctctcagtggcaacatcgtcgttgtaggcgagaaccgcgttgggaaaagcaacctcctgtatgcccttagattactcctcgaccctagtcttgcggatagtgcgcgccagttgggacagggtgatttctgggacggcttgggggagccgttggaagatgaaaagatcactattctcatcgaaattcaaggctttgaagaggatgtggatctgctcgcgatgctgacagactatcggctggacgatgacgctgacacggttcgactcacctacgagttgcggcccctcccaaatcttggccggtttccggcctcggatgaggattacgagttcatctgctttggcggagagactgaaagaaagcgctttggtcatgaccttcgtcgacgtatcaccatggatacactgcccgcactaagagacgcggaaggtgatctcgcaatgtggcggcgttcaccgctgcgcccgctcattgagcgagctttttcggaggtaagtcgcgacgaactcggtgaggttcaggaagcaattaggaccgcaaccaatgatcttacgcaattcgacccagtgagaacgctagaagaaaatctgggagctatgtacgcatcaatgagtgggcccaatcagtatatcgagccccgattaggcttcagcaccatcgacatcactcgtctttatcgcaatgtgaaactattgatagatggtggtttacgaacgatcagcgaggcgagcctcggctccgccaacgtcgtgtttctgagcctgaaaacacttgaattgaagcagttgatgaatgaaaatcgacgagatcacactctccttggtattgaagagcccgaagctcatcttcatccccaccttcaacgatccgtttatcgacatctattcgaagagtttggcggggcgggagatgagagattatcaatccttctgacgacgcactcccctcacattgccagtgtcgcccccttgcgatcaatcatgctgttgcgtgagacccgtcatgaagggaccgttggacggtccacggctgaattgaacctgactgacgaagacgaagaagacctgactcgatacctagacgtgacccgcgcggaaatgcttttcgcgcggggaattatccttgtagaaggcgatgcggagaaatttttgctacccgtttttgcaaagtcacttggctacgaccttgatcacctcggtatcacgatttgctctgtttcaggaaccaactttcaaccttacgtaaagtttttaacagctcttgaaatacccttctcagtgattacggactgggatccgcgtgcagccgcgcgacctcttgggttcaaccgtgcgttggagttggttcgaactattttgcgtattcggaaccgccgaaaccctagaagaattattgctgaacttgaagccttgaattttaaagattttgaagcacggtgtgatggatacggggtattcacaaatgtagacacgctagaagtcgacctctttgaagacggcgatttcgtagcccctattctcgccaccttgcgcgatgaagatttgagtgatgagcggagcgcttgggtagatggctgggaggatgacccagatacgctcgatatcgtcaattacatcaaagtcatagaggctataggcaaaggcaggttcgctcagcggctcgcctctcgtgttgccggcgtggagcctcctctctacatacagtcagccattgatttcgtggtgcgacgtgtccgataa

SEQ ID NO: 78235 - DNA, 1788 bp, Pseudomonas syringae pv. aceris
gtgtccgataaaacttcatacctgcttgctgctcaaactctgcgcaataatgcaggccagtgggctgcatatgaatctcttgggcattgcgtcgtcctcgcagggcctggcagcggtaaaacaaagacccttaccatcaagatggctcgattacttgcagaagatgttgcggagcccagaggggttgcctgcattacgtttaacaccgaatgtgctcgggaattagaaagtcggttgagtgatctgggcgttgagccaggtcgtcgaatattcattggaacagtccactcgttctcccttacccaaataatactgccttacgctagggtcgccagactcggattaccagatgacttccatgtcgcaacaaaaagcgagcgggaccgggcactgcgggcggctctagacgacatggccaaataccctgagccattgagggagtgggaggcaaaaatgaacggctatcgacagtcgattttagatcggggtcgaccggagtggctggaaattaatcctgagcttgcgcgcttggccgaactctatgaaggacggcttcggcgtatgaatttgatcgactatgaggatatgcccttgctggctctgagggcccttcgtgagaacgaatggcttcggaaagcactgttagcaaagtttcctgttctcgtcgttgatgaatatcaggacttgggcaaggctttacacaaaatggtccttggcttgtgcttcaccacgggaatgcgattattcgcggtaggcgaccctgatcagtctatttatggtttcaacggtgctcggccggatcggttacgacgcctctcggagcgtcgtggcgtagagactgtgcgactgcgcttgaattatcggtgtgcgactcgaattgtggcagcgtccggagctttactcgacgaggagcgagactatgacgcagtagcaggcgcaccatcgggggaggtgttttttcaccccttgcgagggcgatatgaggcacaagcatcggtactcatcaatgagcttttgccccaggctctcgctcgccacccgcacctcaggctcggagacgtcgcgatcttgtaccctgcggcctggttgggcgacacaatggttcccgctatccaacaagctggcgtgccgttcattcgcacagataccaatgctctgtattcgcgttccagcagattaatgcactggctggagcagtgcgccatatggtgttgcggagggtggcagagcggatctccacttttttcacagctgaccaatactggcaagcacttattctctaatgcaattcgatccgacacccaagcggctgagtttcatcggggattgatcacaaagctgtgggcctcgcgagaggtcgcgctgccactactgggatggctaactgattttcgcgaccgacttctagctcccctaggcgcagaatgcccagatctggctgatgagttgaccatattggctgacttcatcgatcggatttcgcctgaaggggacagtcatggcatgtgtctcgggagtttagctggccagagcaaaggcaaagatagcttgaatctttcttctctccatagtgcaaagggtcgggagttccctgtggtattcatgtttggcgccgacgtcgggaggatgcctcgtgacggcagcactgatccggaagtcgctgaggcacgccgagtcttctacgtagggcttacacgtgctgaagtcgagatccatatgatctacacacagggacgcgcatcaccatttgttagtgaggtgcagcggcgcatcgaaaatggtgattag

SEQ ID NO: 78236 - DNA, 1848 bp, Streptomyces virginiae
gtgcaggttcggcgattgcagttgcagaacttccgtggcatcaagcaaggcactgtcttcttggacggccactgcctgctggtcggatccaacagcgcgggcaagtcgaccatctgcgaagcgctggatgtggtcctggggccggaacggatggcccggcgcccggtgatcgacgagtacgacttctacggcgcgcagtaccaggagcatgacggtgagctgcccgaggtccggatcgaagtcctcctcaccaacttgtcggaggttgcccagcgacggttcggcagtcacctgcgcctgttgtcccgccggaccaacgacttccttgacctcagcccgaccggtctccaagaagcgcacgaagcagagtggtgcctgcccgtggtcttctgcggccgctacgacccgctggaggacgactttgtcggggggaccttcttcgcccaccccgagaacctgccggacgagccaaccggcgacgacatggtggcactcggcgctggcctgaaaccgttcacccgcgccgacaagaggcattgtgggttcctctacctgcggcccaaccggaccgggaatcgggcgctcactttccagcggggttcgctgctggacaccatcgtccgcctggaagccgagctggctggtcccctgtgggaaagcacactgcgcaacctggatcaggtcaccatcgccgccgcggattcagggttcgacaagatccggaccgagatccacgagcggataaaccggttcgtaaccctgggtgatactcccgccccggtggacttccgcgcctcggagattacccgggagcacctgcgtgaggtcctgcgcttgttcatcgcgacacagcccagcatccactcggtgccgttcaaccggctcagtacgggctccttgaacctcctcgtatttgccctgctcacctacatcgctgagctcaagggagacaagtcggtgatcttcgcgattgaggagccggagatcgccctcccgccccacgcccagcggcgcttggttgactttgtcctcaagaacatgggccaggtcatcgtcacctcccactcgccgtacgtcatcgagaagttcgagccttcccgaaccgtggtgatcacccgggacgggcagggcacactgacgagcaggggcgtcacgcttccgtcggacttcaagccgagcaagtaccgcgtctaccgccgccagtttgccgaagcagtcctggctcgcgctgtgctggtggtcgagggagcaacggaggctgcactgttccccgccgtgtcggacgttctggaggccgacccgacggtgcccgactacgttcacatcgatctcgccggcgtcaccgtcttcgacgcccagagcgacgtcagtgtgccgctgttcgggccagtgttccaagcgctgaacaagccggtgtacggcatccatgaccagccgacaaacgccctcgcgccggcactcctcgccaagacctccgccttcacgcactacacggaactcgagtacaagagcgtcgagaagctgttggtcgccgaagtgcccgtggctgtccagcgacagttcctcttcacggtcgcccagcgtgatgactaccccagcgggtgcgcacgcccggcggtcggtgccagcgatgatgaggtgcgctccctggcctccaacgtgttggcggcccgcaaggcagatgggtacggcgccttgctcatcgccgagtgcaagagccgcagcgaccttccggcagtcctggccgacttcctgctcgccattgacagtgacctgcgctccgtagttagcacagaaaccgtcggtgacgcggacggatcgctgccgggcgtgtccaatgaggattga

SEQ ID NO: 78237 - DNA, 1716 bp, Streptomyces virginiae
atgaggattgacgaggagcggcaggcgatcctcgactctgctggtcatcttgtcatcgtcggcgggcccggctgcgggaaaacctcgatcgctctcctcaaggcccggaaggtcctcgacaccctcgaaggcgagcagcgcgtgctgttcctgagcttttccagggctgcagttcgccagatcaccgaccgcatggctggcgttttcgatcgcaccgggcgcgaacggctggaggttaagaccttccacgcctcatttatggagatcgtccgaagccatggacggctgctggccggccagccttcgaggttcatcgcccctgaccgcgagcgcaagctgaaagcagacttcgacggggactgggataccgagcggcgcaggctcgccgccgaggaaggcagatacgtcttcgatctgctcgcgggcgccacggcggatctgctggagcgcagcgcatccctacgggccctctacagcagcatctacccgctgatcatcgtcgatgaattccaggacaccaataccgaccagtggcgcgtggtcaaagcgcttagtgccacctccaccgtgatctgcctcgctgaccccgaccagcagatcttcggtcacctggagggcgtcgaggagggacgcctcgacgaggcgatcgagcagctgaagccgaggcagttcgacctgtccaaggacaatcatcggagtccggcgggaggtttgctcgacttcgccaacgccgtcctgcgtaacgtcccgcaccccaaggccgacggcgtcttcacctggacctacaccccagggtggggtgtccccgggccggtggtagtccaccggggcgttgtcgccatgcgcagacacctgacggaacggcttggccggacacccaccatcgccatcctcgccagcgtcaactccgtcctctggcctgtctccgaggccctgtcgacagagcgacagatggaaggtgggacgatccctgccgtcgaccacgcacttcaatgggaccccgagctgtccgccgccgcgggctacacggttgcatccatcatggagtggcccggcctgacgcgtaccgaggccatcgtcggaaccgggcggagcatcgccgacttctaccgcgagaagctcgccaacggcaccgccggcgcccgaagcaagatcaatacggtggagaacggcctcacagctctgatcgaaggcaggcccatccggtccaattgcgtcaaggcgctcgtcgcggcctacgacgccgggatctcattcactgggcagcccgtgatcgactggaaggccgcccgtgcctgccttaccgggtccgccgaactcggcgaggtcctcaagcacgcccggcttctgcgtctactgaacgccaccgacgcccttgcctgggccctgaccgactcctgggatggaacagcctcctacggcggtgctgtcgccgccgtacgcgcagtcctgggcgcggaagccctcaccgcctcgcagcagcctgtcgagcccgtatccctgatgagcatgcaccgatcaaagggaaaggagttcgacggagtcgtcatcttcgaaggtgcctatgcaggccgcctgctcgactcggcctgggacgcggaacgaatcctggcgcaacggcgcctccttcgtgttgccatcaccagggcccgttcgcttgtcctcttcgtgcgcccccaggagagcgaggccctgtgcggtaccagtacgccatga

SEQ ID NO: 78238 - DNA, 1926 bp, Salmonella enterica subsp. enterica serovar Typhimurium var. 5-; identical to SEQ ID NO: 72180

SEQ ID NO: 78239 - DNA, 1662 bp, Salmonella enterica subsp. enterica serovar Typhimurium var. 5-; identical to SEQ ID NO: 72181

SEQ ID NO: 78240 - DNA, 1926 bp, Salmonella enterica subsp. enterica serovar Typhimurium var. 5-; identical to SEQ ID NO: 72180

SEQ ID NO: 78241 - DNA, 1662 bp, Salmonella enterica subsp. enterica serovar Typhimurium var. 5-; identical to SEQ ID NO: 72181

SEQ ID NO: 78242 - DNA, 1926 bp, Salmonella enterica subsp. enterica serovar Typhimurium var. 5-; identical to SEQ ID NO: 72180

SEQ ID NO: 78243 - DNA, 1662 bp, Salmonella enterica subsp. enterica serovar Typhimurium var. 5-; identical to SEQ ID NO: 72181

SEQ ID NO: 78244 - DNA, 1926 bp, Salmonella enterica subsp. enterica serovar Typhimurium var. 5-; identical to SEQ ID NO: 72180

SEQ ID NO: 78245 - DNA, 1662 bp, Salmonella enterica subsp. enterica serovar Typhimurium var. 5-; identical to SEQ ID NO: 72181

SEQ ID NO: 78246 - DNA, 210 bp, Streptococcus suis
atgaaaataaaaaaaattaatgttcaaaattatcgtttattgaaggatttttctttagagttgaagagtgaattgtcattaattgtgggaaaaaataattgcggtaaaacctcagttttatctgtattggaaaagataatcaataaaagttctagtttaacctgggaagatataaatttgtatcatagaaaagtaatttttgaaacctaa

SEQ ID NO: 78247 - DNA, 1914 bp, Streptococcus suis
atagttacgagaacagtagagcaagaagtagaaaaagtatttgaagcaataaaacaaggtcaaaattttattcttgaaggcggtgctggaagtggtaaaacttattcgctaatttcaattattgaaaaaatattgattgaagaacctaaaaaatcaattgtatgtattacctatactaataatgctgttgcagaaattaaatcacgaataattaatgataatttatgggtatcaacaattcatgagtttatctggcatatcattggaaatttccaaaaagagattaaagaatgtcttgttgagttaataaatgatgattcacaaaagttatttgtttcaccaaaggatgtaattgaagaagaaagtatttcacttgattactttgatgatgtccgtgttgactatgctgaatggtactctatgagtataacagagcaaaataaagtccaaataagtcatgaccatattctaatagttgccgaaaaaatgttttcaaaatataagaagttatgtgatgttttagcggatactgcaaactatatttttgttgacgaatatcaagatacaagtccactaattgtgaaaatattattagagcatcttcaaaagagtactaagaaaaatgttgtaggcttttttggagattctatgcaagctatttatgattcaggggtaggagacttaaattcttataatttggcaaagatacaaaaaactcaaaatcgtcgtaatcctaaaaaagttattgatttagccaataaagttttagttcaaactccatccaacgatgatacggctcccaatatggacgatgggagtgtcattgctggaacagtgaaatttgtctacgggaacgatattaatcaacttgatgttcttagaaatagtaaactatataaagctttagaatttgatatagctaaaaaaacaaaagaattacgtctgacacataaacttaatgcagaaatggcaggtttctctaagttatttgaattatataatactgatttatttgtgaaattaattacaggtataaagaaaaaaatcaatgaaaataagatagctgataaaggaaaaacgtttgaagaactggtagaagaggctaaaatagctgtcggaaagggaggtccattaataattgatgtggttaattccatcccagaacttttggctttttacgatgaaattaagacgtgctcgtttgaagaagttagtaataagagtaaagttaataaagaatcgctgttagcttataaatttaatggattaagtagtagatatgaagcgggcacagatagggataggattcttaaaaggttagatttaatctatgagctattagagctgtataaaacaggtaagcataatgaattcttacgtattactaaatttaatataacttcatcagaagataaaattagtctatctaaagttatgacaaaaatctctgttgatgatattacaattggaaaagtcatagaacttgcagaggaaagtggattaatttcaaaggatgacttatttactaattttattgaaagtaggggacattatttatggtcacgacttaagataatgccatttcaagaatatgtaaatagtattgcttatctcagagaatatgtatctgttataacgcagcataaggttaaaggtagtgaatatgataatgttttagttttattagataatggaaaatggaatcaatataattttgatagcctatttggtaaaggttcagttaatgagaatgtccaaaaaagaactaagaagttattctatgttgcaattactagagcaatgaaaaatttaattgtttacatgccgagtaatgatagtcagattattcaaaaagcacaagattattttgaaccaattgatattattgatgttttgtctttagttgatgagtaa

SEQ ID NO: 78248 - DNA, 1848 bp, Paenibacillus peoriae
atgtttcttttagaagttagaattacaaactttcgaaagtttggtcaaggaacaaatggtgaacccggattggttctcgttttaaataaagggctgaatgttctcattggtgaaaatgatgcaggaaaatcgacagtaattgatgcaatcaaatttgtattattaacacaaagcagagaatattctagactagaaaaagatgattttcatgctgattcaaatgaactgaaaatcgaatgcatctttaaggggttttcagtaaaccaagcaaaggattttttagagtggattactattgattcagataaacaatatagtcttcgtgtttttctaactgccaaaaaggatgttaaaggaaagatattaattgacgatgtgcatgcaggaagtgatagcgaagggcaaatactacatagtaaagcacgtgatttacttagaacgatttatcttaaaccattgagagatgcagaaaatgaacttgctgctaaacgaaactcacgattatctcaaatattatattcacatcccgagttttctacgggtgaagatcatagactggttgaaatcattaaggaggctaatcaaaaaatcaagagatactttgattatgacgagctaactagtgaggaaaaaaagattctaaaatcaatcaatttttacttatcaaagttctctgataacaaaaatttgttgagttcaaatatagaaattgctgcagttaacctaaaaatgatcttagagaaaattgatcttttgcttgttactacgaaatcaggtttaggatcccttaatcaactatacattgcggctgagttattacttttacaaattgaaaaaactgaaggtattaacctcgcactcattgaggaaatagaagctcacttgcatccacaggctcagataagagtgatagattaccttcaagaattaagtgaaagtagcacatctccgatgcaaatactattaacaactcacagtgtcacattagcttcagttatcaaattgaataatttaattttgtttgctgaaggcaagtcgttttctttgtctgaaggtaatactaaactacacaatggagactatagatttttagaaagattcctagactccacaaaagctaactttttctttgctaaaggagttatgattgtcgaaggtgatgcagagaacctattgcttcctacattagcggataaattaggaaaatcttttgctaaaaatggagtttccattgtcaatgtagggagtactgcattgttgagatactcaaaaatatttattagagaattagatcctattatgcagttacctgttgcaatagttaccgattgtgacgagccagtatcaaagatcgataaagagtctggtggtattgtcatgcttccagctagaaaaccccaaaaaataaagtctgaaaagaaagtcaaatatagcgatcaaaatgtaaaagcttatatatctcatgagtggactttagaattcgatttggcttgtagttgcttaaaaaaagaactgttcgcctcaattctcatggcaagggattatgctaatcaagataaggaattaacagaggggagagcggcaaagacatataaggaaatcggtgattatttaaaagaagctgaaacacagattagtggatggagcacctatgaacccttcatgctagcttcaaacatagttagagatgtaatactgaagaaaaacatttcaaaagcggttgttgctcaatgcttttctgaaattttgaatgaacgtagctttacattggaggaattagaagatatcagaagcgacagttatctaaagtacctagttgatgctatagattatgtgacaggagcttag

SEQ ID NO: 78249 - DNA, 1971 bp, Paenibacillus peoriae
atgcaaatgttaaccgtaacagatgaagatattgaatacgcagctaaagttttaaatataccaaatggttttgataccccaagagttaacgttataaagtgcatggagagtagagatgtagttgcatgcccagggagtggaaaaactacagtattactcgctaagttattaattctagcaagacatatacctttaaaaaataatagaggaatttgtattttaactcatacaaatgtagcgattgacgaaattaaagaacggctaggtgataaagccaatgaattactcacttatccaaactttgttggaacaatacattcatttatcagtaagtttttagctaatcctgcgtttgttaactactactctggaagaatttcaagagtttttgaacctgtagattataaattacgattaataaaaaaatataagtccctgtatcctccattctcaggaagtaaactagatggtttcctctatggaagactcaataaaaaaataaaagaatcaaaagacaattctaaaatagcaaaggcaaaagatgatttactacgatccttagaattggattacacagataacacgataaaaaaagtcacttttaacaaaaaaactactgttttaaagaatccaaactcggatgcttataaagaatacattacattaattgatcaacttcaaaatgaaggtatatactcctacaatgaacttcaaggactcgcacataggtatgtaaatgattttccaagagaactacaaagtattttttcagagcgattttcgtttgtatttgtagacgaaatgcaggatactagcctacttcagttgcaagtattagaaaaaatttttgacaatgaaaaaatgattttccaatgttttggtgatccgcagcaaacaatttatgaatccgatgataaaggctgttcatgggaacccaaagatcctttattcataaaaaacagtaatagactgagtaaaagtatcgcaaaagttgcagatgttgtagcattaaaaccttatggaatgcaaggcagagaatcacaaaaaggaaacctactttcgccagtgattatcagttataaagataatgatgtatcacatgtacttgaatcttttgctaagttgattatcaaatataagttgaatgaactggataatgcgatatttaaagcagttggcatggtaaaggacaaaaatgaagagctatctattacgagttatttcccagtattcgaaaaattagagattaggagtaatgtaaacaaagatttttctgatcttaagagttacttagttatgcttgacagagcggtaattgagaaagaaggtataaaggcgtattatgatagattcattctagcaatattaaagtacttgcgaataaatgatattaggactgacgaaggcaggcttttctctaaagtatcatttttgaagtatttacgtgaaaacgatgtgagattatataaaacgacgcatagatactttgcaagaatagttttagcaatagctaaagggaaatgtgtattagctagttttaagtacattttagccattattgtgaatcgtctattccgttttaaagttaacatatataaggatgaatttatgaacggaactcctttggttgcaacaatagctgttaatgaagaagaagtgaacatgtacagatatgatgacttaagaattgagttagacagtgttcatggagttaaaggacaaacgcataatgccactttatatttggaaactttttatttttctagaacaaatgaaagtattattaaatttttgattggggaacaaagttccaccattgaggagcacgttgaaaaacacatacgtgttgcgtatgtcgctatgacaagacctactgatttactgtgtattgtgttgaatgaagaaatttatttggagaacaaagtaaagttaaatgacttagggtggatacattaccaagaaataatatag

SEQ ID NO: 78250 - DNA, 2202 bp, Clostridium botulinum; identical to SEQ ID NO: 75114

SEQ ID NO: 78251 - DNA, 1854 bp, Clostridium botulinum; identical to SEQ ID NO: 75115

SEQ ID NO: 78252 - DNA, 2049 bp, Leptotrichia sp. oral taxon 212
atgaaattaaaaaaaatagaagttaaaaattatagaattttgaaagatttcaaattagattttaaagatgaaacaacattaattataggtaaaaataatactggtaagacatcagtattagcaataatggataaattattaaatcaaggaaagaaaaatttcaaatgggacgattttaacatagagtttcaaaataaaatttatgaaaaaattactactaaagattttcaagtactaaaagaaaatagagaaattaatgaatatggaataagattaacattatttatagaatatacaaaagaagatttttatgggaatattcaagattttatgatggatttagatgaagataataactatattattgtagaatttaattataactgtaaagaagataatttgagagaattatcgatagaatttaataaaaaaaataaaggagataaaaataattttacaaaatttatgagaaaaaattctgaaaaatatttcaatcttgaaatgtatgctttaaaatataataaaagtacgaatagttatttggaaaatgaaatattagaaatatcaaatttaaatcagataaaaagagttattagttttaatggaataaaagcaagtagagaagtatcaaataaagaaaatgaaaattcattatctaaattatccgaaaaatattttgatatttctaaaactaaaaatgacaaagaatttgatgatttaatacaggcaattgaaaatactgatgaaaagttaaataatttatataatgggaaaagcaaaaatcaagtaggaatattttctggaataacaggtaaaataaaagaatttagtggaaatagtaatgagataaatatttatataaattcacaaatacaagaaaaagaattgtttaaaagtagtagtaggttattttttgattataatagaataaaacttcctgaaaatcataatggattaggatatttaaatttaataggaatgatatttgaaatagaaaacattgtaaatgattttattaataatgtttcagatataaatattttgtatattgaagaacccgaagcacatactcatcctcaattacaatatatttttattcgtaacataaaaaaattaataggcagttatagagagagcggtattaaattacaaacattgataacaactcattcatcacatatagtttcagaatgtaattttaatgatataagatattttgtaaaaaataatgaaggagtagaaagtaaaaatatagaaatcttaaaggaaaattataaagatgatgaacaagcatataaatttttaaaacaatatctaacattaaataatgcagagttatttttttctgaaaaagttatttttgttgaaggaactacagaaagaatactgcttccttatatgatgaaaaaaattgatttagaagataaaacaaagaaatttttaccattgttatctcaaaatatttcaattatagaaattggtaattatgcacaaatatttaagaaatttatagaatttttaaatataaaagtattaattataacagatatagatgctgctaaagagatgattacaaaagacaataaaagagaaacagaaaaatgtaatccagtagaagcaacaaaaagtacaaatttttctataaaaaattatttaggagaaacattaaaatctaaaaataaaaataatgaatttaaaaaaatagcaactttatctaaaaaagaaaaaatagtaaaatgtggtagtagcgaaataatgattgcatatcaagtcaaggaagaaggctatcaagctagtagttttgaagatgcgtttataagtataaattatgattttataaaagaaaataaaaatggattttcagaaggtttaaaaaaccaaaaaaaattaaatgaagaagaaattgatttttatgaattaactcaaaaatgtataaataaaaaatctagttttgcaatagaaattctgttatgtagtgatgaaaattacagtgattggaaaataccaaaatatataaaagaggggttagaatggttgaaggaaaattag

SEQ ID NO: 78253 - DNA, 645 bp, Leptotrichia sp. oral taxon 212
ttgatatatgaatcaataaatttgtataatgaaaataaatatgttgaattgtttaaaaaattaaaaataaaaatatccagttatgaagacaaaataaagataagaaaagaaatgaatgaattaattgaattaatgaagtctcaaaatgataaaatttatgagataatagataaagctaataatattttaaatataaaaaatgatgaaagatatattgaatttattgaaaatagaggatggtatttatggaacagaataaaggatatttctttttctgagtatgtaaaatctattgagtatcagaaagagtattttccttattcaacgcagcatagcgtaaaaggaagtgaatttaataatgttcttgttattctagacaatggaaaatggagtaaatataatttcaatttactgttagaaaatatatttgatgagaataatattttagataaaacgaagaaagatatttttaatagaacaaaaaagttattttatgtatgttgtacaagagcaaaagaaaatttaattgtatttattcaaataaataatcaaaaaattaataaagaaaaaataataagtaatgcaaaagagttatttggagaagaaaatgttattagtggagatgagttaataaataacatatga

SEQ ID NO: 78254 - DNA, 1953 bp, Rheinheimera sp. KL1
gtgcatatcgagaggataaaactacagaactttagaagcttcgggccagaggtccagagcatagctgtcgatccggatctaaccaccttggttggagcaaatggtgctgggaaaacggtcttgatgcaggccttacagcgcatgtttggcatctcaaatgaacaacggacgattcgccgtcaggattttcacattccctcttctgaagaagatagccccagtaagcggactctaacgcttgaagccattgtcgcctttcctgaactggatgatgaagacggagaccactccgtgataccagacttctttcaccatatgagcgtgactgatgaggggggcaagctgaaatgccgtttgcgtttggacgcggaatgggaagatgatggttcaatagatgggtacatcacgagccagttccgcgcggttacaacctggggtgagccagaagatgctgattttcacaatgtgcgcccagcggatcgttctcgaatccaattaatttacgtacctgccacacgatgtgcagcttcccaggtatcagcctttctgaaaggtcggctttggaaagctattaactggtcagaacaagtacggtcatcttttactcaaaaggctacagagctgaatgaatcctttgagggtgaaaatgcgattagtatcgttactgaaaagctcacaggccgctggcaggagctgcattctgctggaactgatagtacaccgaagtttcgtccggtcgacctacgttttgaagaatttgttcgtaaggtagaggtactgctgcaccctgatgaaagtggtcgcgatcggagcattgatgagctaagtgatggccaaagttcgttgtttcacatcgccatgacttcagccactcttgatgttgaaaccgagatcttagcccaaccagagagtgaagattttctgggtgcagacttgcccttgccctcattgactattttggcacttgaggagccggagaataacctagccccatactatctatctcgaattataagccagatcagcagcctagtgcttggcttaagagctcaagcagtactatctagccattcgccgagtattctcgccaggatccaaccaacgcaagtaagacacttcaggctagcaacagaatcaaacaccactgttgttcgtcaacttactttacccgatgaagagaatgaagctgcaaagtatattcagcaggcggtgagagcctatccagaattgtattttgctaaggtcgtggttctcggggagggggcttcagaagaggtaattcttcctgctatatcagaagcgatgggaataccaattgataagtcttttgttgccatggttccattagggggccgccatgtaaaccacatgtggcgtctactaacagatttacagattccttttattacattactcgatctggattgggggcggcacggcggtggctggggtaggattaagaacgcagtctccaagttgatagagtatggggtagacccaagtgagatatttgggcaatacctcaacccgttaggataccagcataatcttgctgcatttgataccgggtctgctgctgatttgactagcattagctcttgggttaacgcactcaggcactatggtgtttacttctcaagcccattagatattgattattcgatgttgaaggcatttcctgaccaatattgcgttgctctagacgaaagttctaccgggccatctaatcgtggtgagcctgggaatgcagttatgggggacgagggaagtcctgaattttatgcagatgatctgcaaaatttgcgctggtacaggtacctgtttttaggaagaggtaagcctagcacgcacatccgagtgcttggatctattccgtcagttcagttggctcagaacgcgccagaagaattgcggtctttggttcagtctattcacgcagcccttcagagatag

SEQ ID NO: 78255 - DNA, 1905 bp, Rheinheimera sp. KL1
gtgaagtttattcaatctgatcactggcagccccaggggatcgatgatcttgagccaaatgcatggcaagcactaaggcgaagagaatccataagcgtcatagctggacctggagcgggaaagacagagtttttagcgcaaaaggctgcatatctacttgagacaggcctatgcccaccaaacaagaaaattctagctatatcattcaagaccgacgctgcaaaaattctcgcagatagggtggaaaaacggtgtccagaagagctaggtagtcgatttgtttcgatgactttcgacgctttttctaaaaatatagttgaccgttttcgtatggcgttgccaccacaatggagaccaacaaaaccatatgatgtcacttttgcaactcgccagcagataacctgttttttaggtagagagcggcaaaaaaatagtcatatctctggattgttgaatgctatagccagaataaacccaataacttttgagtctacatttgttggctcaaggagacttggtctagcttcgaacgacataggggaacggactctttatgataattggttatccgaacaagtaagttgcggagatgaagagccatcacagctgacatttatgacaataaatcggctggctgaatatataattcgtaccaatgaccatgtgcggcgagctctgagagcaacgtatccatatgtctttgtggatgaattccaagatacgacttatggtcaatatgatttcctgttgtcagccttcggttatagtgaaacaactgtaacggttgtgggggattataagcagaggatcatgggttgggcaggagcccgaggtgatgcgtttcatcagtttgaggccgatttttcggcacaacgatatccgctgttgcttaatcaccgctcttctcctgaactggtcaggatacaacatgttattgcacaagctattgaccatgaggttagagaggttcaaacaagtaaccacagtcaggtctctggtgatgcagcttggatttgttttagtcgtaacgtagatcatgaggccagttacttggcgcagtggattgcgagtgacatgcgaagcagatcattgaatccaagggactattccgttctggtgcgtcaaagacctgaggattacgaagagcagctgtcttcatatttaactcagtacgggcttcgcttgagaaatgaaagtgtaaaaataggtaaaactactcttcaggatttacttgctgaggagctgactattttgtttactaatcttctaaggctgggacttgggcatcgaaatgcgcaagtttggaatcaattatcagcagatgtacagctgcttcgtaacacaacaccagaagatgacaaagcactgagacaggttgaacgcctattagcattatttatttctgaactcaaggagttgatgcgacaatcgcttacaccagacaatgctcgtctcgtttttgaacgaattattacctttattgatttgaatgatcttcggaaaacatttgctcgttatgctactggagatctacttgaaattaacctgacagcgcttgaagagttttttacaaactgtgctgatacccagagttcctgggaaaatttcctggaagaatttgaaggtacaaatcagattcctctgatgactatccataaaagcaagggactggaattcgatacaactattttcatggggatcgatgataatgcttggtggtcctatcgacctggcgattccgaagggttatcgacattttttgtagcactgtctcgtgcaaaacaaagggcaatattttcctattgtcagcaaagaggacaaagagcgaatgtcgcagacttctatgcattgttggaagccgctggtgttcaggagtatgtgattccaccaagtgtagtgtcatag

SEQ ID NO: 78256 - DNA, 1779 bp, Bacillus thuringiensis
atgtatattagtaaagtgaaaataagtaattttagaaattttaaagaaacagaagtagaattaggaaaacaaatggttattgttggggaaaataaagttggaaagtctaacttcatgcatgcgctaagactggttttagatccaactttatctgaatcaagccgtttattacagctttcagacttttgggatggtctaactcgaccattaaatgacgaagaaataagaatagatattgaactcactgagtttgaacaagatgataaattaaaatctgtcctttctgattttttagtgaaagattcgccattaactgtaggcttaacgtatagattttttcctgtagatgaaaacggaaataaaatttatatttttaaagtttatggaacagaaacagaaaatatttttagttatgaacaaaggaaatggttaccgcttgaggtgttatcggggttaagagacaccgaaagtgatttatcaaattggagaaaatctcctttaaggcctctaattgaaagagcaatcgaaacgacagataagcaagaactagagaacgttgctgaagaaattactcgttcaacagattctttgaaagaattagacgaaattggatcattaactgaaagaataaatactcaattagaaaatattgtaggagatagacattcgatagaaaccagcctaggtttttctcctgctgatgcttcaaaactttaccgtgcaataaagatgtttattgatgatggaaatagaggaattaatgaggcaagcttaggatcttccaatttgctttatttagtgctgaagcttctctctctagagcaatatgtagatgaaaatgaacgagctcatacttttttagctattgaagaaccagaggcacatctacatcctcatctacaaagattactttacaaatatttgttgaatcacgataagataatagttgagggttctcaagagcaacataaaatccatagtgtttctaatattttaacaactcattcaccgcatattgtaagtgttgctccattaaaatctatcgttttattaaaagaaacgcatggagaagataaatctacaaaaatagtctctaccgcaaaaatttctttagatgataaagatttgaaagatttggagcgctacattaatgtcacaagaggggaaattcttttttctaaaggggtaatattagttgaaggagacgctgaagaatttctgttaccttcactgtcagaattgcacggaattgatcttgataaacatggaatcactgtatgctcggtatctggcactaattttcttccatatatcaagcttctgggaagtgaaggattagatattccttttgcaattcttaccgactatgatccaagagatacgttacctctaattcataatcgcttaataaaattattagattttatagatgaggaatatgatcatagcgatttagaaactgaagatctaattatctatggaaaagaatctggtatttttacaaatagccatactttagaggttgatctatttgatacaatgcctgatgaaattacagaaactttaactgaattgacaacaaatagtaaggcaatcagtagagcacaaggctggaagttagcaagtagtattaaaggagatgaaaaaagatatctttccgacatagaaagtattggtaaaggaagatttgctcagagattatcgactaatcttaccaatttatcagttgttcctgagtatgtgaagggagccttagattatgtcatcgctaaagtttga

SEQ ID NO: 78257 - DNA, 1827 bp, Bacillus thuringiensis
atgtcatcgctaaagtttgacaagttactttatagagaagcttctaaagatttatcaaataatgaagcacaactaaaagtttatgattctacagggaattgtgtcgttcttgcgggtccaggtagtggaaagtctaaaattcttacattaaagttagcaagaatcttgaatgaagatatagaagcacctcaaggagttgcttgcttaacttacaataaagaatgtgcaagagaactaaaagagaagctatacaatttaggaatcattgaatcatctacaatttttattgatactgtacattctttttgtttaaatcatgtgattagaccatacaaacatttagtgaacgctaatttaccaaaagaaattaaagttgctacttcaagggaagtaagggaaacaatgcttcgaacattcaacttaactattggacagaatgaacgatatacttcaagctggtcaacagcgtttaatgtttatagaagaacgtttatagataggaaatcacccgaatggaaaactaacgacagcgatatagcagaatggattcttaattacgaaaactcattaagacatcaagggttaattgattatgatgatatggttttgcatgggttgtggatgattgaggaaaatcaatggattcaaggattacttcaagctaagtttcctgttattgcagttgatgagtatcaagatttaggtgcatcattggatagaataataagagttctctgtatagaaaatgacactcgtcttctagcagttggggatcctgatcaatcaatatatgggtttacaggagctcaacctagtttattaaatgaccttgctcaacaatcaggtgtattaaaaattagactaaaaaagaattacagatcaaaggggaatattgttaaggcatcaattgcttcgttattagaagaaagagattttgtttcaaacagagatgaagaaggaagtattaagttttatggtattagggatggtatagatgcgcaatgtgattatatttgcaaagaaataatccctaaaattcttactttagatccttccagtacgcttggggatattggagtattgtacattgataaaaatgatggagatcgaattgctgagaaagtagcaaaagaaggtctacaatatattcgagtggatggaaatgctccttacaataaaaatcagctaactgtgtggatagaaaactgtgcaatgtggtgttctggaggatggttaaagggaagtccccaattttctggaattgagcgtactttcagttcattttttttaaaatcaaatatgtcagaagcaaaactagaaagtaagaaattaaatctattcaattttttatttcgaagcagagatgttgaacttaaactaagtgattggcttgatgaatttaataaaagtattgtttctgaattattagattgttttactgaagagccagatatagtaaaagaatatgataaattaattgaatcggcaaaagatggacaactaaaagactttaaagtatcctctttatctcgccaagtaggatctgaaagtcatttaaatttatatacattgcatagttctaagggattagagtttaagtatgtcattatgtttggtttggagcatggaaggataccttggttgaatgctcgtgaagataagataaatgagtcaaggagattattttacgtaggtctaactagagcaaaagatgaaattcatttattatgttcaggatggtattatgattactatgacaggtatcaaaattatgggccatctaaatttgtcttagaacttaaaaagtttgtagataataatttgtaa

SEQ ID NO: 78258 - DNA, 1803 bp, Stenotrophomonas maltophilia; identical to SEQ ID NO: 71790

SEQ ID NO: 78259 - DNA, 1653 bp, Stenotrophomonas maltophilia; identical to SEQ ID NO: 71791

SEQ ID NO: 78260 - DNA, 1920 bp, Prevotella sp. 109
atgtatctaagtaagatttatataaagaacttccgaggtatcaaagaactattagtgaaattcgataagaaactaaatgtaattataggagccaacggacaattaaagacttctttgatggacgccatcaggttgttttatacgtggggagagccgaaccgagacatagaaataacaaaagaggattttcatgttgaaattacagaaaatccagatgggactaaaacgttaataaactctacgagaatagatatatattatctatttgaagaattatcgacacaacaagaaggtacattctatcagtatttggtttcccaaaacaatggcactacagttgccaggattcatgtaagttttgagatgaatgagaatggaagaatctattcctcatatataacaggtaaagaggagaatggtcttcgtgcagactggaatacgtttcattattttcatccttattatctaggtgcattacgtgacagtacacgtgaccttttgagttcacgtaacaacctgttaggaagagttattaaaagaaaaattgatagggcaggttcagaaaatgacgtaaaaggtatagtagataatgcaaacgagcaacttttgctgagaccagaagtaatagaaacacaaactggcataaacgataacctgaaccagataaacagctcaagccttcaaaatgtagaactgcacatagaacagagcagaattgaatatatcgttaatattatcaaacctttcttaccatattctgctgctgacaagaaaggatttgtactgtctcaaaatagtcttgggtataataacataatttatatagcatctgtattaagtgacattaaggattgtcatattgaagataatgttagtatatacgcattgcttatagaagaaccagaagcccatctacacccacaattacaggtgaatttatataactttcttaaagatgcagatacaaatgaaaatagtcaaacatttatcacgactcattctccgactttgacatcaaggataccattggagaatataatcttgttgaaggataataccactttccttgtcggaaattgtttcaaagaacgacactcagaaaagattgtccgtgatgctgctagtggcagattattgcaggaagaagaagttgtatactatagaaaaatgatatcccggtatttcgatgtaactcgatcacaattgttattttcgtctggctgtttgtttatagagggtatatcagagtgccaattagttgaaactttctctaagctgataaataagtcattgattgcgaatcaaattgaaatagtagatacagacggaacagctttttatcagtttctaatgttgtttaactcttctgactcaacaaagcgtttacctatgaaatcggcatttataacagacgaggatcaatttacagcgtcaaaggataaagaatataatctgaatgaattggtgaaaaacaattatgcaaaacttcatcttcttagagaaggaattaatacaggtagagtgaatggtcgcattaacaatatgacagccatgtccaatcgtcaacctggtattaagatatgctctggaaagaagacactcgaatatcaaatatgtaaagcaaatgtttttgctaataaagaaatgactaaagagacttggctctacgaattgattcagcaaatgaatccaaacggtatggacaaggtagatttttacatgtcaggacttggagatagagatatgaacgaagatgagcagcagaatgttgcactgcttatgtggaaatgtctaccagataaagctgagtttgctcaaactcttaattcgtttctattagataagaaagaagaaggtagtgatataaaattcactttgccaacttatattcaagaagcaataaatcatttaataccatga

SEQ ID NO: 78261 - DNA, 1818 bp, Prevotella sp. 109
atgaattactatataacacatcaacgacaggcatatattgatgcacgtggttatactatactcacggcctgtcctggtagtggcaagacaacaagcattgttaaaaagcttttgactgtatcacatttttgtgaaaagcattatggaagacatacagggtttgtctgtatgtcatttaccaataaagcttgtgatgagttaaagcataaataccaagaaatgcataatgaaaaattgacatttcccaatgaagttttgactattgatagttttattatgcagtatgtagtacttccgttttggtatctatgtgatgcgtgtaaaaagaaaccaatagtagtgaatgaaaaagaaatattagaacgaatctattacagaaaagttttgataaatggtatatggcaacaacatctaattatggcactacgaccctattgtaagatattttataaaaaaaatccgtctttgataactagagaaaaaacttcatttaaatggaatcacgatattgtaacgaataaaaatgaaatagcctattgtaaggaggcatttaaatatcgtttagaaaaaggctttataacaagcagcgatgcgctgtggatagcatgtgatatattgcaacatcatcagaatataggcaaagcacttgtaacgcgtttcccatatatcatagtagatgaagcacaagataattccgaattgcattttgaattcttcaaactgttaaagagagcaggtttgcagaatcttgaatttgttggtgacatttgccagtccatatatggattcaataatgccaggcctgaattactgcagaacatgatgtcagaagaagaatggaacgtattgccattatccgaatgctggcgttctaatcaacgtataatagatttgtatagcaaacttaaatcaactaccgtgcctgctattacttcgcataaagtggaagataaaggaataccaataattgtctataagtatgatgatggaaatgttagggagattattcggaatttctaccacgtttgtgatgataatgatttgtccaaaagaattatattggcacgtggaatagataaatgtaaggaactatctggtgttaatgacgtaaatttcaaatactggaagacagagaaaccgctgccttatttaataatagacgccgtctttgcttttgcttcagatgatatgaattctgctttcagaaaagtaagacttgtattagccgaacttatgattggtgataaccctgataaaaggcgtgagtttatgcacgaaattgaacataatttggactggaatactaagatatttggtttcataaaacaaatcccttcattttcattgagtttcaaagaatggtcagaacagacctgcacattattgaaagaatattggaagcttaaagaaaagcctgtttttgttccatatcaaagacaaaaaggatataaaatgaaagaaatggctaatgtaccagtagaacaatatcatcaatcgaacgacaaaaatagtgaataccacaagagcatagatacgatacatgcagtaaagggagctacctttgatgcggtgcttttgttcctatcatctgatagcagaggacaaagtatttcgttaaacgattttccagataatggaattgaagtcatgacagaaagtcaacgaatgatatatgtggcgtgttctagagccagtcaatttctagcattagctataccaaggtcgataaaagatgaaaaaattaggagagccttgtctggaatcgacatagatattcgtaatattaatctgcaaggagaattgacatttactgattaa

SEQ ID NO: 78262 - DNA, 2148 bp, Lysinibacillus sp. FJAT-14745
atgcatatttcaaaaatgtatttaagaaacttcaggaacttctgttcacagaactttttatttcatccaggagtaaatacgcttataggagaaaacggatcaggaaagacaaatgcattttttgcattacgccttttacttgataataatctaccaattagtgcttctaagctaatagaaaacgattttaatagaaaattatctagatggcaggggcattggataattatatctttacaatttgaagatttagattcaagtgagggggcaaatattttagctcataaactcgaacatgttgatgaagcgtctagcagcggatcttatcatttttattttcgaccgcataaaaaaattagaaaaaaactatacgagctatctcttgatgaagataaggatcagcaaaagcttgaggaaattctaagtgcgataacaataaatgattatgaaggtgtctatcattttcgaggtacagctgatttttctaatgaagcggtgtataaagaattggttggtgactttgaaaatattattttcccaaatcctgatgatgataaaaaggatttactaggcattacatcatcccaaatttttttggtacgatcagaaattgcatgtacgtatattaaggctctccgagatgtaatggcagagttacgtaagagcaaacaaagcccgttattaaatttattaaggggtagtgcaaaaaatattcaagtaactgatgcatcaaatattacaactaaggtaacagaattgaacgaaaatatcagtaatctttcggagataaaagaattggctgaaaaagtgaaaaagacacttgactcaacaattggatttacatatgcaccaaacgtaagtattcgttcagagcttcctgaagatatcaataaactgttccagtcgttaacactatgggttggagatggagaagacacaagccatcaaggcaaactagaagatttaagtttaggtggggcaaatttaatctacataacattaaaactactagaatatgagtacaaacaaccgaccgaagagaaagctgcccattttttattaattgaagaacccgaggcacacattcatactcatatccagaaaacgatgttcgataactacaaatttcaaaacacacaagttattactacaacacattcaactcatatctcttcagcaaataaaataaagtcagtaaatattctatgtaaagagtctaacgaaaccattgtatgtcatccaagcaatggacttgatgataatgagtgcacaaaaattgagcgatatcttgacgctacaagaagtactcttttatttgctaaaggtgtcattttagttgaaggcgatgcagagttagtcctaataccaactcttttcaaaagtgtctttggtttaagccttgatgaaattggtatcagtttaattaatatgaatagcacagtattcgaccatattgctaatctattcgatgataaaagaattagaagacattgtgccatcataacagatcatgatcagtctcttatcccattaaaagaaaataaagacgatgataccgacgaggaaaagaaatcgcggaattctgcaattaaaggggaagaaagaaaacagaaacttaatcaatactgtgttgacaatccgtgggttgaagcgttctatgcagaacatacttttgaagttgatttcgtcctaaacggtaatcgtcgtgagataataagaacactaagtaaaatttataaatcccaaaaatcaattgacacttcaaaggctttattaaagtctaaagatgatataactgttggctgtgaagcacttcgtcttgcggataaggtggtaggaaaaggctggtttgccctaacacttgctgaggagattacttatgaaacatttattccagtatatatattagaagctattgcgtttgcagcagggcatattggctataaacactttgaaaaaatggcgaaataccgagtagagaaccattgtagccatgaagaattgtgcgattttatagatactcttgaaaagttagatgatatagaacgaacttgtattaaaataaaagagttatctaaagattacctggaagataatgacgaccttttgttattaatcgacacttatgaggagtatcacgtatgttaa

SEQ ID NO: 78263 - DNA, 1794 bp, Lysinibacillus sp. FJAT-14745
atgttaattggtttaaattcctatcaattagacgcagtaacaacagataaaaatgcccttgttattgcgtgtcctggaagtggaaaaacacgggtgttaactagcaaaattgcttatgagttagagaagcttgagagtaaaaaaaagtttattgtagcactcacttatactaatagagcagccgaggaaatacaacgacgactagatgaccttggcataccacaagagcagctttgggttggtacaattcattctttttgctaccagtggattattaaaccgtattcagcatatgaaccagcattaataaatggattttctatcatcgatgacaataaaaagttaaagatattaaatgatcttaagaaaaaacattcagtgccctattttaacgatgtcacagtagcgtttaatagggaaggagaatatataaactcggatttttctgcgaacgaagttgccaaagagttccatgatataatcctagaaaacaaggaaatagattttgatttgctactatattattcgtataaactgttaaaaagcaaaaagaaaatacgctcacatctggcgaatctattttcttatgtatttgtagatgagtttcaagatacacaggacctacaatacgctattataggacaagtcattgccgaggcgaacgataagtgtaaattgtttctagtaggggatcctgatcaggcaatatacggctcattaggaggaacatctaaaagtctttatgagatacaagaagaaatcggaaatcaagaagtagtacttaaagagatacctgggaattaccgttcttcccaaagaattgttgatttttttaaaaatttccagtcaacaaaagtaagtattcaggcatgtggtcggtatgcagaagagaatggtttaattacacttaatacaacaacacataaagataatctttctaaagagatagctgatatcataacttacaatttaaataatggtgtaacgccaaacgaaatatgcataatagcaccgcagtggtattttttaactccattggcacaaaagttaaaatccatcttaccagatgttccttttgatgccccaggagtttccccactcccaacaaatagggagaatttctggtggaaattatcaagattatttttatcagaaataacaccaaatacatctatgagtcgttttagatggatgaaacaaattattgatgatttaaacagctacacaaacggttctctagggaacgagtacacagactgtagaagatatcttaagataattaattcgataaaaccgaacgaaacaataggtatattatacttgaaaaaagcgtttatagcatttttcaatatacttgacctggatatctatgattattatgtattaaaagaacaatgggatatattctttgatggaattcaaacaagatatgaatcatctgattttatcggaactcctgatgacattcagtactttaagaatatatttaagccttcaactggtgttgtgataaatacatgtcatggagttaaaggtgaggaatttgaaacggttattgcatttggattactttggggttatgtgcctcactggaattcaataatcaaacaaccatatgatatctctgaatctgcttcgaaaaagctactctacgtgataggatctagggcaaaaaggaatttatatttatttgctgaacaagaaagaaaaacaaaatcaggatataactatcaaattaatgatcaattagcacaagctaactttcaatatgatatattagcaactttcaaataa

SEQ ID NO: 78264 - DNA, 2310 bp, Pseudomonas coronafaciens pv. porri
atgccagaagcgctcgtcaccacgccgatagccggaaacatcacacttcgattcgtagaaatttgtcagttccgtcgacttggtaaggtccaactcgatgtcgacaagaagactactattcttgtcggtgccaacaatagcggcaaaacatcggttcttgcagcgctacgccacttcctttcagatggctctccatttggtgctttcgatatcagtctctcgcagtggccaaagttacgagcgcttggtaaatcttgggaggtgctaaaggaagacccgtcgacagtgaccgggtccgaagagcaatggatgcagcagctcggaatcatccactcggctatgccgacgttggacctctggttcgatgcggaggctggcatgttccactatgtcgccccgtttctctccaagttcagctggaaaggcggagccgttgggttacggttgcgtttggagcccgctgcaagcgctgacgagttgaagcagttggcttgggcatatcacacggcgcgactgccggtgaaggatatgggtgcggattcgcttgcctggcccattgacctcctcgacttttggttgcgcgagccgcacaagttgggtcaagtccgtgcatacaaactggatgccgataacaaccccctggaagggctacagacctatgcgactcagactctgccggcagactccagtccaattgagcgcaaaaatttacagaaactgattcgcgctgacttcgttgccgcgcagcggggtcttggcagtgaggaagctgattctcggtctgcttctggtccccaccgtgtcggtatgttctccaatcaacttctcaagtttgctcgacagcatctaaatgttgctacaacaggtcatgggcatcgcgcagatcttattaaggcggtcgctgaggcgcagcaggcgctggacaagaagattcacgaggcgatcgctccgtcggtggaagaggttaaagagctcgggtatccagggttgcacgatccccaagagattcgcttccgcacgcgcatacagacagctgatttgctcgaccacgggaccgctgttcaatacagcatgcagaaggactcactggaagagcttcttcccgaatactccattgggctcggataccaaaatctccaatcgctcagctatcaactggtttctttcaaagccgcccgactcaagcctgaaaagggcgccccggtacccgttcatctggtattgattgaggagcctgaggcgcatctccatgtccaagtgcagcgcatcttcccagataaagcccacaagctgatcagcccgaacgacaaagacgcatcagggcttaaaagccagttaattattagtactcattccagccatctcgcgcatgcggagagttttgaccgattacggtacgtccgccgcatagcgaagagcgcggaaaatctcatgccgaccaccgaggtggtcaatcttgggcaaattttcggtgatgacaaaaagacccgtcaattcgcagagcggtatttccgcgttcagcatactgaccttttgtttgccaacgctgcaattttcgttgaaggcgttgctgagcgcatgctggtaccgcttttcatcgaacgagatttcaaaatgctcaacagccgctatctgtccttcctggacattggcggtagtcacgctcatcggcttaagccgctcgtggaaaagcttcgtattcccacggtcatcatcaccgacgtcgaccccgttgaagagagagctggcaagccaactaaggatggtgagccgaccaccactctagttgcagtcgctaatactggccaagccgggctgcaatgcgggaacccgactctgcgcggatggcacccgaaactgcaacagctcgaagatttcaagaacccggcagaggtacaacttgtttggaaagaagtcgctgaatgcctagtgcgtttcgcttggcaactgcccgtggctgaagcgggtgaccattggcctagcacctttgaggactctcttattctcaagaacattccttggttcaaaggccttatggatgagaaggtcgacggtgatggcaacaaaacaaagccgccaaaaggcacgcttggctccgtagctcgacgggttgcccaccatggaaatatttcggacttgctcgcagctctgcacaaactcatgcacggctcgttcaaaaaaggagacttcgccgcaagcatctttgagatggtcgcgacggacgaaccaattgcctgtcctaagtacattgcggatgccttggaatggcttcaaacacagctggatcccaacccggaattgatgtcatga

SEQ ID NO: 78265 - DNA, 1950 bp, Pseudomonas coronafaciens pv. porri
atgaccgcggtgccaatccttggcgacaacgaccgcgatgccggcgtagttgaggaaatctgcggctatctcactgaagagccaccgcgtagctatttcctttttgcgggtgccggttccggtaaaacgcgtactctggttgaagttcttcggcggcttaccggcgtcattgagcacgataaaggcgagcagttagcacgacgtctgcgaatgtacgggcgttcgattagggtggtgacatacaccaagaatgccgtctcggtcatcaacggacgcctcggcgacaacgacttagtcagcgtatcgacgatccactcgttttgctgggaactcatcaacgggttcaacgatgacattcgagaggcccttattgccgttaaagaagctcaactcgcgaaagagaccgccgaggcgcaagcgaagccgaaaggcatcacgccagctaaacagagagatcttgacgaaatcaaggatgatatcgaggccttcagagcgaccgatgtgttcatctaccatcccgatcgcaacacgtacggccctggcgcgcttgcacacaactacgtcctcgacgcgacagcgtggctactccgaaataaacctacgctccaaaccattctcaaagatcgtcaccccatagttctcattgatgagtcgcaggacacaatgaaaggcatgctgaacgccttgatggggcttgcagagcagggggtgagcgatttgactcttgggctgctcggtgatcaccgacaacgcatttatgcgcacgggcacgccgatcttccaagtcttgtcccgcagaactgggcaacgccagagttgcagatgaaccatcgcagccagcgccgaatcgtcacgctcattaacaaagtctgggaagctgagcttgaaggtcggacgcaacctacaaacggtgtggagcagtatcctagaactgaaaaggccggaggcgtggttcggctcttcgtgggggatacctcgcgttctcctgaggacaaagtgctcggcgaaggttggtgctcagatcggatgcacgaagctactggggcagccgcctggaatcaaggtcaataccaattgctcgcgctggagcacaagctcgttgctactcgcggctcgtttctcgatgtatatgaggcaatggtcctgctagatcctgacgccgcagcgccttctggcagtggtgataacaaggggccttctgccgtacaggttctcctcaacgagcttgctcaattagaggcgtgcgtaggtatcaacggtgcagtgaacgagttcaaggccacagaggtatttcgtcggtatggaagcctcgacaatatgccggaggagtgtgccgcgcgagcgagtcgcgtggaggagatgctgaaggccatcacagcatttgccaccgcctgcgccaatccgaagtcaactgttgcagaagtgctcgcaccggtcttgggcgcaaatttgtttgaaatcgatcatcgcctctcggaagcttatgccgacaagtcgccacatcttccggcaccgggtcgaggtgaggaggaatccaaacaggccaggatgcgtcgcgggtggtgtgcgctgttcgccgcaccctggaagcaactcaggctgtaccgaacttacctcgcaggggattcagttctcgcaacgcatcaggtggtcaagggttccgagtttatacacgtcatggttgtgatggatgacgcccttgcaggtgggtttcttatttcctacgacaagatttttggtggtgtggagcttagcaagcgggacaaagagaacgtagagctgggcaaagagacgactatcgaccgcaccttgcggctgctttacgtaacctgcagccgcgcgcaggagtcgcttgcccttgtgctctggtcgtccgaccctgcagcggcactggctagaatcaaggagagcaactggtttgccaaaggcgagtttcaggcaatcccatag

SEQ ID NO: 78266 - DNA, 2136 bp, Pseudomonas coronafaciens pv. porri
gtgcatatttcaaggttacagctcgtcaactaccgcaatttcaagtgtgcgaatgtcgtattcaacaagggggtaaacacgatcataggcgagaacggatcaggcaagaccaacctgttccgggcgttgcgtctcttgctcgacgacacgctgctgcgcgcggcatataggctcgacgagaaggacttccaccggggccttggcgactggcgcggtcactgggtagtcattagtctcgagttcgatgaggtatcccaagacgaagcgattcaatccctctttctccatgggaccggtaacatcgccgacggcgcgatcggcaaggcgacctacaaccttatttttcgccccaaggcggcagttcggcggaccctggccgacgttgccgtcggggataccgtaggactcgccgaggcacgttcgaagatcaccatttcggattatgaaacgatcttcaccggcaagagcaccgcaaacttcctcgatcctgaaacctacaggcaactggttggcgacttcgatgcggtaatatttccccaagaactgacgaaccctgctattggaggcgtcatcccgggcatgctctcgatctcgcgcgaagtgtgcttcaccttcgtgcaagcactgcgcgatgtggtcgccgacttccagaacaaccgcaccaaccccctcctaactctgctcaagtgtcgaagcggtgagatcgatccgcagagcttcgagccgatcaccgcgctcgtcaaagggctcaacgatgcaatcgagggcctaccagatgtagaaaccatccgcaccgatatccgcgataccatcaccgatgcggcaggcgaaacctactctccgcgatcgctttcgatccgctcagatctgtccgacgaggccgaccgcctgttccagtcgctcaagctgtttgtgggcgagagcgaggaagaatatgagggcgcgattcacgagttgagcctgggcggtgcaaacctcatctacctgactttgaagctgctcgagttcaaataccagaagcagaaagagtccttcgccaatttcctcgtgatcgaggagccggaggcgcacatccacacccatatccaaaaaacgctgttcgaccggctgaactttgatgacacccagataatttattcgacccattcgacccacatatccgaagtgaacaacgtagtgaacatcaacatcctcggccggcaggacggacgatgcgaggtgtttcagccatctgcgggacttgacgccggccagattggcaatatccagcgctacctcgatgcggtccgcagcaatctgctcttcgccaagagcgtggtcctggtcgagggcgacgccgaggagatcctcatcccaatcctcgttaaaaaagtgttcgggctcagcctggacgagttggggatcagcttgatcaacatccgcagcaccggcttcaagaacgttgcggtgcttttccacaacgagcgcatccgcaagcgctgcgcgatcatcaccgaccttgaccgcgcgtttatcgatacgaccacggacatactagacagtgacgataaggcggccgccaagaagaaagcactggggtcacagatcgctggactccagcgcgaggcagcgctcaaggagttgtgtgccgggaatccctggctgacggcgcacttcgccgaccacacttttgaggtcgatttcgtctccgtcggcaatgtcggcaccgtcgtttcggtgctgggcgacgtctataaggatggcgggaccatcgcgacgtctaagatggagctggaatcgggcgacattgcacttttcgggacgcgcgtgctgacgatggcacgttacgccggaaaggggtggttcgccatcatcctagggcgaatgattacgcctgaaacttccattccggattacatcctcgacgccatcttccatgcgcatatcccggtatccatccagacatgggcgcgtgtgctggactatcgagtctcgatccttgcggcgtcgcaactacacgcgccaggagacatcgacgcgatgcgcgcgcacatcagacgttaccatcgcgccgagatcgactttgcaggtgtccgcgccgaaatgctacaggcctttcctgcagacggcatcaacaccatcctggcggatttctag

SEQ ID NO: 78267 - DNA, 1797 bp, Pseudomonas coronafaciens pv. porri
atgtttgtctgggacaggaaggatctgaacgacgcccaagtcgcagccatcgagcacccaggcagcgtcttcctcgttgcttgcccagggagcggtaaaacgaggaccctcacctacaagatcgcccgactgttgtcggagcttaagtcggacaaaaaacgcgtcgtcgcgatcacctacacgcaccgggctgcggatgagattcaggaacggatagagcagcttggcgtcgatacgagccagctttggattggcacgatccactccttctgtctcgaatggatcttaaagccctatggaatctatcactcggagctcatgcacggtttccgggtgatcaatgcccatgacaccgaacgaatgcacgaggagctctgcagcgcggcgcagggcactaagctcagcagcttcgactgcgcatattatttcacgccgaacggctatgtcctgacatgcaacaagaccaacaaacatgaagcaattggggaagttttgcaggcatattggaaggcgcttcgtgccgagcggcagctcgattttgaactgatccttttctacgcctatcaactcatcgagaataatccgtcgatcagcgtgctgctgggttcgatcttcgaatgcgtgctcctcgatgagtttcaggacacgcgggaaatccaatatacaatcctcgcatcgatcctgaaagcgtctaaaggcggtacgtccgccttcgtcgtaggcgatcctaatcaggcaatctatggctcgcttggcggctatgcgatcacggcgtccgactttgggacgcagtgcggcatcgccttcaaggaaatggagctatcacacaattaccggtcgtcatcgcgcattgtgagctatttcggcaattacaaggtcttgccttcgaagatcgaggcagtgggaaaggacaaggactgcgcgagcgtagtgtcgttcgatcaccagacgcaccgcgatgcgctggaggaagagcttgtaagactcatcagattcaacgtcgaaacgctcgggatcgctcagcatgaggtctgcatcgttgcgccttggtgggtccacctcgcaagcatgacacgccggctggtcgcggcgcttccggcctattcattcgatggcccgggcatggtgcccttcgcgcgcgacgtcgacaatttctggtacaagctcgcccggattattctgacggaggcgtccccacagctttatgtacgccggatgcgatgggcgggagaggtaatcgccgacctcagcgacgcgggcgtagaggttccaggtttggactgcaagacactgctgcgcgcctgcaacgccatcatcatcaccgagaacgacggcctggcgttcctccgagcgttcttcgaccagctatgttccactttcgggatcgatcgccatacctacgcggcgcttcaagagcatcacgacgctttctttgaatcctcgcagaagcgcatcgataagctcatcaaggaaggcgctgaggcgattgctgaattggggatgttcaggaaggtctttgcggaccgaactggtgtgaccgtgtcgacgatccacggggtcaagggcgccgagtatgacgcagtgatcgcctatggcctactagagggaatggttccccacttcagcgatccgaaccaggccgagacagctaagaagctcatgtatgtggtgtcgtcgcgggccagaaaaaacctacatctgatctctgaacgcggtcgcagtcgaggctggagcggagattatcaaccaaccgacgtacttactggatgtgcattccagtacaaccagctttcttga

SEQ ID NO: 78268 - DNA, 2415 bp, Stenotrophomonas maltophilia
atgaagctacaggcttaccggctgcagaactaccgtcgactgcgggacgtcgtcatcgaactagatgacgacatttcgatctttgtcggtgccaacaacagcggcaagacgtccgctgtacaaggcctgtactcgatgctccgcggcgaagcgaagaagtttgaactcttcgacttcagtgcggcgctgtgggccgagatcgacgcggtcggcaggacgcctggtgatgaggatgcgccaaaaaggttaccgtccatcctcttggatctctggttccatgtcggtgaagacgaccttgccactgcaatgtcgctgctgccgagcactgagtgggacggaaagtgcgtcgggatccgggtggcgttcgagcctcgggatgcccacgagctcgtccgaaagttcaatgaactacatgagaaagccaacaacgctgctgtcgcgcttgccgccaagcgcaaatccgccggggaacacgccgtggaggcgggcgctgaagacgcggctgttgtcgtggccgatgccggcgaatacaagccttggccagaaaccctgacgaagtacctcaccaaggagctgggcaaggagtacaccttccgctactacgtgctcgatgagcgggcttttgccggctatcaggcaaaggaggccgactacgagccgctacctctaggcaatgagccgggcggtgcggccattctcaagtcgctggtgagggtcgacttcctgcgcgcgcagcggcacctcgatgacccggatgccggtagctctgatcgcgccgagagtttgtcgcggcgactgagcaagttctatcaccgcaacttggagaagcgtggcgacgaccatgcggctctcaaggcgctcgattcttcggagaaggagctgaacttccatctgaaggaagtcttcagtgacaccctcaaacgcctggccaagctcggctatccgggagtcaacaatcccgagatagtgattcgcgcagccttggatccgaccactgtcctggggcaagacgctaaggttcactacgtgatcccgggcgtagcttccgcccaactgccagacagctacaacggcctggggttcaagaatttggtctacatggtggttgagctgctcgacttgcacgagcagtggaaagccgaggaggacaagcgagctgcgcttcatttggtcttcattgaggaacccgaagcgcatctgcacgcgcagatccagcaggtcttcatcaggaacgttttgcggctcctcgaggatgctaacgatcacgcggattttttccacacgcagctcgtcatcaccacgcactccccacacatcctctatgagcgggggttctcccccattaggtacttccgccgcgtcagcgaccagttggaccatcacacggaagtgcgcaatctgtcgctattcaagacgggcgtggccgacgctccaacgcgcgagttcctgcagcgatatctgaagctgacgcactgcgatctcttcttttccgacgcggtcatcttggtggaaggtaacgtcgagcgcttactcttgcctgccatgatcgagtcggcggccaagcgcctgcgttcttccgccttgaccatccttgaagtcggtggcgccttcgcgcatcggttccgggagctgatcgcctttgttggaatcacgacactggtcatcacagatctagacagcgtgacagtcaagacggacgccgagaaagctgctgcgcaaggggcaggtgttgagggcgccgtcgacggagatgacgaggacgacgacctgaaacccttcgagctagaagacgacgacgaggcagaacctggccgaaagaagaagtccaagaagcgtggcagcacctgccatgcgcatgtagagggtgccgtaacgtctaatcaaaccctcatcagctggatcccgaagaagcggtcggtggcggaactctgggaggtcactgcggagcaaaaaacgctgtcgctggccgagggctccagcgctgagattcgggtagcctatcagacgaaggtttcagtgacggtgggtgcggcgacctcgcagctctgcggccgcacgcttgaggaggcctttggtcttgagaacgccgactggtgccaggctgaggccaaccgggcggtcggcctcaagctcaagcgcgcgccgagcagccccgaggaactagctgagaagctacacgacagggtagtcggcaagaacttcgacaagactcgctttgcgctggaggtcctcgcgagcgggccgctcaatggctggaaggttcccgcgtatatcaccgagggcttggtctggctcgaagccaaagtggcccacgagcttgaggcggacgcggccatcgccacagagctcaccacgattgaaccgactgcatcaggtgttgttgctgtcattgctggcgaggggcagacggcatga

SEQ ID NO: 78269 - DNA, 1932 bp, Stenotrophomonas maltophilia
atgagcaggcgagtcgatagtccggacaccgacgccgaccgagagatccacgcgtgcattgccgcgacgccatcgcgtcccttcgtggtgcgtgccggcgcaggttcgggcaagaccacctcccttatcaaggcgctagactgggtgatgtcggagcatggcgccagcatgcgggcgaagaagcagaaggtcgcgtgcatcacgtatacccagctcgccgccaaagaaattctggcggacgtcaacgaagacccgctggtccatgtctcaaccatccatagcttctactggtccattgcaaagacgtttcaggtcgacatcaaggtttggctgcagaacgacatccgcaggcggatctccacgctggaagaagatctcgagaactacggctcgcgtgttcggaagaccacgcgcgacagaaacaaggccgaccaggagcgctatgcccgaaacctggaggccgtggccaacgtcaagactttcaactacggcgtgggcagtgactacgcgaagggcatcctcggtcacgaggacatccttcagctcaccgatttcctgttgcagaaccgcccgctcttccgacgggttgtagcgctgaactatccattcgtgttcatcgacgagagtcaggacgcgttcccaggagttgtgaaatccttcaaggaagtggaggctcagatgcgaggtaagttctgcctcggtttttttggcgatcctatgcagtcgattttcatgagaggcgcaggggacatcccggtcgaagaccactggcgggccatcacgaaaccggagaactttcgctgcgccaagcagattcttgacgtcgccaacgccgtgcgcgcgcagggcgacggcatggagcaagttcgcgggttgcacgagagggtcggtggggacctcaggccggtggaaggctcggcccgcatgttcgtccttccgaatacgctcaatcgaacgaaagccctgacaagagtccgagcgtggaacgcggcgacgaacaacgacgagggctggacgaccccagacaacggggtcaagattcttgtcatcgtgcaccgcatggccgccaaccggctcggatttggcggtatctactcggcactgaacgataagacgtcggaggccatgaagcaggggatgcaggacggcaccggttggcccgttcgacccttcctcagtttcgccctaccgatcgttgcagccgtgaaggccggcaacgagttcgcagtaatgaacctgctccgagagttcagcccgcgcctggcgcctgacgcactggtcggccgccgtgccgcagatgtgctcagagagctgcacgcagccgttttgagacttgtcgccatgctggatgaggcgctcaccaccgttggcgatattgcccttcatctccgcgacgcgggtcttttcgagttcgatgagcgctatgcgcgcgtgcttgggttcgtcggagatgtttcagaaccagctcaagaggctgaggctgctgacgcaactcccaccgaggggcgatccgcggacgcagcgatggtcaagttcttcaaatgctctgcgcaagaacttcagccctatgaacgatatgtctcagaaggttccccctatgccacgcagcacggtgtgaagggagcccagttcgagcgcgtcatcgtagtgatggacgaggaggagagtgactaccggacctacaactacgagcgtatctttgccagcgctgacgcccgtgcagcagatcgcgcacgagcgcaggatggtgatgacaacacctggagccgaacgctgcgcctactttacgtctgctgtactcgcgcccagcgtggtctggtactgacgttctttgtcgcagacccggcgaccttcttggagaacgtcgtggcaagcgggatcctgccccggagtgcgatattcacacaggacgcgctggttccatctccgtag

SEQ ID NO: 78270 - DNA, 2310 bp, Stenotrophomonas maltophilia
atgccagacgcaggtccagtcattccggtctccggaggcatcacacttcgatttctagagttgtgccagttccgccgcctcggcaaggttcaactggacgtcaacaagaagaccactattctggtcggagcgaacaacagcgggaagacctcggtactcaccgctctccgtcacttcctcgcagaaagttcgtcctttggctcttttgacatcagcctctcgcaatggccaacactgcgagctcttggaaaagtatgggaagccctaccggaagaccccttaaccgtgccaggtgacgaggagcagtggaagcagcagcttcaagctcttctctcgaccatgccaacgctggacctttggttcgatgccgaggcgggcatgtaccactacgtcgcaccgttcctttccaagttcagctggaagggtggtgcagtgggtatccgccttcgcttggaaccagcgtcaaccgttgaagagctaaagcaacttgcctggatataccgcacggcgcgcgggcccgtgaaggaaatgggtgctgactcgttggcttggcccatagaccttttggacttttggctccgtgaaccttcgaaactcggccaggttcgtgcatataaactcgatgcagagaacaacccaataaccggcttcaagacctacgctagccaggcgcttgctgaaaatgccagccgcattgatcggaagcatctgtccaaggtcatccgagtcgactttgttgccgctcagcgtgggctgggcagtgaagaggctgagtcgcggtcggcatccgggccgcatcgagttggcatgttctccaaccaactcctcaagtttgcccgtcagcacttgaacgtcgccagtactgggcatggtcaccgcgcggacctcgtcaaagcggtggcagaggcgcaaagagaccttgacaagaagattcacgaggccattgccgattcggttgaggaggtgaagcagctcggctatccgggtctgcatgatccccaggaaattcgttttcgcacgcgcatccagacggctgacctgctagaccatggaactgcggtgcagtacagcatgcagaaggattcgcttgaagaactccttcctgaacactccatcggactcggctaccagaacctccagtccctcagttatcagttggtgtcattcaaagctgctaggctaaagcccgacaaaggatctcctgcgcccgttcaccttgtgatgattgaagagcctgaggcgcaccttcatgtccaagtgcagcgtatctttcccgacaaggcacacaagctcataagcccgacgggagcagacgcctcagcgctcaagagccagttgctgatcagcacccactcgagccatctcgcgcacgctgaggactttgaccgcctgcggtatgtacgccgcgttgcaaagagcgcggcaagcccaatgccaaccactgaagtagtcaatctcgggcaggtctttggtgatgacaagaagacacgtcagttcgcagagcgatacttccgtgtccaacacaccgacctgctattcgccaatgcggccatcttcgtggaaggcgttgctgagcgcatgctcatccctcttttcatggagcgagatttcaaggagctgaacagtcgatatgtgtccttccttgatatcggagggagtcatgcccaccgactcaagccactcgtcgagaagctgcggatccctactgtcatcatcaccgacgtcgacccttgcgaggaacaggtcggcaaacccaagaagaacggcgagccaaccaagaggctggtcgcggtcgcaaacaccggtcaagctggtctccattgcggcaatccgacgctccgtgggtggcacccaaggcttcagatgctcgatgatttgaagaatccgaccgacgctcagttggtatggggtgaggccgcagcgggcctcgtgcgattcgcttggcagctgccagttgctgaagctaacggcagctggcccagctcctttgaagattccctcgttcttacaaacatgccttggttcaaggcgctcatggaaggcaaggccgatgatgatggcgttgagattgagccaccgactggcgcgcttggatctgtggcaagagccgcggccgaagctggaagcgttgcagagatggtcaacgcactccatacggtaatgcatggctcgctacgaaagggcgagtttgctgcaagcatcttcgagcagctttcttctgatgaaccagttgtctgcccgaagtacatcgccgatgccctggcttggttacaggcgcagcttgagcccagcaaggaaccgatgacatga

SEQ ID NO: 78271 - DNA, 1974 bp, Stenotrophomonas maltophilia
atgagcgcgctcgccgtccctggcaacaacgagcgtgatgacggggttgtcgatgaaatctgcggctatctcactgaggagccgcctcgcagctacttcctctttgccggcgcggggtccggaaagacgcgcacattggtcgaggtgctgcgtcgaatgaccggcgttgtggagcatgaaaaaggggggcgactcgcccgacgactgcagatctatggccgttcgatacgcgtggtcacatacacaaagaacgctgtcgcggtcatcaaaggtcgccttggagacaacgacttggtggatgtctccacaatccacgcgttctgttgggaactcattagcggatttaacgacgacatccgagaagccctcgtcgccatcaagcaagctcagctggaaaaggaaactgcagaggcggttgccaagcctagagggatcactgcagcgaagcagcgggacttggatgagataaaggcggacatcgaggcatttcggctgacggatgtgttcatctacaacccggaccgcgagacgcatggtgccggcgcgctcgcccacaaacatgtgctggacgcgacggcgtggctgctgcagcacaagtctacgctgcagaccattctgaaggaccgccaccccatcattcttatcgatgagtctcaagacaccatgaagggtatcttggacgccttgatgagcttcgcggagccgaggggtttcggcctcactctggggctgcttggcgaccatcggcagcgcatatacacggatggtcactcggatcttccgagtctagtcccagtgagctgggcgacgccagagctgaaaatgaatcatcgcagtcaacgtcgaatcgtcacgctcatcaacagaatatgggaggcagagatcgatggcagaacgcagcctgccaacggcgtcgagcagcatccgcgaactgaaaaggccggcggagtggtccgactctttgttggcgacacatcgctctcgccggaggagaaggttgcaagcgagcggtggtgcgcagaccagatgcggcaagccagcggttccgatgcttggagccaaggtcactatcagctgctcgctctagagcacaagcttgtcgcaactcgcggcgcgttcctcgacgcgtacagtgcaatggttctgatcgacccaaattcggccgcgcctacgggaagcggcgagaacaaggggcctactgctgtgcaggtgcttttgaatgagcttgcgcagttggaggcctgtgttggccccgatggtgccataaacgagcttatggccaccgaagtccttcgctgcttcggtcgtctcgataacatgccagaacaagcggccgagcgtgctaggcgttccgacgagatgcttcgagccatttccgcctttgctactgcctgtcagaatcctggcgccactgttgaacaagttctcacgccgatactgggcgcgaatctgttcgaggtcgatcatcgacttctagatgcattttccgacaagtctcctgctccacctgctccggccagaggagaggaggagtccaagaaggaccgcatacgtcgggggtggtgtgcgctgttcgacactccttggagtcagttgcagaagtatcgcacctacctcgctggaaattctgtgcttgccacccaccaggtggtcaaaggctcggagtttgctcacgttatggttgtgatggacgataagctggctggtggaaaccaaatttcatacgacaagatttttggaggggtccagctcagtaaatcggactgggacaatgttgggaaaggaaaggaaacgaccatcgatcgtaccttgcgcctcctatatgtcacctgcagtcgtgctaaggagtcgctggccctcgtcctatggtcctccgccccttcagtcgcgctaaatagagtcactgcgagcgattggttctcggagggtgagtttttagcgattccgtggcccatcacaaagtcccattcgtga

SEQ ID NO: 78272 - DNA, 2112 bp, Enterobacter cloacae subsp. cloacae
atgtatattaagaaattagccatcagaaattataaaaactttcgaagctcgaatttctattttgttaaagattccgttaatacaatcattggagaaaacgcctcagggaaaaccaatttattcaatgccatgcgattgattctggatgattctcttccaatgaattcacgaatactattgaatgaagatttttatcatgggctaaatgaacctttcgggcactggatcgttattacattatattttgatgacttaagtgagtctgaagaagaacaggtgatcgcaaactatacaataaatgatggtaatgaaaaggctactaaagaagggaactatacatttatatatcgcccaagataccatattcgacaaaagttgtttgaattaacgtccgattacgggagtatccaatccagaaaggatgcctttgaagaattaaaatcaaatcatataatatctaaagaaacatacgaggcaattgcatttgttagaacaaaaattgattttaatgatgacgaaacgtatataaaagtagttggtgatttcagtaattatgttttctcaaatccaaaggaagatgatgcagcggtgataggtgtaaaaaaaccgccgtatttcgccttgggtagtgaggttgcttgtacatatgtcaaagcgcttagaaatgtggttgcagatttaaaatattataagaccaaccctctctataaattacttaccttgaaaagtaaacaaatagatgacagaaaagatattgttgataatgtaaaagaaattaatgaaaaaatctcagctataccagaaattgaaaggctaagtaataaaatatctacatctttactcaacacggtaggttcaacctattcacctaagatattagtttcatcacaactacctgaagactttactgaactaattcaatcacttggattggtggttgaggattctttagactatgatggttcaggtagaatcgatgatttgagtcttggtggtgcaaatttgatttatcttgctttaaaactatatgaatatgaagaaatcagggatagcgaagaacatataacacattttttgttgattgaagagccagaagcacatattcataatcatattcagaagacacttttcgataattttaattttaaaaacacacaagtatttgtatcaacgcattcgactcaaatcagctctgtatctaagatatcttcaatgaatatattagctcgccaatgtggctacactgatgtatatcatccctcactgggcttaacaccgaaagagatttcttctatagagcggtaccttgatgccattcgaagtgatctattgttcgctaaaagtgtcattctcgtagaaggtgatgctgagcttattcttatacccgcaatgataaaagaaactttgggtattagcttagatgagttagggataagtctcattaaagtggatggaactgttttcaaacatgtttctaatctttttcacgaaaaacgtttgaaaagaaagtgtgctattctgacagatcttgattcggcttatgttagtgtcgctgacgatgagtttgatgataagttcgttcaatctttagaggctgctgaagatgatggtttacgaagaaaagatgaattagacagttatatcgaaggtaatgaatttgtttcggtatattatgctgaaaatacctttgaaacagaactggttcgatacgatgataacaaagacttgtttattaaagtgatgaggactaattacgaaaaggacgcctattttaaaaaggctgaatctgatgtaaattcatcagaccacaggattcgatatcgaagggttctaaagtttgcaaaaaaaataggtaagggctggttagctacagaaatgatagaacaccttagtgttgataaccgtgttcctgattatatattacaggctattaagtttgtcattcgtgatagaaacgtcgaactaatatatcaaaaaatgcttgattataatatgtctttgatgggagctaaagaatttgattgcataaatgaagaaaatagttttacaagcaaaatgacggaatataagaaacacttcaatgatagctttgtaagattattggagctataa

SEQ ID NO: 78273 - DNA, 1752 bp, Enterobacter cloacae subsp. cloacae
atgccatatagagacttaacttcagagcaaatggatgctgtagaatttaacgataatttattattaacagcatgtccaggatcaggtaaaactaaaacattagtttctaaactttgttatattttggaaaacaaagaatttttaggtataggtaagaaaaaagtagtagccctgacatatactaatgttgcagcagataccattcttgaaagaataatgtcatttggtataaatagtgattcattatggattggcactatacatagcttttgtctaaattggattataaaacccaacatagatagaattcctaggctttgtaaaggctttaatataattgatgagcacgaaaaagagtttctattaaatgatttaaaggaacaatatgatttatccccttatgataaaattgatacaattttagatttcaattttacacccatatattgtcgtgatattcctgagtataatgtagtgaaagcatatcatgcgtatttatatgagaacagattaatcgacttcgatcttattttgaacttaacatgtaatttattatcaaaatatgatgtactttgtgaacgtttatctttacttatgggatatattttagttgatgagtatcaagatacttctcttgtacagtatgagatcttaaggttaatagtatcaaagaaaaatactgtggttacctttattggggataaagaacaagctatatatacaggattgggagcagttgtaaaaaataagaatcaactacaagattattttgaccttaaagaattgactgaaatgaggctgacaggctgttttcgtagtagtcaattaattattgatttttacaaaaagtacaaggatgatgtttatcatataaattcagtttcagaaattaaagaatttccttctgtgatactaaaagaaaagaatgttgatataacacaactttctatttatgttgctggtataattaaaactcatttggaacaaggcattcatccaggtgagattgctgtattgtgtccaagctggtttgatgtaataaaactatcgaatgagattgtatcttcaaatcctgagattgaaatcgacggagttatgatatcaccaatacctaaaaacaatgaaaacttgtggcttaatcttatcaagcttattttaattaaaaaaaacccatctaattacatcgttagacaaaaattatttcgtgatttattagtggagctaaaaacgttagctccaaatatcgaagcagaatcgcctaagaaaatattaaaagaagtaaataaaatagcattttcattaaattatgattgccatattgagatttggttaaacgaactcatcacacgcttctgtgattttatagaattagatatgagtaatgatagttatccctataaggaaatggtttctttagttaatgccactaaaaaaagaatggataaatataatatgaactataaagcaaatgatcttcactctttttttaattttaaaagcggggtaaaaataaccacctgtcattctacgaaaggtgatgagtatgaggttgttatttgcacgggcttattgaacggaaaaataccgaactggaatgatattatagaatgtagtgcagagcatcaaaattatgttgctcgtagactattgtatgttattgcatcgcgtgcaaagaaacatttatatatgatatctgaaacaggtcataaaactcaaaaaggttatccatacaagatcactccgcaactttaa

SEQ ID NO: 78274 - DNA, 2112 bp, Enterobacter cloacae subsp. cloacae; identical to SEQ ID NO: 78272

SEQ ID NO: 78275 - DNA, 1752 bp, Enterobacter cloacae subsp. cloacae; identical to SEQ ID NO: 78273

SEQ ID NO: 78276 - DNA, 1221 bp, Acinetobacter sp. C15
ttgaatgggctaggtttcagaaggttaatttctattactttaacattgatagattttcgtgaaacttggttacggaagaataaattagatcaagagcctatagagcctttacatttagttcttattgaagaaccagaagctcatttacatgcccaagtacagcaagtctttataaagaaagcatatgagaccttgtgtctaggtcaacctagtcattgtgaaacacaattattggtaagtacccattcaagttatttagctcgagaactagacttttcaaatctgcgttactttaagaggaaaaatagtgatgcgataccacatgcagaagtagtagatctttctagaacttttgataaaaattcatcacagaatgagaagtttgtaactcgatatattagaactactcattgcgatttattttttgcaaatggagttatcttagtcgaaggcgatgctgaaaggttattattaccacatttcatcaagaatcactttcctaaacttaatagcagttatatttctatactctcagttgggggagcgcatgcacatcgattaaaaaatttaattgaaaaacttgccttaccgtgtttgattattacagatctagattcagttgcaatggaaattcagacggatgaagatgggaatattaaaatgaataataatactgaaaaagtaaaatataaaaagtgtgtacctttgcttaatgcaaatcaattaacaaataatgatactttaaaaacatggtttcctatcaagcagaaaattgatgatttgttaagtttaaaatatgaaaataaaactaatggtaatataagagtaagttatcagactcaagtttctttgaattttaaagatgaaaataaaatagtatttccttacacgtttgaggagtctatttattttgaaaatagaacttggatcaacactatttttaaaaagaatgttgataaagatgatcctcgtataaaagcgactggcgttttgttaaaaatgatgaaagctgaagattgtgaggattttaatgattttagacaaagtatttttttagccttagaaagcaataaagttgatatggctatggatttaatttatggtctggagccaaaggatttaaaaacaccaacatatatttatgagggactaacttggctagaaaataaaatattaggtattgatgatttagcacaaggagagactaatgaaatctgttaa

SEQ ID NO: 78277 - DNA, 456 bp, Acinetobacter sp. C15
atgaaatctgttaattctttagttttagaagatttaatatttgattatgtatcttcatctccaccacaaagtttcattctatatgcaggtgcaggtgcaggaaaaacccatacattacatcaagtattaaataaaataaaggaagatattcttttatctcttggtcgagaaaataaaaagcttgctgttataacatatacaaatgctgcctgtgatgaaattaaagagcgagtgaattttgataataatttttttgtcagtacaatacatagctttgcgtggagtttaatatcacccttcacaaaggagattaaagaaattattaaagagaatctaaaggaaattattaatgaagaagaaaagaaattaaaaaaatctagagatttaaataataaaactagtatcggtcgacaagagagaattaggaagtctttaaaaagattgtcttcattagag

SEQ ID NO: 78278 - DNA, 2040 bp, Clostridium botulinum
ttgtatatatcaaagttagaaattaataattttagatgttatgaagatgtagatatagaatttaatgaggggttaaatataattattggagagaataattgcggaaagacaactataatgagggcgctggaatatatatttaatcgttcaagagttagtacacctgatactaatgatttcaataaagaactagttaataaagctctagaaataggtgaacaaccaccagagataacaataattgcaactctcaagtcgtcaagcagtgataaactagaagataaagcagttgtagctagctggcttacaaagttagaaacaccgtgggaagctacgcttacatataaattttttctaccagaaagcgatattaaggaatacaaagaggaaataaaaagtattaagaaatctcaaaagaattatattcagaaaagatggaatatctttgaaaaatatttaaaaaagtatgtttcaaggatatatggagggaatagtgaaagtaaaaataaggtggaaagtgaatacttaaataaatttcattgcgagttacttgatgcattacgagatgtagaaagtaaaatgtttacgggaaaaaatgctttgttaaaagaagttttaggatattttaaggattcacatatagaaattgaagatggagatgaattttcagaagaagataaaaagaaactaattgagaaagaaaaaaaggatagaaaaaaagagtttgatgaatatgctgataagattgtaaaaaacattagtaagagagtagggaataacgatgttttagacttcgcagagaaaacaggtgcttccatagggggtattccaactttaggaggaaatctagaagaaaatgatgtattatctgtattgaaattaatgattaaaaataagacaggaattgaagtacctattattaataatgggatggggtataataatttaatttatatatcactattactatcaaagttcaaaatgattacttcggatgaatatggtgagaatgctaaagtattcccagtattattggttgaagaaccagaggcacatctccatcctgcgttgcaatacaactttttaaaattcttaaaagatgaagttagtaatcaaaaaataagtagacaaatatttataacaactcactcaacacatataacagcagcagtaggattagaccaaataatatgtatggagagagatgaatcaggtaatacaactgctagatatccaggtaaggttttttctgattctgataaagaagatataaaatcaaaaaaatatgttgaacgctatttagatgctacaaaatccacaatgttatttgctaaatcagttctttttggggaaggacttgcagaacaaatattattgccagtgttagcagagcaagttgatagaagttttgataaaaaccatgttgctatggtaagagttgatggtgtaacattcaaacactttattaaattatttggagctggaataaaaaaacataatttgaaatatgcattaacaaaaagagtagcctgtataaatgattcagacccacaaaaaattattaaggaaaaagaagagggcaagacaagacgttggaaaaaatgttggccttttgaaattgatttagatacagagcattacgattataaggcattttcgggaacaattaagaatttgttggaggatgtaaaggaatgcaaaaatgtaaatgttttttataacatcacggaaaaaggaaagacgttagaatatgatattgcacttgaaaattatgatagtgatgatttttttaatgataagattgaaattatggactttcaagaattgaataaaagttcttggaaaaaagaagagaaagtaaaagctaagaaagcagcatcatatttaaactatgcacaagatactaaaggggaagctgcatttgaattagccgagaaaattagaagtgaggaaataaatattaaattaccgaatcatatccaaaaagcatttaactgggtgtgctacatggatgatgaggaggtaaaagaggatgagtaa

SEQ ID NO: 78279 - DNA, 1782 bp, Clostridium botulinum; identical to SEQ ID NO: 71773

SEQ ID NO: 78280 - DNA, 2334 bp, Burkholderia pseudomallei
atggacccggcgtcgagttccgccccaagtgcactggcagtgccgcccgccgaaacagtagcgcttccgggcgattcaccgatccggcttgcttgcgtcgaagtctgcaatttccgacgcttggcaaagacccgccttgagctcgatgatgccaccactatcctggtgggcgccaacaacagcggcaagacatctcttctcactgttcttcgcaacttcctcagcgactcgccaggcttccgcgctttcgacattagtctctcgcagtgggcgaaattgcggcaactgagcgaactctgggaggcgctggacgaggaccccacgacggagtcaaaggatgcggaaaaatgggaggagcagtatcggcagcttctaggttgtatgccgttcattgatctttggttcgacgctaaggaaggcgcgtacaactatgttgcccccttcattacatcgctgaaatggcatggcggtgcagttggcgtgcgggtacgactcgaacctgtggcagacgcagatgagttgcggaagctggcttggcgctaccgagaagcgcgctccccagtgcggaagcttccgaaggatggccacgcgtggccgatggatctgcttgattactggttgaggtactccgcggacctgcgccgcattgccgcttaccgcctcgaccctgcgaaggggcccttggcaacgacgccgtgcggtgacctacaagaactgccgcccgcttcgcagccggtggaactgcaacttctgcgcaagctcgtccgtgtggattttgtgccggcgcaacgggggcttggtgcggaggacgacgagacgagatccgagtcggcgagcacgcgtcccgggctgttctcaagccagcttctgaaatttgcccggcaacacctgaacgttgcaccatccggccatggtaatcgcgaggatctggtggcagctatcgcaagggctcaagcagagcttgacgattcgatttacaaggcgctccgaccggcgatggaggacgtggaagttctagggtatccgggactgcatgacccgcaacagcttcacttccgtacccgcattcagactgccgaccttctcgcacacagcaccgcggtccagtatcgcctggacgagacggcggtcgacgagtcgttgccggagcattctattggccttggctatcagaatttgcagtcgctgagcttcatgctcgtgtcctttcgagccgcgcgcctcaatcccccgcagggctctccagcggcggttcaccttgtaatggtagaggaacccgaagcccatttgcacgtgcaggttcaacgcaacttttcgtcgaatgctcacgaactcatccgcccaaaggagcccgtgcatagcaatcttcgcagccaattgctcatcagcacgcactcaagccatctagcccacggggacagtttcacacgtctgcgatatgtaaaacggatagcaagtaccggggcgggcgttagacccagtagcgaggtcgtcaatctcggcgacgcctttggcgacgacatccaaaccaggacgttcgccgagcgctactttcaggtccaacacacggacctcctcttcgcggacgctgccatttttgtggagggcactgcagagcgcatgctggtgccgctttttatcgagcgcgacttccccgagcttgccaaaaagtacgtatcgttccttgatatcgggggcagtcacgcgcaccgcctcaggccgctggtagagcggctggggattccaacggctgttatcaccgacttggaccccgtggtgccgaccacgaacaaaggcgggcgtgttgtgcgagcggcggtacatatcgcaggccaagcagacctcgagtgcgggaatgacacgctgacctcgtggcacccgaaactggcggatttccacgcttatgggaagccaacgcccgcgcacttggagtgggtctccagctcgggtgtaaaagtccgcttcgcgtggcagcttcccattaccgcagcgagcgatcaatggcctagctcgttcgaggatgcactcgtcctgaccaacatcgattggtttaaagcgttggaagaagagaaggattccgtgtccggcaagaagaaggatcaccgaggcactctcggcaaggtgataggtctcgtgctcgaccactccgaccatacggagcttcttaaggaacttcacgcgatgctgcacgggaacttcagcaagggcgatttcgcggcaacactgtttgaacggttgaacgctgggcaagccttggcatgtcctacatacatcgctgacgcactcgcctggctgagtggtcaacttgacgtcacagccggagagaccgcgtga

SEQ ID NO: 78281 - DNA, 1956 bp, Burkholderia pseudomallei
gtgagcgccgcaccggaatccctcggaaacgaccgcgatgctcacgtagtcgaagaaatctgcggttacgttacggcgactccacctcgcagctttttcttgttcgctggcgccgggtcggggaagacccgaacgttggttgaagttttgcgccgaatcacaggagtagtgaagcatgacgcgggtgaccactacgcagcgcggcttcggtcgcgtgggcaatcggtgcgcgtcatcacgtataccaacaacgctaccactgtcgtcaacggccgactcggcgagaattacctgactgcggtgtcgaccatccacgccttctgctgggaactcatcaagggtttcgacgaagatatccgagatgccctgctcgctcgcaatgccgagagccttgcgactgccaaggccaaggcattaagcaaggcaaagggggaatctgatagggaccgggagaagtacgcagagatcgaagcgaaggctgaagaaatccggaaaatcgatgcatttatctatcatccggaccgcaacacctacgggcaaggcgcgctctcgcacaccgacgttctacatgtgacagcttggctcattcgtgagcgaccaacgttgcagcgcatccttgaggaccgacaccctctcatcctcatcgatgaatcgcaggacacgatgaaaagtgtacttgacgcgttgttcgagctctcgatgagccgtcccggacacattacgctcggactcttgggcgatcatcggcagcggatttatcccgacgggcacgacgatctgccctcgcacgtacccgaggactgggcacgcccggcgctgcagatgaaccatcgcagtcagcaacgcatcgtcgagctcattaacaaaatctgggacgcggatattgaaggccgtactcagccaaagactggcgtgcctcagcattcccggacggagaaaaacggcggaacggtgcgccttttcgttggcgataccaagacgagcacggacgagaagattaggagggagtcggattgcgcccgcgccatggctgcggagactggctgcgcagcctggcaagatggcacacgaggctataagacgctagcgcttgagcacaaactggccgccaagcgaggcaactttttcgatgcgtacagcgcaatggacttgctggacaaagacgcagcgatgcctaagagcaacggtgagcggaccggtcctgccatggttcggccgctgcttggcccaatgctcgaactcgccgagtgtgtgcaagcagacggttcgctgaacgagtttgccgctgttgacgtgctacgccggcacggaaccctcgcaaagctgccggaggccgacgctgagcgtcaagctgccttggataagctccatgcggcagtcgtgaagttcgcgggcgccatctccatgccggaagcgacggtccgagatgtattggcgccgatcctagaaggaggggtattcgatgcggacccccgtctagtccaggcatacggcgatacctcgcctccacccccagaaccaaaacccagaagcaaggaagcaaaggaggatcggcgcaggcgcggatggtgcgctctcttccgcacgccttggcaacagattgctcggtatcgcgcctatcttagcggagacgcggaactcgcgactcatcaagtcgtcaagggctccgagttcaagcacgtgatggtcgtcatggacgatgaggaagctggtggctcgcttttctcgtacgataagcttttcggtgccgaggagttgagttcgaacgaccgcgagaatgtcgacgagggaaacgagaccatcatcgatcggactctgcgacttctttacgtcacctgtagccgagcagaggaaagcctcgcgctagttctgtgggcaaagagcccgactgcggcgcttgacgcaatcaaacggtcggaatggtttgccgctaatgaggtgtccgctttggagtag

SEQ ID NO: 78282 - DNA, 1968 bp, Sphingopyxis sp. 113P3
atgtttattgagcgactcagtctcacgaatttccgttgcttcggacctaacgagacaagcgtcgacctcacatccgaccttaccacatttgtcggcatcaatggcgcggggaagacggccctgatgcaggctctgcagcgcctcttcggtgtgaccggcgatcagcgaagcctacggcgccaggatttccatgtaccttccaccgagcttgtcgcgccccttcagcgaaacttcgtgctggaggcgatcattgcttttccggaactggacgcggacggagccggcggcgcggcgattccggaattcttccaccagatggctgctgacgaggcgggcaagctaaaatgccgcctgcgtcttgaggcgacctggaccgatgacggttcgctcgatggagtgattgaacagaaatattgggcggtcaggactttcgggccattcaacgacaccgattgcaccgagcttaaagcgggcgaccgcgcccgcatccagatgatttacgtgccggcgacgcgggacggggcctcccaggtgactgcctttttgcgcggcaggctgtggcgcgccatcaactggtcgcagggagtccgcgacacgttcgcagacgccggcactgccttgaacggcgctttcgccggagagccggccgtcgatgtgattgccgcagcggtgacccggcggtggcaggaagtttacacagccgggaccgacacgacgccggtcttccgcccgctcgatctgcgttttgagcatttcatccggaaggtagaggtagtcttccgccccgacgaggccggccgggagcgagccctcgatgacctgagcgacggccagcggtcgctcttccatttggcgatgaccgcggcgacactggaggtggaagccgggatcgtcgccgatcctgctggggccggtttccaagctggcggcgttccgctgccggctctcacgctgattgcgatcgaggagcccgagaacaaccttgctcccttttatctctcccgcatcatccgccagattcaggatctgacgaaggctccgcaggcgcaggccgtggtctccagtcattcgccaagcatcctcgcccgggtggatccgacgcaggtccgctacttccggctcgatccgaacgatcaaacggcccgcattcgcccgatcagcctccccgttggcgaggaagaggcatcgaaattcatacgcgaggcagtgcggacctatcccgagctctatttcgcgcgcttcgtcgtcctgggagaaggtgcgtccgaggaggtcgttcttccccgcatcgccgaagcgatgggtctcgacatcgatcgatctttcgtcgcggtcgttccgttgggcggtcgccatgtgaaccacctctggcgactgctgaccgatctcgacattccctacgcgacgctgctggatctcgactggggccgagccggtggcggatgggggcgtatcaagacggcgtgtacgcaattgctcgcaaacaacgtcgcgcctcaggctattttcggacagcacctcagtccacagggtccggccgccaacctgttggcctttgacgctctgccgccagcggattttgcgcacattacgcagtgggtgcagtggctgcgccaattcaacgtcttcttctgcacacccctcgacctcgactattcgatgctgaaggccctcccgctcgcctaccaaatcgtcgaacccggccgccaagggccctcgcctgcaggggagccgcgcacggcggttctcggtgacgacggtttgcctcacctttacgctgccgaccaggacgttttgatgcgttggtatcgctatctgttcctggggcgcggcaagcctagcacccacgttcgggtgttgagtgcacaagaccctgctgccctcgcagctgccgctcccgaagaactgggcgcactcctgacctcgattgtcgctcgtcttaccccaccgccttccgcgagtgcctga

SEQ ID NO: 78283 - DNA, 1884 bp, Sphingopyxis sp. 113P3
atgcgccttattcgacgagaggactggcgccccagcggcattaacgatctcgaaccggcggcgtggaacgccctccgccacgccggctcagcgtgcgtggtcgcaggccctggcgccggcaagaccgagtttctggctcaacgcgccaactatctgcttgagacgggcctctgccgggcgccgcaccgcgtactggcgatttcattcaaaacagatgcagccaacaatctcgcgtcgcgcgtccgccagcggtgcccgccagagttcgccaatcggttcgtgtcggtcaccttcgacgccttcaccaaaagcctggttgatcgcttcctaaacgccattcccaccgactggcgcccgacccggccctacgaaatcgccttcccaaagcacaaggcgatagatggcttcctgacgctcacccggctcagtgcaccgcaggaatggcaggccgagatcgccggctacagcgcgagcgacttcgaacccaagatcgtcggcagttatcgcctacccataggacccatcgtgccccagaacgccgccgggttcgccattgctcgctggtgggccacgcaactgcaggcgggccagccctctacacttacattcgtcggcatcaaccggctcgccgaactgctgctccggaccaatccccacatccgtcgtgcgcttgctgccacctatccttttgttttcgtagatgagtttcaggacacaacctacgcgcaatacgatttcctgctctcgaccttcttgggcggacagacgatcatcaccggcgtcggtgacgacaagcagcggatcatggtcttcgctggcgcgcgccaggacgcttttcagcggctgcaggctgatttcgggggagcccgcttccctctcctcttcaatttccgttcctcgcccgacttggtcgctatccagcacgtcgtcgcgcgcgccctcgatccgaacaccgccccaacggtcgctcagaccgcgcgccaagtcgatggcgacgtagctcaggtctggaccagccaaaccaaagcggcggaagccacccacttggcgcaatggatcgccaacgacatggccacccgcggccgagcgccgcgcgactatgcgctcctcgtgaagcagaaatccgatgattatgagcacgaactcagtgaagccttcgccgctcacggtctgcggatccgtaacgagagccatgctcttggaaaaacctcgctccaggatttgctttccgatgacataagccagctcgcgatcgcggttttccgcctcggcgcgacacgtcgtgcgccgaccgcatggcagttggtctcgtcttcggtcctggcgctgcgcgccatcgggcaagacgatgatgcgcgcgcggccaaagtcgaggtggaactcagcgcgtttcttactgccttgcgcaccgacatggcggccaccgccccgtcgcggcagagcggcgccgatttcgtcagacgagttttcgaatatctggatctcggggcaatcgcccgcacctatcccgaatatggcgttggcgacctgcttcagatcatccttgaagctttttgcatccacttcttcgcttccgccgatggcgcccagaactggacggcctgcctagatgcgttcgagggagtcaatcagattccgctgatgaccgtccataagagtaaggggctcgaatacgacaccatcatcttcgttggcctcgacgaccgggcgtggtgggcccacactcccggcgaccccgaaggcgtcgccgcatttttcgtcgccctctcgcgggcgagacaacgtgcaatcttcgccttctgccaacaacgcggagagcgaaataacgtagctgaactctatcatcttctgactgaagcgggcgtgccagagatcccaatataa

SEQ ID NO: 78284 - DNA, 2004 bp, Streptomyces sp. NRRL F-4711
atgcagctgacccatgccaacgtgatcaatttccgcgccctggacaaggccgacgtgcggatcgatcaccaaaccacgctcatcgtgggacgcaacaacagcggcaagacatcgttcgtcaacctcttcgagaagttcttcggtgacgacgacacacgcttcgtgctggaggacttctccacctgccggatccccgacatcgagcaggcacttcagatcttcggtgaagcacagaggcatgcggccgaaggcgatcaggagacgcgggagggcctgctggccaaggcgtacgagctcgtgccgtccatccggctgggactcacgatcgagtacgccgaggacgatgacctcgctccgctcacagacgtgatcctggacctcgacgactcctgcttcacggtcaagatcgaagcggcgctggaggcagcacggccgcgcgacctgctcaaggacttctggactgcgagtcagaggccgaaattcgagcccattaagtggttgcgcaagaacttcacggactacttcgcccccgtctttcgagcagtgagcccgatcgacgagacggtgacgaaggagatcaagcgcagtgccgcgcaagcgatcgtctcggtcaagttcgtctacgcgcagaccaaggtcgacgacaccccaggagacaaggcccgcacgctttccaagacgttcgagacttattacaaggtcaagagcgggcctgaggggcgtcatcagagcatcgagcagatcgaggatgccctggccgcagcgtcgctggagctcgacaccagctacaaatcgctgttcgacccggtgttcgaggacctgcgtagcttcggggttgggacgatcgcacctgtcgaaaagccccgcatcgtgtccctcatggagggctcgggcatcctcaggggcagcacgcggctccagtatccgtctggagacggcgacttccaccttcccgaaggccacaatgggctcggctacagcaagctgatcttcacgatcctgcaggtcatcagctttcaccaggcgtacgagcgtgctgccccgaagccggcgctccaggtgttgttcatcgaggagcccgaggcccacctgcatccccagatgcaggaggtcttcatcaagaacgttcaggacttcatcaagcgcaaggccccgtggaaggtgcaggtggtcatcaccacgcactcttcgcatatcgtcgcgagcggcgggtttcacaccgtgcggtacttcgaccgctccgagccggacggcaaggtcaaggacctctccacattccaggcgaaggtcaaggccaccccccaaggtgacgagacgctgcggttcctgcgccagtacatggtcctgcaccgttgcgacatgttcttcgccgacaaggtgatccttatcgagggcacagcggaacgactgctgctgcctgagatggtccgtcggtgcgccgaaggtctcctgcaccagtacgtatcggtcatcgaggtcggtgacgcctacgcggtccggttccgggaactgcttgatttcctcaacgtgaagaccttggtcatcaccgacatcgactccgtcagccccacagatcagaaggcctgcccgccgagcaccgcgcaggcggtcacctcgaactccacgctgaagaactggcttccgggtcaatccagcatcgcgaagctcctcgacgtcggcgcggacgagaaggagcacggtcacgtacgcgtggtctaccaggtcccggaaaagcaggcaggcgtctgtgcacgcagcttcgaggacgccttcatcatcgccaacgcagcagtcctcgcccgagacctccggcacctggagctgaagagagccttcgttcaggaagtcggggccgaccccacccctgaagacatcgaagcccatgcgttcgccatcgccaaacggctctccaagcacaagaccgacttcgcgttcgacgtcatgctcctggaggactgggccgtcccccgctacatcgccgaaggactccagtggctcgcctga

SEQ ID NO: 78285 - DNA, 1671 bp, Streptomyces sp. NRRL F-4711
ctgggccgtcccccgctacatcgccgaaggactccagtggctcgcctgaacacactcaaagccgtggtcgaagagctggacgcccggcgcagcttcctcgtggaagcaggagcaggcgccggcaagacgaccgacctcgtccacgcccttcagtacctcctcagccaccggcgttcggaacttgaggcgaacggtcggcgaatcgcctgcatcacatacacgaacgtcgccaagaagaagatcctcgaacgcatctcggcggacccgctcgtcgccgtcggcaccatccacgagttcctctggagcgtcatccaggcctacccgcgcgagctctggcagcagatcctcgactacaacgagaacctgtcaaagcctgaagacctcactgaggtggccgctcccccagtgatcgagtactccgaccgcgggcggaaactgagcgagggccgaatatcccacgacgatgtcatcgctctatccctgcggctcgtcgccacccaccccaaactcatacgcatcatcaccagcaaatatcccgtcatcttcgtcgacgagtaccaggacacctcacccaagacgatcgacctactgctgaaccacctggcaggagcgggcaaggaaccctgtgtgatcggcctcttcggcgactccatgcagaagatctaccgatccggcgtcggtgcagtccggcacgacaagctcacacccatcaccaaaatcgagaactaccggtgttcgcgccctgtagtcgacgttctcaacaagatgcggcccgaactccgccagcaggcctccgggaggcagcaggagggcgaggtacacctcttcctcaacaccgacgtgccgccgggcccgcgacggctggatgccgctaaagccaccctcgcgagcagggactggacacttgagaactcgaagtacctcttgctgacccatcgcggcatcgcaggcacactcgaatacgccaacctgctggagcagtaccggcagctcggcagccacggccccgatgacctcatggcacgcaatgagccctacatccagtacctgacgcagatcgaagccctgtgcgcggcctaccaggcccgggacttcgtggaactgacaaacctgctggcccagggaaagagacgcatcacccagcacaccgacaaaagaaccatcagcgaagcaattcgcgagctcgacacggtgcgcgcggccgggaccatcggcgatgtgctggacctcatggccgacagccccctcctggccgtgcccggaagagtgaaagagcgcgagcgccgcagaaccgcagccgacctcgatgagcgacacaagcggcaagcagacttctccaacaacatccgtggtgtctcctaccgggaagtcatcagcgtcacccagttcatcgatgaactcacgcccttctcaacccaacacggcgtcaaaggtgacgagttcgagaatgtcatcgtagtgatcgacgactctgtctggaccatgtacaacatcggcaagatgcttgccggcaccgacaaacctgagcgcaccgagcgctcacgcaacctcttctacgtctgctgctcacgagcccgccgcggcctggccgtggtcttcatcaacgacctcccagacggagcggaggcaacagctcgcgactggttcgcttcgggcaccgtccatccgtaa

SEQ ID NO: 78286 - DNA, 1833 bp, Streptomyces sp. WM6373
ttgcagttgcagaacttccgtggcatcaagcaaggcactgtcttcttggacggccactgcctgctggtcggatccaacagcgcgggcaagtcgaccatctgcgaagcgctggatgtggtcctggggccagaacggatggcccggcgcccggtgatcgacgagtacgacttctacggcgcgcagtaccaggagcatgacggtgagctgcccgaggtccggatcgaagtcctcctcaccaacttgtcggaggttgcccagcgacggttcggcagtcacctgcgcctgttgtcccgccggaccaacgacttccttgacctcagcccgaccggtctccaagaagcgcacgaagccgagtggtgcctgcccgtggtcttctgcggccgctacgacccgctggaggacgactttgtcggggggaccttcttcgcccaccccgagaacctgccggacgagccaaccggcgacgacatggtggcactcggcgctggcctgaaaccgttcacccgcgccgacaagaggcattgtgggttcctctacctgcggcccaaccggaccgggaatcgggcgctcaccttccagcggggttcgctgctggacaccatcgtccgcctggaagccgagctggctggtcccctgtgggaaagcacgctgcgcaacctggatcaggtcaccatcgccgccgcggattcagggttcgacaagatccggaccgagatccacgagcggataaaccggttcgtaaccctgggtgatactcccgccccggtgggcttccgcgcctcggagattacccgggagcacctgcgtgaggtcctgcgcttgttcatcgcgacacagcccagcatccactcggtgccgttcaaccggctcagtacgggctccttgaacctcctcgtatttgccctgctcacctacatcgctgagctcaagggagacaagtcggtgatcttcgcgattgaggagccggagatcgccctcccgccccacgcccagcggcgcttggttgactttgtcctcaagaacatgggccaggtcatcgtcacctcccactcgccgtacgtcatcgagaagttcgagccttcccgaaccgtggtgatcacccgggacgggcagggcacactgacgagcaggggcgtcacgcttccgtcggacttcaagccgagcaagtaccgcgtctaccgccgccagtttgccgaagcagtcctggctcgcgctgtgctggtggtcgagggagccacggaggctgcactgttccccgccgtgtcggacgttctggaggccgacccgacggtgcccgactacgttcacatcgatctcgccggcgtcaccgtcttcgacgcccagagcgacgtcagtgtgccgctgttcgggccagtgttccaagcgctgaacaagccggtgtacggcatccatgaccagccgacaaacgccctcgcgccggcactcctcgccaagacctccgccttcacgcactacacggaactcgagtacaagagcgtcgagaagctgttggtcgccgaagtgcccgtggctgtccagcgacagttcctcttcacggtcgcccagcgtgatgactaccccagcgggtgcgcacgcccggcggccggtgccagcgatgatgaggtgcgctccctggcctccaacgtgttggcggcccgcaaggcagatgggtacggcgccttgctcatcgccgagtgcaagagccgcagcgaccttccggcagtcctggccgacttcctgctcgccattgacagtgacctgcgctccgtagttagcacagaagccgtcggtgacgcggacggatcgctgccgggcgtgtccaatgaggattga

SEQ ID NO: 78287 - DNA, 1716 bp, Streptomyces sp. WM6373
atgaggattgacgaggagcggcaggcgatcctcgactctgctggtcatcttgtcatcgtcggcgggcccggctgcgggaaaacctcgatcgctctcctcaaggcccggaaggtcctcgacaccctcgaaggcgagcagcgcgtgctgttcctgagcttttcgagggctgcagttcgccagatcaccgaccgcatggctggcgttttcgatcgcaccgggcgcgaacggctggaggttaagaccttccacgcctcatttatggagatcgtccgaagccatggacggctgctggccggccagccttcgaggttcatcgcccctgaccgcgaacgcaagctgaaagcagacttcgacggggactgggataccgagcggcgcaggctcgccgccgaggaaggcagatacgtcttcgatctgctcgcgggcgccacggcggatctgctggagcgcagcgcatccctacgggccctctacagcagcatctacccgctgatcatcgtcgatgaattccaggacaccaataccgaccagtggcgcgtggtcaaagcgcttagtgccacctccaccgtgatctgcctcgctgaccccgaccagcagatcttcggtcacctggagggcgtcgaggagggacgcctcgacgaggcgatcgagcagctgaagccgaggcagttcgacctgtccaaggacaatcatcggagtccggcgggaggtttgctcgacttcgccaacgccgtcctgcgtaacgtcccgcaccccaaggccgacggcgtcttcacctggacctacaccccagggtggggtgtccccgggccggtggtagtccaccggggcgttgtcgccatgcgcaggcacctgacggaacggcttggccggacacccaccatcgccatcctcgccagcgtcaactccgtcctctggcctgtctccgaggccctgtcgacagagcgacagatggaaggtgggacgatccctgccgtcgaccacgcacttcaatgggaccccgagctgtccgccgccgcgggctacacggttgcctccatcatggagtggcccggcctgacgcgtaccgaggccatcgtcggcaccgggcggagcatcgccgacttctaccgcgagaagctcgccaacggcaccgccggcgcccgaagcaagatcaatacggtggagaacggcctcacagctctgatcgaaggcaggcccatccggtccaattgcgtcaaggcgctcgtcgcggcctacgacgccgggatctcattcactgggcagcccgtgatcgactggaaggccgcccgtgcctgccttaccgggtccgccgaactcggcgaggtcctcaagcacgcccggcttctgcgtctactgaacgccaccgacgcccttgcctgggccctgaccgactcctgggatggaacagcctcctacggcggtgctgtcgccgccgtacgcgcagtcctgggcgcggaagccctcaccgcctcgcagcagcctgtcgagcccgtatccctgatgagcatgcaccgatcaaagggaaaggagttcgacggagtcgtcatcttcgaaggtgcctatgcaggccgcctgctcgactcggcctgggacgcggaacgaatcctggcgcaacggcgcctccttcgtgttgccatcaccagggcgcgctcgcttgtcctcttcgtgcgcccccaggagagcgaggccctgtgcggtaccagtacgccatga

SEQ ID NO: 78288 - DNA, 1992 bp, Streptomyces sp. XY66
atgggcctgcacatttcgcggatcgagatacgcaacttccgcaacttccggcacctcgtcatcgacgacttccccgcccacgccgtgatcgtcggtgagaacggcgtcggcaagtcgaacctgctggaagcgatccgcctggtcctcgacccgtccatctccgacgcacggcgcatgctgcgcgaggaagacatctgggaaggacaccccaccggcctggctggcggagccgaggtgaccatcgtggtcgagctacgaggcttcgacgacgacgccgacgccaagagcattctgtccagcgccgcggtggacttcgacccctacgtagcccggctgacctaccgcttcgccccgcgaacggaagtggcaactgacgacggctcccatgtgcagccgaccggccggccgctgaccgcgaaggactacgacgtcatcgtcttcgccggcgaccgcgagaccaacgacgtgcgcgccatccgccgcgaagttgccctgcgcgtcctgccggctctgcgagacgccgaggcagacctgcacaactggcgacgcagcccgatgagggatctcctcgaacgactccccgttgacccggtgaacctggaagccaccgcctcggccatggccacggcagtcgaccagctcaccaaggacgacaacgtcgccaagctggaggggcacctgacggaccggctgacagcgatgttcgggccgcgcctggcggtccaacccaccctgggattcgcctcctccaagccggacgaactgatccgcgccgtacgcctgttcttcgacacggcacgccgcaggagcatctccgacaccagcctgggcagcgccaacgtcatctacctcggcctgctgctcgaagccctcagccagcagcgagacgacgaggaattcatcgccaccctcgtcgccgtagaggagcccgaagcccacctccacgtcaccctccagcgccacctcttcgggtacctgctgcgcagcggaccgtcgctcgtcctcaccacccacagcccgcacatcgccgccgtcgcgccggtccgctccttcatcgtgctgcgcgcaacggagaacggcactaccggtgccacaacgtccgccctccccgtcagcagcgagcaggccgcggacctggagcgctacctcgacgtcagccgcgccgaggtcctcttcgcctccgccgtcgtactggtcgaaggactggccgagctctacatcctccccgccctggccgaagccgccggcttcgacctcgacgcctacggcaccgtggtggccagcgtccacggcaccgacttcaagccctaccgggcgctcctcggcccgaagggcctcaacactccccacgtggtcatcaccgacggagacgccgcccgcgacaagcgcggccgccgggaagccggcctcaagcgaggcgcgaacctccaccccgaggaagcccgcagcaaggcgctcctggaccagattgccctcctgccggacaccgacgcggccggctaccaaacgacccgcgatcccctcgcctcagaactccaggaccacggcgtctacgtcggcgcccagaccctggagaccgacctgtgctccatgttcggcgaggagatcgtccaggccttcaaggagctgaacagctacgccaccgcgatcgacgacgtgagccgcggggtcgccaacgaactgaacacgacggtcgaccccgagctgcggaagaagatgctcaagcgcatcggcgacctcggcaagggccgcttcgcccagcgcctcgccgcgcacatcgcccaggtcgacctggacgcccggatcaggtccgaagccaacatcacggacgaccttgtccccctggacgagcacgccctgcgccgcctgggcacggcttcctacctcttcctcgccatggaacgcatcagcctcgcggcccgcggaacctcactgctcgccggccacacggcgccacaggtcaacgggcagggcagcgatgcaggtcagtga

SEQ ID NO: 78289 - DNA, 1869 bp, Streptomyces sp. XY66
atgcaggtcagtgacaccctgctcgcggagctcgacagtctgcaccccaggcagcggaccgccgttctccacgacggcaacgtcgtactgcgggccggacccggaagcgggaagacacgcaccctcgtcgcccggatcgcctacgtgctccaaacacagatctcggccttccgcggcgtggcctgcatcacctacaccaacgcggcagccgaggaaatccgccgccgcgtgctgcgcagcggcgtgcgcgccgaagggcggatcacctgctccaccgtgcacgccttctgcctgaacgagatcctccgcgccttcgcacacctgaccgggcagtcggcaccccaagcaggacaggtcctcaacaagacggccaccgaagcgctccttcaacgctgcttcgaccaggccggcatcggcgaggttctcgcccagcaccgcatgccgcagagcacgcggatccgccgggctctggcctgcaacgagaacctggacagcttcgacccgcgggaagtccaggcggcacgcctctacgaggaacagctcatccttcgaggcgagatcgacttcgaggccatggtcacccgggccgtgcacatcgtccgggagcacgcacatgtccgcgacctccttcgctcccgcttcccccacctcgtcgtcgacgagtaccaggacctcggcggagtcctccacgaactcgtcctcgccctgcgcgacctggccggcatcaccgtcttcgccgtcggggacaccgaccagtccgtctacggcttcaccggagccgacgccaagtacctgaccgaacttgcaggccgagcggacttccgcgatctcgaactcgaggtcaactaccgcagcggccaggacatcatcaccgccgccgaagccgccctcggcctttcccgaggccgcctcgcccgcgaaggcgcacccccaggcgacgtcaacctcgaacaggtcgagggagggctcgcggaccatgcccgagtgacctgcgacctggtcgagcaggcgcagaacaatggcatcagccccgagcggatcgccatcctctaccccgctcgcggtcgcctgctcgacgaagtccgcagcgagctcacccgacgcgagctggacttccggcacgaaggtgacgacaagctccccgccggcagcctttcccgcttcgtccagcggtgcgccagccgcgccgtcaccaactaccagatccacaccgcatccggcgccgatcgcgccgacatgctgcgccgtacccaagcgccatcacttgcctccctggcccgcgccttcaccacgctgcgcaccgaggcccagctcgccccgtcgccctcgcggctcttcgttcccagggctctgcaactgtgcctcgaccccgaggagctctacccagccgaagcccctgccctcgcctggctggagcagctgcgcgccggcttggctctcgacgagatagccgcggggcaccccgaccaggacaacacgagcagcctcgacggcctggccggcctgtgcaggtccaaggaccttctgctgcaggacctcgcgcgcggcgaggaagtcatcggcaaggtactgctcgccacctaccacgcagccaagggccgagagttcgacaccgtgatcctgccgggcctcctccaggggctcattccgcgtgatgtccccagcgggaagcagtggcggaaacccacggaggcggaactcgcggagcagaggcgcaccttctacgtcgccctcacccgtgccgagtcgaccgtgaccatgatcgtcggacccgggtacgagaccaggaacggatactggatgtccttcgggccctcagccttcgtgatcgagatggcgcggcggctcttccccgacgaacagacctga

SEQ ID NO: 78290 - DNA, 1881 bp, Streptomyces sp. NRRL WC-3618
gtgtacgtgtccgaggtgctggtggagcggttccggtcgtgcgagcgggtacggatcccgctgcggccgcaagtgacggtccttgtcggggagaacaacgcgggcaagtccagcgtgatcgatgcgatgcggctgctcacggatccgctggacgggcgccgggtgcgctatttcgaggaatccgacgttctcaaggccgcggccgcgctgggcgggccgagcctgcagctggacctggccggcatcggcccggcacacagcggcgcgtatctggaggcgctgctgcccaagggggctcccgacagccgtaccgcacggtggcaggtgtcctggacaccaccgcaatcgggcgggcggcgcggcagcaccgtctgggcgcagggcgcgggtctcccggtcacgggggaacctcccgcacgcggtggcgtgcggcatgtctacctgcctgcgctgcgcgatgcagagcgggagctggcgtcggccggcggcgaccgggtgcggatgattctccgcgggctgctgggggacgacgagcaggtcgatgccttcgtggaacggatcggcaccgagctgaagaaggtggccgcggacccggacgtggccagggtcggcgagaagatcaacgagccgctgcgggacctgaccgtcggcgcgcatccccagatgagtgaactggccctggccgaacccacgttcgcctcgatcgcccggtcgctgcgggtgttgttgggcgatgcctccgcgcagccgtttcccctgtccgcgtccgggctgggctacgccaacaccctgttcatcgccacggtgatggcggaactggacgcggcggccgaggccgacctgaccgtgctgctggtggaggagcccgaggcgcatctgcatccgcagctgcagaccctgctgctgcgctatctgcagcagcgggcgcgggcctcgcgccgccgaccgcccggcgacccggctcagccggcggggcacctgcaggtggtggtcaccacccactcccccgttttatcggccgcggccagcgtggaggatctggtggtcatggcccggtgcccgggcgagctgtccgacggctggcaggcacggcccctgcccattccccggctgcagttgagccaggaccgggtgcgtcatctggaccgctacctggacgccacgaaaagtgccctgctgttcacctcgcgggcactcctggtggagggcatctcggaactcctgctgctgcccgcgctggcccagcgtgtccttgccgccggcgaaggcgtcggcgaccaggcggcccgggaagcgttcgaggcgctggaacggttcttcggcaccacccgggtgatcgtggacggcgtcgggttcgaggtctatctgcgcgtgctgctggcgcccgtcgacggcatgtgtctgggccggcgggtggcgctgatcaccgacacggatgtggcacccggacagccggaaccttcccggcttcagtcgctgcgggaactgccgcggcgctggggctctcccggcacgctgcacctggctgcggcgccccggaccctggagccggccctgtggtcggccgacaacatccccgcattgcgggcggcattcatccgctgcgcaccgcgctcggaggaccgctgggaccacgtcctcgaaacagacgatcccgccctggccttcggggagctgttcgtcaccaagaccagccggaccctccccggcgcggacggagacctcgcgaagggcaccaagatctccaaggggcggttcgcccaggagctcgccgacgtgctggccgacccggcggtggcgttcaccgtgcccacctacctggcggacgccatccggttcatcacctccccgggcagcaccacggcggtgagcaccccgtga

SEQ ID NO: 78291 - DNA, 1740 bp, Streptomyces sp. NRRL WC-3618
gtgacgtccccctcggtgcgggccggcgccttgacgcagcaacaggccgccgtcgccgtgaccgcgcctgcctttgtgccggcctgtccgggcgcgggcaagacgcatgtgatcaccagccggcatttgcagtcgccgcgtcggctgctgcggcagggacgtgccctgatctcgttcacgcgggtggcccgggaccagatggcccgccgctgccgccaggctggccgcgccgacctggtccaggcgccgcacttcatcggcacgctcgactcgttcctgtgggagttcctggtcaagccgcggcgtgcggccgagcccgtgccccgcctgctggagtcgtgggcgagcatcaaggccccggtggaaggcgtggaccgggagatctccctgcaccgcttccccatgaccctggatccctcgcccatcccggcgcgcgaggcggtggcctgggacaaactcgactacgacacccgccagctcatcgaggccagtgcctgcagccagcagacgtggcaggagaagatcttcgccacccgcaaggcgtggtgcgaacagggctacttcaccgggcacgaagcgcgggtgctggccctgtggaacctgcgcaaccccgaggccgctaccgcgctcctgggaccgctgcgctcccgattcgcggaagtcgtcgtcgacgaggcccaggactgctccgccgccgacctggcaatcctccaactcctgcacgacgccggcgtgccgctcgtcctcgtcggcgatccggaccaggccatctacgcctggcgcggcgccgaaccacaggcacttcacgccttcgcggcacggctgtcccccaccgctcaccccctgacgggcaactggcgcagctcccccgtcatctgccgcctggcggccaccctgcgcaccgggcagcgcccgcccgacacctccgtcgtgcgcgacgacgacgacatccccgtcctgctgctgcccatccagttcgccacctctggcagccgccacctgcacgccccgaccggcaccggcatcgtcgacgccttccgcacgctcgccgaggagtacaccgtcccggcagagaactgcctggtgaccgcctacaagtacgccaccttgccgggcatcacccgcgagaagcccaacaccaacacgatcaccagcctggcctgggcccgcaccgtcgcccacaccccggacgcctccggcgacgacctcacccgcgcctgcacgatcgccgtgcgcgtcctgttcggctactggtacccgggcgagaccggtggtcccgaccgcatcatggccacccaccggctctcggccggccaggtcaaccgcacggccttcgcgttcctgcacagcctgcccccgccccacagggaatgggccccgcaggtatggcaggccatgaaggcctggcccgccctgcccggggccgctccgcaaggcagcaaaggccgccccgccggaaagcccacgatctcccggccccaggcggccaccggcttgcgcacgaacaccgtccaccagctcaagggcgaccaggcagacggcgtgctgctgttgctgcccgatgccgggagcgtccagcgctgggccaccgcggacccggccaccgacgaagtgctgcgcatctggtacgtcgccgtcacccgcgcccgccgcctggccgccgtcgccctgcccgaacaggagaccgacgcgctggcccggctgctgaccgagcgccaggtaccggtccgcgtcgcatga

SEQ ID NO: 78292 - DNA, 1944 bp, Pseudomonas sp. 655
atgaaagtcacgaaaataactgcaaaaaactttagaatgctgaaagacgcaactttagatttacgtcgtgacctctctcttctcataggtcgaaataatagtggtaaaacttcatttttagtattgtttgagcgtttttatgaaccttcagttaaatttacatttgatgactttccaatggagtatagggggcggattttagcaattcagcacggagggcaagtagacgacttagcaatacaaatgactctggagatagcttttgatgacggtgatgatcttaagcagatttcagacttcattcttgatttggatgagaacaacaattctgtaaaaattttattcgaatgtattattgatgcggagaggcttttaagggatctcgaactagtaacaagttgcaaggaacgttacataaagaaaaacctgcacaggtaccttgttagtaatttatatgcctatttgagagatgaagacataagtgagaacagagaagctcttgtgccgaaggacttaagcttaattcgtgcgcttataaattttgagataattcacgcaagaagagatgtcgctagttcagaaggtgggaaaaaggttttatcaaaactcactactcagtattttaataaatcaaatggtgagcaagagcactttgatccaattaatgaattattgatcgggatggatgaagggcttgaaaagaagtatgaggagttttttaatccttttcttgcaggtgcaaaaaaattcttggcgattgacaatataaaggttgtttcaaatctagaatcaaaagaggttttagataactgctctcaggtagtttatgggagcgatggaagttttttgcctgagacatataatgggctcgggcatatgaatattctttacttattgttggctattgaaataagaaaagagtcgtttaataaaagcaagtgtcaaataaatttattgtttattgaagagcctgaagcgcacacccatccacaaattcaatacgtcttctcgacaaaaataaagtctattctatccgagattgataatcttcagacaataataactacccactcctcgcacattgtttctcagtgcaattttgaagatataagatacttcaagtcttcaagtgctggggtggagataaagaatttttattctgagttagagaaaaaatacgctaccgatatagattcttttaattttataaagcaataccttactcttagtgcttgtgagctatttttcgcaagcaaagttgtgtttatagaaggtcttacagaaagagttttgtgggattatttcgtaagtcgatttgatagtaggaatgaagttgtcgacggggaagtgccattgtcctctcagaatataactctcttagaagtcggtgcaaatgctaaatctttcaagcattttctagagtttataggtattaaaacactgataataacggatattgataccacagtttttcgagcaggagtagaagggaaaaaaggtgggtatgtagcttgtggtgtgatcgagggaacccatacaagtaatgcgacgctaagaggttatttgggctcgccgggatttgatgatgcggataagttcaatacttggttctcaaacttaaagagccataagttgcaagcgggggatgtcgatccctacattgcttatcagtcttcggagaataattatcatggccgaagctttgaggatgcatttgtgaacattaacttggagctgataaaggaaaatataggctgtattcaaggtcttaaaaatatagaagatatcaacgaggcggtaaattcttacgtgctcgtagaaagaattttggataagaaatcggcgtttgcctcttcattgttgtttttagctttgacgaaaaaaaatgtcgagtggaaaacacctttgtatattgaggagggcataaaatggttggcgaaatga

SEQ ID NO: 78293 - DNA, 1986 bp, Pseudomonas sp. 655
atggttggcgaaatgagtcctgtttcagaagttattcattgcgttgacaatcatgttgattttgtattgcaaggcggagcggggagtgggaaaacagaggctctaaaaaccgttttaagtcatataacaaaaaaatatcctgatcgcttagctgcttgcatcactcatacaaacttagcatcggaagagatttctcggcgtgttggtggggcacatcatatctctactattcactctttcctgaatggcttaatcaaaaattataccttggatattcattcggttgtatttcaaatatttaggatgcgattcgtgcaggagtttgtaattaacgacggcgatgctgagcacaagaggtataaaaaggcttacgaaaagttttccgatgctcttttctctattaaaggagaaaaaataataaagtgtcctggtaaacggcaatttgataaagattcagaaaatcacattgctgaaataaatgcgcaaattgaagagtttaatggcttcataaaacagcggattgcttcagttccgcaccatagagttgtatacaatgaatcgccctttgatcgatttgataatctcactttcggtcatgatagtcttttaagaatctcatgtattcttttgaaagaaaaaccaaagcttctaagggttttgtttgatagatttgactatatatttatcgatgagtatcaagatacaaatccagatatagttgatgttttgattgctggagtaaaagatagagctaataaagtgctggggctttttggtgactctatgcaaggtatttacgaagatggtattggcgatgtagagaagtatatagttcgaaaggatctgcgtaaaataaataagccggacaattttcgatgctccgctcaagttattaagtttataaataaatttagaatggatgatcttacgcaagaactagcactgaaaacgattgatggtgtagaggaaagtgcaaatgaaaggcaaggagtcgtaaagctgtattatgctgtatgcaatgataggccaacagcttggagtgaaactgcaaaaaaagaggagtactttagcaagcttaataaactaattgattttgcctctcgggacggcgaattcaagactcttatgctcaccaataaggctatttcaaagaaagcaggatttggagggctttttgatatttttaatgagcgatatagtctttcaattaatgatcgaatagacgaggccctgtcagcgctacaatataaagacgtgtattcgttaattaaattttttgaagtgaaaaggtatgatgatctcatacagattgttaagaagggtggctattcaatttttaatttgaagagcaagagggacttgtcgtcgaaaatgcatgatctctgctcaacaaagcggactgctgaagaggcggttaagtttgcaattgataataaattaatcagggagtcagagtctcggaggcggtttctacagcggaaagaaaaatttatgggggaagtgctcgcggatgaagagtatcagcagtttaaggggctttatattgacggcacaaaaagctttactggtgttgtaggaaaaatgcctgagttggatgagtatggttatgcgcaacttttgaagaagatcaagattgagctgttttattatggctttgtcgaagtaggggtttcaatagctgaaacaagtagttattttagatatgtggatgaagaaactccttttattaccatgcataaaacgaaaggctcggggataaaagatactttggttgtaattgaggattttttttgggcgaactcttacagtttcaatggccttttctcaaaagaaaagttcgatggctttgatcctgatacgaaaaaaatactttatgttgcttgttctcggacgatacgaaaccttagttgcgttaggctgctgtctcaagaagagaaggacaatattggttttttctttgatgatgcaacggaagttgcgctctaa

SEQ ID NO: 78294 - DNA, 2043 bp, Vibrio parahaemolyticus
atgttattaaagaaattagtggtttcaggttataagagtatatccacaagtcaccctcaaacaattgagtttgagcctgacctaaccattttcattgggcataatggcacaggtaaaagtgccgcattagaagccttaaataagctgttctcaatcgaccattctttacgtggcattttaccttccgactttcacttacccgacaatgtagatgcagccactccaagaagcttaatgatagaaacatggtttactcttaccaattctgaaggtaatccatcagtaccatccttaatcaatggacttacagcatcgagttccactggtgaaattatatttagagttcgactagaggcaaacttaagctacgatttcaacccactaggtgacgtcgatgaaagtatttgggtgattgatggtgatatggaagaaccagaggaggaggataagcatcgcctctcagcgactcaaagaaacgcaatccaagtcaattatgttccggccaatagagatccattagttcagttaaaatactcatcaaaggccatattgggtcgattactaaaggctataaaatggtcagatggcgaacaagattcattcgaagcgcaagcgcaacaacttaatcaattagcagcagacaatcctgctttagagcagatcacacaggcaataaatcataattggcaagacatatataaagggcgtcatcttaatcaagcaaaactgaattttcctgtcggtgatgtggatgaaatattgaaacttatacagcttcaatttatgccagatgcaactggtaataaggtggataccagtcgattaagtgatggtcaaaaatctctcgtttactttgctttaaccaaagcactattcgatatagacaaagcgacacgccaagccattgtaggtagtcaatcatcaaattttgatgttgataagatgaagctacctattttcagtttgattgtactcgaggagcctgaaaaccacttatccccacattatttaggtcgcattttaaaactagtaaaggattatgcttcgaccgaattctgtcagtccttagtttcaacacactcagcctcattggttggccgcataaaaccagaacaaattcgtcatttccgattagacagtgaaaatatatgtacgaaagttcaaggattactattacccgaagatagcgatgagcaggctaagtatgttagtgaagctattaaggcttaccccgaaatttactttgcgaaacttgtgatacttggtgaaggcgacagtgaacaagttgttttacccaagctactggagcactatggtaaagacattgatggtcattcaatatctgttattccacttgggggaagacatgtcaatcatttctggcgtttactgaattcgctaaagataccttttgtgacgttattggattttgatatagatcgcaatggaggtggatttggtcgcatgaagtatgtgattgagcaactgagactgatggacaataacagcacggattttatttatggagatattctagattctattcctgcttggaattcacctcaaagcccgactaacttctttgttcgcgatcctgataatgtagtcaaggttattgtggatgaaatagaaaaatacaacgtatttttttctagccctttagatattgattattcaatgatctgtgcttttccagagattttttgtgaaaaggatgaggcttacggcgaaagggggccaactgaaggaaaagaagacgaagaagatgaaaacactacaaaaagagaagctgcgttaatcaaagcagtacttaaaaaagggaatacaggtaagcgctttaattttggatcaaattgggaaagaaatttcttgtggtaccgctatcggttcttatcgaataaaagtaaacctgcatctcatgtccgtatgtttaccaaacttgaggagcggtatacatctcaggaaatattggaaaaattaccatctgaactaacacgtttgatggagcgtattgtcgagttgtctgaacaggtagttgagtaa

SEQ ID NO: 78295 - DNA, 1677 bp, Vibrio parahaemolyticus
atgactgagtggaaaccatctgatggtatagaagctacagacgaattaatggagattattacttgcgattgttcagtagcagtactagctaatgctggtgctggtaaaacagagttgttggcacaaaaagcaagctatttgttttttacagataattgtgtatggcctaaaagaatattatctcttacatttaaaactgaagctcagttaaacataaaagaaaggataaacaagcgttgtggctataaagctagtcgcttcgattcttttacattccatgcattcagtaagagcattgtggatagatttaaaaatgttcttccagaaaatgaacgtccaataaacaattacgatatcgtctttcgccgtcaagatgcagatggtagtacaaaaatattgatgggtgatttactagcactggctatgcgtatcttacgcgaaagggaagatattagaaatatgttctcttattcttatgcatatgtttttgtcgacgagtttcaagatacgaccaatgagcaatatgaattgttacaactgttgtttcagaactccgagaccaaaattttaactgttggagatattaaccagagcataatgttgtgggctggagcacgtcaaacggtattcagcgattttttaaatgatttctctgcacaaaaaaaattactagttaagaactaccgagcatctagcgaaattcaagacgtactagcagtagtattgcaatttgtacagtcccctgaatccaaaattcaagaaatatctcagatcccaaataactgctctctgcatgcctttagtgacgagtatcaagaagctgcctttattgctgaacacataaaagaatctttagatagtggtatcaaagcgagtgacatttctattttaactaagcagcaggcatcaaagaacacggaagtattgagagctgagttgacaaggtttggtataaataaccttgatatgaccgacttacaagatgctttaaaagagcctcttgggcaattattctcactatttttaaaagcgatagtgaaccctgaacctaaagtcatgacggagttgtttaaagttaatttaaccttaaacaaaattgaagcaggtgatgataaagaagaagcacttactacttctttaatgaatttcatcctgttaacacaacaacaaataactgcaacagcaaccgctgacgacttgttgtcccttgtccaaagttttattcatgagcttggaatgaataaaataaaaggaaggtggaaacagtacaaatcccctgattattttgatcatgtttggcgagcacttgaaatccatttaagaaatatgtgtaatcaaaccagttcattggtagacgctgcgaatctattcagcgcagaaaacgctgtacatataatgaacatccacaaatgtaaaggccttgagtatcacactgtctacttcatgggtctagaagatcaggaattttggaaatatacgagtcaaacctttgaagacaattgtgcgatatacgtggccttgtcccgagctaaaaactgtatatgtgtaactataagcaaacatagagagcatagacaaaactggaggcatgataataggagttctacatttggcacaatcaaaccagttataaacctattaaaagataattgtaagttttcagctacaaaccactag

SEQ ID NO: 78296 - DNA, 2133 bp, Vibrio parahaemolyticus; identical to SEQ ID NO: 78228

SEQ ID NO: 78297 - DNA, 1746 bp, Vibrio parahaemolyticus
atgccatatagaaatttgaccatggagcagatggaagctgtaaggtttgatgataatttgctgttatcggcttgtcccggttccggtaaaaccaaaacattggtttccaaactttgttatctgctggaaaataaagagagtctaagaataggtaaacgaaaaatagttgcgattacctatacgaatgtcgccgctgacacaattaaagaacgtcttctctcatatggaatagacagcagtgctctctggattggcactattcactcgttttgtcttcattgggtaataaaacctaacatcaacttgattcctaggttatgtaaaggctatgtaatcattgatgagcatgagaaacaggccaaaatagatgaactaaaagagaagtatcacatcaataaattcgagagagttgagacaaagttaggtctagactacaaacctgtgtattcaagaggagttgctctatttgatcttgtcagagaatatcacctctatcttggtcaaaatagactaatcgattttgacctaattattaatctcagctataggttactaaaggaaaattcttttcttggacgaaggctgagtaaattgtcctcacacttattggttgacgaataccaagacacatccgatatacaatatgaaatattaagttcagtagtcagtagacaacagaccacagttacattcgtaggagataaagagcaagcgatttatactggtttaggggccgtcgttaaggataagacagatctcaaagaaactttcaaacttgattctatagcggaaaaatctcttacaggttgttttagaagtagtcagaggattgttgattactacagtaactatcaagacggtaacatcgatatacagtccatgtctaaactcaaggacttcgcttctgttgtccatttagataacaccattcataaaaatgatttagctgaatatgttgctaacattataaaaacacaccttgctcaaggaatagaacaacgagaaattgtagttctatgtcctagttggtttgctgttatggagctttctaggaggctcgaagagttttcagatgacttcagcatcgatggttttctcgtatctccaattccaaagaatcaagacaatatttggctaaatctaattcgactggcattacttgagcctagtgttgaaaactatattaaaaggcagagaattgctaagacgttatcagaatttctttatgacataagggaaactgatgaacttatacagccaaaaaagatattgagagcagtaaactctctttctataaaagctgttggagccattgaaaaatggatagaagggattattaaggatttctacttaaaattaaatcttgagtataataataactctctaggtgctagttctatgagaagtcttctagatgcaactgcacaacgcatgaaatcctatagtatgaattatgaagctagtgatttacatcgattcttttgtgatccttcaggagtaaagatcacctcatgtcactcaacaaaaggtgatgaatatgacgttgtaatatgtactggactattaaaaggcaaagtgccgcattggcaggatataaggaatagaagtatgcagcatcagaattatgtagctcgaagacttttatatgtagttgcgtctagggcaaaaaagcatttatatatgatttctgaaaatggatatgtaagtaattcaggttatcactacgtaaaaacagaacagttatag

SEQ ID NO: 78298 - DNA, 2307 bp, Vibrio parahaemolyticus; identical to SEQ ID NO: 75098

SEQ ID NO: 78299 - DNA, 1956 bp, Vibrio parahaemolyticus; identical to SEQ ID NO: 75099

SEQ ID NO: 78300 - DNA, 2163 bp, Vibrio parahaemolyticus
atgaaaatctcctctttcgctttgaaaaactaccgaagactagtcgacgtcaacttggtgctcgatgataaaacaaccgtccttgtcggagctaataatagtggaaaaacgtcctgtataggggcgctacacaccttcctgaaaagcccagataatctaaaagttcgagatatatcgaagcgtaattggaaggaaatccaaaagctaggcaaacaaatcgaacaagaattccctaccagcgagaaaatgcaggaattatcggatgttcttaccagtttactgccgattttagacatagagatcactgcggaagtgaatgaggcatacaaggttcgtgacatcctaccagatctggaatggcgtggtggtgcgttatttgttcgcataacttacgaagcaaccgatatttccaaactatgtcgtgagtttgttgatatgagaggcgttgtatccaaatatacaggtcaggtaagtttgtggcccaaagacctatgtgatttcttggagaaaggtagtaacctcagtaaattcattaagcaaaaacattacattttgagtaaaggagtcgagcctacttcgaaagaggttttgcagcccctaaagtctggcgctttgaaaaagttaatcagagtcgatgtggaatctgagcaacgcggctcaggtgatgaagataacacggatcaaaaaggaccatattcggaaaagcagcggctcaataagctccttcgaggatattacgatcgtatcttgaaccccgaagattttcctgagccagaagatcttgaagtcttgggacatcagcaaaacctagaagaggggtttaccagtaggttgaacgatcagttcaatgcacccttcgaagaactaaaaaacatgggatatcccggtatcggcggcaatccgacggttgaaattgccgcgaaaattagcggcacggatgctttacaaaaatcctcatcggtccgatatcgttttgatacaaatgaagaagagtttcttcccgaaagctacttaggccttggctaccaaaatcttatatatctaacctttaggcttctagagtttcgtgacaaatggatgcgcgtaggaaagtcggcttcatctgaggataaagtcgaggatcagatagaaccgatccatttagttttactcgaagagccggaagttaatcttcacgctcaagttcagcgagtatttgtatcgaaagcttatgatactttgcggaaccaccccgatctgcgcgacaaggcaaccaaaaaagataagtctgaataccagacacagctcgtgattagtacccactctagtcatattatcaacgatattgatttcaaagatttacgttacttccgacgaaatgatgcaaataagtccatcaaaatggatcatacatcaattgcaaacatgtcagaactttttgcgaaggcaaaagatgagcttttatttgttagaaaacacttgaagctcactcattgtgacatcttctttgccgatggcgttatttttgttgaaggccaagctgagagccttcttgtgccggagtttatttctaagagcttcccgaagttgtcgagtcggtacatctctatgcttgaggtgaacggagcgcacacgcacaagtacagaaatctagtcgagaagcttggagtagcaactctagttctgacagatcttgattctgttaatagtgaagggaagtcttgtttcccgcaacagcagtcagttcaaaaaactaataatgataccttgaagaaatggcatccaaagaaagaagcgctagatgacttggtcaccttacctcaagcggaacatgctacaacaagtggagatgcaccgctttatgttgcctatcaaaaaccaacacagatttttggtgaaaagattttatcccgaacttttgaagatgcattaattttggcgaatttcgcggatgattatttccagaaaattaaaaagctcaaagatgcgaaaactgattttgaaaacggcaaggaaccattgtcgaagtcactgtttgactatgtacaaggcttaaagaagggtgactttgccttcaattgcctctttcatctcgcggaaaatgaggcgaatagcttcaatcccccagaatatatgagcgatggtcttacgtggttgcaagatcaactgtcaccaaaagcatag

SEQ ID NO: 78301 - DNA, 1926 bp, Vibrio parahaemolyticus
atgtcagagcaatgttacttggctggaaccaaacctatcggtcatgataataaagttgatgaaggaatccgtgagtgtctaagtattggttcgggaaaaagcttcatcaccttcgcgggggcggggtcaggcaaaacctactcccttaaaaaggctctagaattcctgaaagttcaatattctgatgactttattcttaagggaaagcaaattgctgttgtgacctttacgaacaacgcagccgatgaaataaaagatcggattgaacaaagcccaatctttgcagtttcgacgattcatagtttttgctggtccgctattgctggtttcaatgaggatattcgcaagtggtacttggaaaaaatccccactgatttagaagatcttgaagaaaaagaactgaaaggtcgaccaggcaaggcttctgatgctcgaaaaagagatatcatccgtttgacggaaaaattggaatggttagcggagcctcgctccttcatttacgatccaaacggtgttaactctactcaaaatgcgctctcgcacgcggatgtcttgaaaattttctcccactttttgaccactaagccgatgatggcggaagttattataaacaagttccctttcatattcatcgatgaaagccaggatactgataaagacgtagtaggttcattctttgagctgcaagaagccaaatcagataaagtggtcatcggcttatttggagatacgatgcagcgcatctttggtggaggagaacctgagctaggtaagactagaccaagcggttggaccactttcgacaagaaaatgaaccatcgctcagcacggcgcatcgttggtttaggtaatcaaatccgtagtgaagatgataaacgcaaacagtttgctcgaaatggagccgcagaaggttacgttcggtatttcttattgcagaacggtctttcagataaagacgaaatcgaagcgaaaattcgtgagactatggcggaacttacaggtgacgcagactggacagatactcaatccaaagaaaccgctattttgctattagaacatgcaatggctggtcctcgacttggctttaacgagctacgagaaaaactcacaaaatcaaagaaaattaaagatagaatttatgaaggggagaataccgagctgaactttttctctggtattgttttacctatggctgaggcgagtcggaatgaaagacgagctgaactgatgtctatcttaagagaaaataagtcccctcttttggaagccagtgtgtttgacgctaatatggatgatccgctcgcacttgcccgagcagcagaacacgcgtttagagatgttgtttcaaatgataaggttaattttagggaagttctagaagtacttgctgtacataatcttctgagaattccggcgaaattgcagtcctttgtagcaacttcagaagaaagtgaagcaaaatcagagccagctcaaacgggcaccatactggaggttgaagctggggctgaagagcgcgatgaaagcgagatttctgcgtgggctgaagccttggagaccgatttttttcagatccggaactataaggactatattgatgaaaattcagtttttcgaacccatcaaggagtgaaaggcaatgagtttgaccgtgttatggttatcatggatgataatgaagctggcggttttttattttcttatgaacaattttttggagcgaaagagctttctcaagcaagcaaaaaaaagcgggatgagggtgaagaaactggtttggaccgaactagaagattgttttatgtcacatccacacgagcgaagaatagtctcgcccatgtaatttatacatccaatgtgaccaaggtaagggcaagccttattgaaaagaaatttgctcgagatagtgaaattattgaattataa

SEQ ID NO: 78302 - DNA, 1785 bp, Xanthomonas translucens pv. poae
atgcgaatttcacgcgtcaggctatttaatttcgccaacttctctgacgtggatgtcgaaaccggcgacagcatcgtcatcgtgggcgagaacaaggtcggcaagagcaacttcattcgtgccttgcaactgatcctcgatccgggattgtccgagcgtgaccggcagttggggcttgaacacttctgggatggcctcgacgcagacaagctcggcgaaaccatcgaggtatcggtcgacctgacagacttcacggacgacccgcggctgatggcccacctcaacgactgcgtcatccatcctgggccgcccatggtggcgcgcctgacctatcgctttcagcctaaggccggactgaccggggtacccgaatcactcagggactacgagttcgtgatcttcggcggcaacgacccggagatgcgtatcggcggctcgctccgtcgcatgctgccgttggacgtccaggttgccctgcgtgatgccgagaaggatctcgcgagctggcgacattcgccgttgcggccgctcatcgaggacctcgcggcatcgctcgacgaagatgcccgcgaggagatccagcaacaggtcgacgcagcgcagcaggaacttgccagccatgatgaggtgatcgaggcggcaaaacggatcagcgagaggctggttgcactcgcgggtgagcagcacgctgttccactggacctgggccttgcaccgacccgggtcgatgccctcttgcgcagcctgcggctgctgatcgacaacggggcgcgcggcatcggtgacgcgagtctcgggacggcaaacctgatctttctggcgctcaagagcctggaactcgaccggctggtgtcggatggcgagcgcgaccacaccttcttcgtggtggaagaaccggaggcgcatctgcatccccatgtacagcggctggtgtaccgctactttctgggcaccggtgcacagggcgacgagggtgcgcctccgctgacgacgatcctgaccacgcactcgccgcacatcgccagtgttgcgccgatacggtcgatcgtcctactgcgtcacgacgcgtcagagggcaagaccgtggcggtttctacggcgaaggctcccttcactgagcgcgacgaggaagacctgcagcgctacatcgatgtgactcgcggcgagatcttcttctcacggggcgtcatcctggtcgagggcgatgcggagcgcttcctcatccctgcattcgcggaagcgctgggcatcccgctcgacatgctgggaatcacggtgtgttcggtgggtggcaccaacttcacgccttacgtgaagctgctagggccccatggcctggacatcccgcacgtgatcttgaccgaccgcgatccggttgacggaaagccgccgcgcgtgcgccgtcgactcgccaacgtcctcgacgtggtcgagcccaacgacgaccacagcgggtgggatgtggacgatcttctggcccgtgccggggaactcggatacttcgtcaacgagaacacgctggagcctgaactgttctacggaggcttggccgaggcaatgcagcgagtgatcagacgggagttgcccttaaatcaggcgagccgcgacgcattgcaggcatgggtggacgatgccgacgacctcgatgaagaggcgctgctgaccctgatcgagcggatcggcaagggacggtttgctcaggcactcgcgaccttcacctcggaggattcgtgcccagactacatccgcgctgccctcgagtacatccgtgatgccgtcgtctag

SEQ ID NO: 78303 - DNA, 1815 bp, Xanthomonas translucens pv. poae
atgccgtcgtctagcgtcagctcggcctacttggcgcaagccgcagatctggccggtaatcccggccagttggcagcatacgaatctcaggggcactgcgtggtgctcgccgggccgggcagcgggaagacgaagaccctggtgctgaaactggcacgcatcctagccgaggatgttcgtgcgccccggggagcggcatgcatcacctacagccaggaatgcgcccgcgaactgacccgccgcctcgaaggcctaggactgcgagaggccccgaacttgttcatcggcactgtgcatggcttttgcctccgtcatctgctgatgccctacgggcgcttggccgaactgcccattccattcccattgtcggtggcgacccaacgggtgagcgaccgcctacttaggcagtctggagacgcgctcttcggtaccaagcatcccttcaaggccatcgatctggggcggcaccgacgctcggtccttgaccgcagaagcgtcgcctggcgcagtgaagaggaacttgccgcctgggcgatcgcttacgaatcggcgttgcgcaacgagggactgatcgactacgacgatatggtggttttcggccagcggctgattgctgagcacgactgggtgctgccgctggtgcaggcgaagtttcctgtgctcgcggtcgacgagtatcaggacctgggcgtcgcgctgcatcggatcgtcgagcgcctggccttcgacggtggggttcgcctgttcgcggtcggtgatgcggatcagtcgatctacggcttcactggagccgacggcggcttattgaccgaattggctgcgcgggttgacgttgagcgggtccagcttcagctgaactaccggtcgggcagcctaattgtcgatgcttcggagctggcgctgggcgaggcccgcggttaccgggctaacgatccggctcgccaggcatccgtctcgttcgttctgcgtcctggcggcttggcggaccaagccgcgcatgcgattgcccagatcattccggctgcgcttgacgcaaagccaggtcggacccttggcgatatcgctattctctacacggactatcgcaccggggacgtcgtcgccgacgcggcgacagctgccgggtttgactacgtccgcgtcgataacgcggctccgtaccgcaaggtgggtctgacgagctgggtcgaggactgcgcggcctggtgcgccggcggctggcgcgtcggccggcctcagctgcggggtttgatcgaccgctactttgccttccgtcgcgcgcatctggacgagggcgaggccagacgcgaggcccaagcgcttacagcgctgttgtggtcgctgcgccaggatgctcaacccgcgcgtgagttcgtcgcggcgcttcggatcggcatccttgatggcctgctggccgcggagactgcgctcgcggaccagaaggagcagttggaccgcatgtcggcggcactcgccgctggtggcgcactggcttcgctggatatcgtgagtctgggagggcgagacgggtcaccggcacatctgaatctgctgaccctgcactcggccaagggctgcgagtacgacgtggtcatcatggtcggcctcgatctaggaaacctgccatggaacaaggcgactgtcgaaaagcagcgtgagagccggcgcctcttctacgtgggcctgacacgcgcgcgcgatgaggtccacatgctctactcgggcttcgtcgacacttcctatggcatcaagcggtatgggcgttcaccgtttctcaacgagttggaggaacgaatgcgttccgcgggcctgtag

SEQ ID NO: 78304 - DNA, 2022 bp, Xanthomonas translucens pv. phlei
atggtcccgatgcttgacctatggctgtctgcagaaaacggtgaacttcacttcgttaaggacctcattccatccttcagttggcgtggcgggcctgttggcgtgaggttccggttcgagccgaaggacatcgtcgcgctgtacaacgatttccgggcggaacgcgagcgggttcatgcgctggaggcagaggcggccaaagatgctgacaaggcggcgttgacgctctggccgaaggacctgaccgatttcctcaccaggcggcttggcacgcatttcgaaatgcgctggtaccgccttgatccggccaagctcgtcgagccggacaaggtgacacgggaggcggtccttcagcccctcggaccgtcgactgtcccgatgcaggccaacccccttgccggtctggttcggattcatgaaatcaatgcccagcgcggattcggtgaactggacggaagcgaaagcgaggattcaacatcggcggggcggtccggacgacggttgtccgagcagctgcgggcatattacaagcggcatctcgacccggaacagtcacccggaccaaccgacattgaggccctccgggcgatggacgcggctcgcgtcgcgttcgattttaggctcgccgcgagcttcaagccggcgttccaggaagtcgaatcgctggggtatccaggggctaacgacccgacgatacatgtagcgacacagctgagtgcagccgacggaatcaatcacgaatcggccgtgctcttcgaactcgattccgttggcggcgcggccggcgcgccaccgcttcggcttccagagacctctaacggactcggataccagaacctcatctcgatgatctttcgcttgatgagttttagggacgcctggctgcgcaagagtaaggcagcgctcgcatctgacgatctggtcgtcgagccaatccacgtcgtgatgattgaggagccagaggcgcatctccacgcccaggtgcaacaggtattcgtccgccacgcctatcatgtgcttacaaatgatccgttgttgaaaaaattccccggcctctcgacgcagttggtggtgagctcgcactcgagccatatcgctcacgaacttccatatgcgtcactccggtacttcaggcgccttccggcagggatgcatggaaaacaggtgccggtgtcgactgtgtcgaacctcgaggccatctttggggatgacaccaacacgaaacggtttgtcacccgctatctgcgctcacagcatgctgacgtgttcttcgcggacgcgttgatacttgtcgagggcgccgccgagcgaatcctgcttccgcactttattcgcaaccgatttctgcagcttcaccaggcgtacgtcaccttgctcgaggtgggcggcagtcacgcccaccgtttgcgtccgttgctcgactctctgggaatcccgtgccttgtcatcaccgacatcgacgcgttgggcggaaaggcttccgtgcaggtcaagcgcaacgtagggcaggttacgggaaacccgacactgcgaagctggctgaagtcaaacaacaagaggagtgggattgacggtctgcttgacctatcagagaccgataaagtcatcgtttccgacgacctctactccatccgcatggcgtaccagacgccggcctctgtagcggtccccgccggggctgcgccgcaagaggtgttgtcaggaacgtttgaggacgcactcgtctttgccaatcttgcgcatttttcagccgcaaagggcaagggaatgatgggcgcggtggtgcgggaggttgcaaaggcagcgagcggcgacgccctcgccgctgggttgttcaaggtcatcggtgatggcgacaaggccgggttcgcactcagcgtcctttatgacacgaactttgaggccctcattcccccgtcctacatcgaagagggcctctcttggcttcagcagcgcatcgtcaagaaaaaacacgagatgcttctggtgtccgttcctgcagaggagggcgcgcatgaatga

SEQ ID NO: 78305 - DNA, 1866 bp, Xanthomonas translucens pv. phlei
atgaatgaggtgcccgatagcttggtcgacaacggggtcgacgtggtcattgaccagtgtttgcatctggataccccgcagagcttcttcatgtacgccggtgccggctccggcaagacacgttcccttgttgacgcacttggaaaaatccggctgcgcgagcgcgagcggctggtgtataaggggcaacgcatcgcggtcattacctacacaaatgccgcatgcgacgagattctccggcgaatcgaatttgacgccctagtcgacgtctcgaccattcacagttttgcctggcgcctcattaagggattcgacgatgaaatcaggacatggctgaaggtttccattgccaaatcgatggcgaaacttgcagatgcaatggggcgtgcgcgtgaagagaacaagacatttctcaagaacaaggtcgacttcgagcgaaaggaaaagcgtcttgaagcgctcgattcggcgctgtcgttcaactacagcccatcagggacagaacgcctgcgggggtccctgactcaccaggaagttatcggcatggccggagatttcctgcaaaaagacccgttgcgcgaagtcctcgtcgacctctatccagtcgttctcatcgatgagagtcaggatacgcacgaggaagttatgaaggcgcttctctcgatccaagcacacgcaagcgaccggttcgccctcgggcttctcggcgacacgatgcagcgaatctacactcatggcatgcctcgtctcgaggaggcggtaccaagagactgggcgaggcctgcaaaggtgatgaatcaccggtcggccgagcgcattgtccgtctcgttaacaccatccgctcggaggtcgatgggcagaggcaacgcgcccgccaggacaagcccggcggattcgtgaggatattcatcaccggccttggtgcagccaagtcgcttgagctcgaggagggcgtggcttgcaggatggctgagatcaccggcgctgccgagtgggggctcggaccggaacaccgcaagacactcgtcctcgaacatcgtatggcgtcccggcggcttggattcgatgacgttttcgggcctttgtatgagaccgaaacactgaggacatcgctcttggacggtgtgctgggacctgtcaattttcttgtagacgacgtgctacccatcgtggaagcgggcctctcaggtgacgagtttgcactggtcgacagcattcggacacgttcccccctctttgacggtaaggcgcttgccgggcgcgccgatcagttggacgcagtccgagccgcaggcgatggtgcacgacgcttgaccgagcaactgcgtgatcgcgaccccctactgcgcgaggtcatcagcggactgcaggagagcgggctgctggccgttccaaatggactgctccaagcccttaacatgcaggagcctgacgacggggccgcccccgaagacgaccgccaggcgcaagaaatgcgcgcctggtgcagagtgctgcaagcgccattttcccagattcgcgccatggccctttatgcgagggggctatctgcattcgatacgcaccaaggggtaaaggggcttgagtttccgcgggtgctggtcgtcatcagtgacgatgaggcgaacgggtttaccttcagttacgacaaggtcctcggtgccaaggccaccgataaagacgccgagaaggaagccggagggggcgattcccagcgcgcccaaacacgccgccttctatatgtgacctgcagccgggcggagcatagcctggccctcatggtctacgcccagaatcctgcagccgtccgtgatgaggtcatccgcaaagggtggttcggtgcggatgaggtggtcctcatctga

SEQ ID NO: 78306 - DNA, 1962 bp, Escherichia coli
atgaaaatagagaagataaagctacagaattttcgttgtttcgggcatgaggtggtcgagctaaattttgaggaagaactgacaatacttgtcggcggaaacggctccggaaagacggcagtgctgcaagctgtgtccaggttgtttggtacaacatcagcgcagcgatcggtacagcgtcgagattttcacatacctattgaccggcaggagctgcagtctggcgacagtctgtttgtcgaagcggtacttgccttccctgaactggaagagcaagacgcttctcctcttgatgccgttccggagttctttaatcagatggcggcttccggtgagggagagccccttaaggcccggatacgactacaagcaacatggacggatgacggtacgccggagggagcaattgaggaggatatacgctggataagagccctggatgataattttgaatgggatgactgttccagggttcaggctgtagagcgctcttcaatccagtttatttacttaccggcaaatcgtgatgcgacgactcaagtgaccgcccttctaaaagggcggttatggcaggctgccaaatggtcgacggcatttagggatgcaagctatgttaatgccggtcagatccagagcagtttcgaggaagaggagccgtcgaagtttctgctggagcgtctttcgaagcgttggcaacaggtccatgaggccgatacagacagtaaaccgcgtttaaggctcatcgagaaccgttttgaggagcttgttcgtaaagccgaatttacttttacgcctgatgaagaaggtcaggagcgtcgtttgtccgagctgagtgacggtcagcgctctctgttccatatcgctcttacagcggcaacgctcgaaaccgagcgggaagcattttctttgcctgctgatgacagctcatttgaacaggataagttacgccgtattcacctgacgattcttgccatcgaagaaccagaaaacagcctgtcaccgttctttttatctcgcatcatcaagcaggcgagagagattggcgcactgccttccgcgcaggttctgctatctagccattccccatctatcctgagccggatagagccggaggaagtgagatattttcgtatggaccggagcgctcggtgctcatcgatccgagaactgaccctgcctgaagatgatgttgaggcaagcgtttatgtcaggctggctgtaaaggcataccccgaactttattttgcgcgatttgtaatcctgggtgagggagactcagagcgagtagttattccgaaaattgcggaagagatgggtgtttcccttgatccatcattcgttcccgtcgttccgctcggtggacggttcgtagcgcatttctggcggctgctgaatgatcttgagattccacatgccactttgctcgatcttgatctggggcgccgacatggtggggcgaatgccatgagaagctgccttcagaatttggccgctatcgggagtaatttggggagcaccaatggtgctaatgctgctcagcttaccgaccaacagctttataatgaaggcctgcaaggtcaatggcttcaagcattcaggagggaaggagttttcttttcctatcccattgatctcgattttgccatgttgctcgcctttccaaccgcttatcaggttgccaatccaggtggcaatggaccccagagtagtgctgctgctattcaagccaaaaaggtcagtacgctgaaaacaggtggtaatcctgccttgtataccgcgcattatgatgacgctttcaaatggtatccgtatctgttcctgagccgcagtaagcccgaaactcaccttgcggctttttcccgtatcgcgggcggcggtgttactgcatccgctcctgtagagctcagggcgctcattgagtacgttacggataagcttaatctgtcaggagagaatgaatga

SEQ ID NO: 78307 - DNA, 1866 bp, Escherichia coli; identical to SEQ ID NO: 72255

SEQ ID NO: 78308 - DNA, 1962 bp, Escherichia coli; identical to SEQ ID NO: 72254

SEQ ID NO: 78309 - DNA, 1866 bp, Escherichia coli; identical to SEQ ID NO: 72255

SEQ ID NO: 78310 - DNA, 1962 bp, Escherichia coli; identical to SEQ ID NO: 72254

SEQ ID NO: 78311 - DNA, 1866 bp, Escherichia coli; identical to SEQ ID NO: 72255

SEQ ID NO: 78312 - DNA, 1962 bp, Escherichia coli; identical to SEQ ID NO: 72254

SEQ ID NO: 78313 - DNA, 1866 bp, Escherichia coli; identical to SEQ ID NO: 72255

SEQ ID NO: 78314 - DNA, 1143 bp, Escherichia coli; identical to SEQ ID NO: 72590

SEQ ID NO: 78315 - DNA, 1866 bp, Escherichia coli
atgacccgcgtaagcagagacgactgggtacctcagggtgtcggtggtctggaagggagagcgtgggaggctttacgtgaaaccgatcgcagcatccttgtgaccgctggtgccggtgccggaaaaactgagtttctggcacagaaggcgacctatcttctgcagacaggtatttgtccggcacccaaacgtattctggccatcagctttaaaaaagatgccgcccaaaacctcgccgaaagggttgcaaagcgttgcccgagagatcaggcgcggcgctttgattcgatgacttttgatgcctttaccaaggggcttctggaccggtttcgtccggctttacctgagccgttcaatgcgcccggtacgtatcagattgttaatccgtttcgtagggattatgacgattttattgagcgacatggctatcacggagtgagtgctcaacagcttgagagaagactgcttctgacagacctgccaattgacttgtcaaatggatctgaagtacatcgtgcgttagcagattactggcatgaacaattcttcgggggcgacgagatatccctgtccttcccgatgataaacaggcttgtaaaactgctgcttcaggaaaattcatatatccgccgggccttacaggcaacatatcccatcgtctttcttgatgaataccaggacaccacctatgcccagtatgacatgctgctaacggcattcgatggtagcgatgctgtctttacggcagtcggcgatgataagcagcgtatcatgggatgggcgggagccatgaatgacgcctttgaccagtttgaaaacgactttgctgccagacgcataacactgctttctaactggcggtcacatgtggatctggttcgtattcagcacgagattgcccgccggatagacgataatgtggaagaagtgcaggcacaagggacccgtgaaatcgaaggtgaggtttctgctatctggcaattccggagcgcagatgacgagaacaattatctggctgaatgggtgagccgtgaggttcagtcagagcgtgttgcaccacatgatgtagcgattctgatcagaatgcgggcagatcaggttgagggtgaaatagccccctcttttgcggcacgaggtctcaggatcagaaatgcggcccggtcagtcggtgaaattcagatacaggatctgcttggtgaagagctgaccggtatatttgttcctttactccgcctgggagcgacggagcgaagcccggaaaactgggagcagacccagcagaactatctgtttttggaggctgccgatccggataacgatctcacgcaggaacgattgctggttaagcttgaagcattcgtccgtaaattaaggacagagctagcgcatcgccagcctagtccggattcggcggaagagattgcagagatgcttcttgaatttgtcgggacccctaggcttcggcaatcctttcccgcttaccagcgtgcaagagattttgagagggtgtggagtggatttgtcactctcctgaaagagtgtgcagaacacagcagcagctggacggaggcgctggatgagttcgaaggtattggccaggtagctctgatgaccgtccataaaagcaaaggtcttgagttccatacgatgatattttatgggctcgacaatcagacttggtggagccttacgccgcaacggggtgaagagctaaacactttttttgttgcctttaccagagcaaagcagcgtgcgtttttctcccagtgcgttgagcgagggcatgctattggctggatacagcaattattggccccggcgggagtcgaaaccatagatggtacgactatattgggtactacgtga

SEQ ID NO: 78316 - DNA, 1962 bp, Escherichia coli
atgaaaatagagaagataaagctacagaattttcgttgtatcgggcatgaggtggtcgagctaaattttgaggaagaactgacaatacttgtcggcggaaacggctccggaaagacggcagtgctgcaagctgtgtccaggttgtttggtacaacatcagcgcagcgatcggtacagcgtcgagattttcacatacctattgaccggcaggagctgcagtctggcgacagtctgtttgtcgaagcggtacttgccttccctgaactggaagagcaagacgcttctcctcttgatgccgttccggagttctttaatcagatggcggcttccggtgagggagagccccttaaggcccggatacgactacaagcaacatggacggatgacggtacgccggagggagcaattgaggaggatatacgctggataagagccctggatgataattttgaatgggatgactgttccagggttcaggctgtagagcgctcttcaatccagtttatttacttaccggcaaatcgtgatgcgacgactcaagtgaccgcccttctaaaagggcggttatggcaggctgccaaatggtcgacggcatttagggatgcaagctatgttaatgccggtcagatccagagcagtttcgaggaagaggagccgtcgaagtttctgctggagcgtctttcgaagcgttggcaacaggtccatgaggccgatacagacagtaaaccgcgtttaaggctcatcgagaaccgttttgaggagcttgttcgtaaagccgaatttacttttacgcctgatgaagaaggtcaggagcgtcgtttgtccgagctgagtgacggtcagcgctctctgttccatatcgctcttacagcggcaacgctcgaaaccgagcgggaagcattttctttgcctgctgatgacagctcatttgaacaggataagttacgccgtattcacctgacgattcttgccatcgaagaaccagaaaacagcctgtcaccgttctttttatctcgcatcatcaagcaggcgagagagattggcgcactgccttccgcgcaggttctgctatctagccattccccatctatcctgagccggatagagccggaggaagtgagatattttcgtatggaccggagcgctcggtgctcatcgatccgagaactgaccctgcctgaagatgatgttgaggcaagcgtttatgtcaggctggctgtaaaggcataccccgaactttattttgcgcgatttgtaatcctgggtgagggagactcagagcgagtagttattccgaaaattgcggaagagatgggtgtttcccttgatccatcattcgttcccgtcgttccgctcggtggacggttcgtagcgcatttctggcggctgctgaatgatcttgagattccacatgccactttgctcgatcttgatctggggcgccgacatggtggggcgaatgccatgagaagctgccttcagaatttggccgctatcgggagtaatttggggagcaccaatggtgctaatgctgctcagcttaccgaccaacagctttataatgaaggcctgcaaggtcaatggcttcaagcattcaggagggaaggagttttcttttcctatcccattgatctcgattttgccatgttgctcgcctttccaaccgcttatcaggttgccaatccaggtggcaatggaccccagagtagtgctgctgctattcaagccaaaaaggtcagtacgctgaaaacaggtggtaatcctgccttgtataccgcgcattatgatgacgctttcaaatggtatccgtatctgttcctgagccgcagtaagcccgaaactcaccttgcggctttttcccgtatcgcgggcggcggtgttactgcgtccgctcctgtagagctcagggcgctcattgagtacgttacggataagcttaatctgtcaggagagaatgaatga

SEQ ID NO: 78317 - DNA, 1866 bp, Escherichia coli; identical to SEQ ID NO: 72255

SEQ ID NO: 78318 - DNA, 1962 bp, Escherichia coli; identical to SEQ ID NO: 78316

SEQ ID NO: 78319 - DNA, 1866 bp, Escherichia coli; identical to SEQ ID NO: 72255

SEQ ID NO: 78320 - DNA, 1962 bp, Escherichia coli; identical to SEQ ID NO: 72254

SEQ ID NO: 78321 - DNA, 1866 bp, Escherichia coli; identical to SEQ ID NO: 72255

SEQ ID NO: 78322 - DNA, 1962 bp, Escherichia coli; identical to SEQ ID NO: 72254

SEQ ID NO: 78323 - DNA, 1866 bp, Escherichia coli; identical to SEQ ID NO: 72255

SEQ ID NO: 78324 - DNA, 1962 bp, Escherichia coli; identical to SEQ ID NO: 72254

SEQ ID NO: 78325 - DNA, 1866 bp, Escherichia coli; identical to SEQ ID NO: 72255

SEQ ID NO: 78326 - DNA, 1962 bp, Escherichia coli; identical to SEQ ID NO: 78306

SEQ ID NO: 78327 - DNA, 1866 bp, Escherichia coli; identical to SEQ ID NO: 72255

SEQ ID NO: 78328 - DNA, 1962 bp, Escherichia coli; identical to SEQ ID NO: 72254

SEQ ID NO: 78329 - DNA, 1866 bp, Escherichia coli; identical to SEQ ID NO: 72255

SEQ ID NO: 78330 - DNA, 2190 bp, Staphylococcus aureus; identical to SEQ ID NO: 71982

SEQ ID NO: 78331 - DNA, 1794 bp, Staphylococcus aureus; identical to SEQ ID NO: 71697

SEQ ID NO: 78332 - DNA, 2190 bp, Staphylococcus aureus; identical to SEQ ID NO: 71982

SEQ ID NO: 78333 - DNA, 1794 bp, Staphylococcus aureus; identical to SEQ ID NO: 71697

SEQ ID NO: 78334 - DNA, 2190 bp, Staphylococcus aureus
atgtttatatctactcttcaaattcgaaattttagaaattatgaatccgaaatctttcgattcgataatgagacaaatactattataggtgagaatgattcagggaaaaccaatgctcttactgcattgagaatcttattagatgatagttattactatagtagtaaaacactgaaagaatcagatttttttcatggaattcaaaatgggtggcaagggcattggattattatctctgcgacatttgaaggaatcagcgaagaagaatttgacaatgagatttgtgcttccatttctttaaattctgaaagtcaaacaatcttagaagaattgatttcaaatgcagataaaggtgtaggtagtatttctctatttattagacctaacaaagctattagaaagcaattatttgatatttccactgaattagactctcatcaatttaacgaatttagaaattctattcgtctatccgactatgaattttactacacatctaaatcaaatctaaatttctgtatcaatgaaaattatgataaattggtaggaagactcaatgacaatatagctagtaatcctgaagaagacgatgaagctcttttgggctcaagaattgacatgtcagatattttcaagcatatttcggttgtttatgttgacgctcttcgagatgttcttagagaaatgaaaaacaatcgaaaccctgtcaaaagaatcatggaaacaattgaatcaaaaatatcatcagataatgttgagtcattaaaaacaattatacagcaattaaatgagactattaccagtgttcctgaaattaggaaaattggcgaaaatattaatcggcaactaaatagcataattggttcagtgtattctcctaatcttcttctttcctcaactatgtcagatgatatgggttctttagcaaaatttctttcaatgaagccagaacaaaatatcgacttagacttactagggttaggacatctaaatatgatttatttagctttgaaaatagtcgaatttgaagcgtgtcgttcaagagaactacttaatattatgttgattgaagaaccagaagctcatattcatcatcatattcaaaaaactctgttcgaaggattaaatcttcaaaaaaactatactcagattctcatgaccacacattctgtacatttagctgaagtgtctgaaatatctcggatgaatgtattaaaatcgtttaatggcaaatctatcgttatgaatccagcaaataatctgaactcatttgctaaagaaaagttaaaaaagaacaatctaaatctaataaacgcagtagagagatatttagatgttaaaagaaatggattgcttttttctaaaggtgttatcttagttgaaggagatgctgaagaaatacttattcctcaaatagtaaaaaaattatttggtataaacttagacgaacttggaataggtttgattaatgttggtagtacttcgtttgaatatatcgctagcttgtttgacgatgatagaatacagagaaagtgtgctattgtaactgatttagatgaacaggcaatcccatcagaacatcgattgtataaaagcactgcacaagagaaaggtcaagcaagaaaagaaaaattatcctccctttttaatgaaaacaattgggttaattgtttttatgctaatacaacatttgaaattgagtttttagatgtgaataaagaaaatattctaacttatgtcagtccaattatagatgacgcattcaaagataaaaaaacaataactgcttataaagaagaaatacaaagtgaacaatatttagaaagaaatttagcgatgttaaaactagccaatcatgttggtaaggggtggtttgcaattgagttaggtgaaaaaattgactttttaatcaaaattcctaagtgtattcttaatgctattgcttttgcatgtcaggaaatagtagatctctcaatttataaaaaaattctactccatacaatcgacttgtacgaggaaactacagaattgtcagctttatcagctagtttaaaaacaagtgatacagctgatttgaatatagcaataatttctttattagagtactttggtaaagatgaggatgttgtgtatctaatcaatcagatagaaaattacacaaaaatactttatgctgaggtttcaaaatga

SEQ ID NO: 78335 - DNA, 1794 bp, Staphylococcus aureus; identical to SEQ ID NO: 71697

SEQ ID NO: 78336 - DNA, 2190 bp, Staphylococcus aureus; identical to SEQ ID NO: 71982

SEQ ID NO: 78337 - DNA, 1794 bp, Staphylococcus aureus; identical to SEQ ID NO: 71697

SEQ ID NO: 78338 - DNA, 1911 bp, Candidatus Magnetomorum sp. HK-1
gtgaaactatcaaatattcgtgtatcaaattttatcagttttggtgaagagcctacaaacttttcgtttgaatacattacttttcttatcggttcaaatggcacaggtaaaacggctgtattacaggcgctttgtcgattgttttcttttaacccctcattgagaaggattaaaaaatcagattttcatgtgcctcaagatgaaacagagcctccagaagaaagggaattgtggattgaagcggattttattttcaatgaattagcggatggagaagatagtgcaactattcctcctcattttgcacatatgcggcttgatgacgatgaagatgttccgcgtgttcggtttcgtctggaagcttcaatgggtttagacggtgatattgatgagaatcttaattatgtccttgatttgaatgaaaacggagattctttaaatactgccaaagtagcacggtctgaacgaaatagtatacaggtgcattatttaccagcgaggcgagatccatcggtgcatattgcctttagtgctaatgctcttttagggcgactattgagggctgcaagctgggacgacgagagagaaacgattaaaacgcatacagaacagatcagcgaatgtttgtccgaaaacacgtctattgatgtactaagtaagactatacagcgttcttggcaaaaatttcacaagggagattattttaacgatcctaaagtaacattcgcctcaaatgagattgaggcactgttacgtcacttgtcggtgtcatttactccaggccatgatgatacacttgttgattttttgaggttaagtgatggtcaaaaatcaatgctgtatctgtcattggttctttcatcgcaagcaattggtcgagctgctttagaaggggatgattcatttgatattgacaagttgcgtcctccgatttttacgttaatcgccatagaagagcctgaaaatagcctttctccatattatttaggacgcattgtaagcgctttaaaagaagttacaggcaaagaggatgctcaggcaataatagccacccatgctccatcaattttgcgtagaattgaacccaagcaaattcggtatttaagattgagtgatagccgaacaagtcaggttgaacacattcaacttcctcctattgcagatgaggcccataagtttgtcatacaagcagtgaaagcctttcctgaaatttatttttcaaggctcgttgtgcttggtgaaggagatagtgaagaaattgttttaccgcgcttgcttgaagcaagaggctggcctgtcgatgaagcttcgattacagtggcaccgcttggcggcaggcatgttaatcatttctggcgcttgcttgagggattaaatattccctatgttactcttttggatcttgatgttgggcgatatcagggaggctgggggcgtgtaaaatatgcaaatgaccagttgattaaacattgtcctgaaaagcaactaaaagacgggtatgaggttattcctaaatggaacgatccaaaacagaaaataacaaagtttaaaaattatcttgaaaagttgaaagaacgtggagtgttcttttcttatccgttggacttagatttttctatgattaccaatttccctgaagcctatgagattgaagatgacgatctaacaactcccaaagcaagcggtctaaaatctgtattgggaaaaaaaggagagtcttcagagtataaagatcatgaattagaactttttaactcctatcacgacttattcaagttaggtagtaaaccagcagcgcatattaatgccctttcaaatcttacaaatgagcaattggcacaggaaatgcctctatcacttgataatatgattgatgctgtgattgaaaagcttgaggagttgccagagtga

SEQ ID NO: 78339 - DNA, 1662 bp, Candidatus Magnetomorum sp. HK-1
gtgatcccaaccgattcatggcaaccagccgatgggctggtactggaacccaatgcatcaagatctgcaacagaatgctctaaaagtttggccttaacggcggggcctggtgctggcaaaacggaaatgctggctcagcgcgcggattttctgcttagaacaggcaagtgccgttatccaaaacggatattggccatttcttttaaggtcgatgctagccgcaacctcaaggaacgggttaagcggaggtgtggcgctgagctggcctcacgctttgatagctatacatttcacgcttttgcaaaaagaattattgatagatttcgaccagtattaaccggccatgatcgtttggaaccaggttatacaattggtgaaccgcgagtaacaggaaaacagattggctttggagatatggtatctcttgcaatccagattttactggattctgagattgccagaaatgcgttacgtcaaacttacagcgatgtttttcttgatgaatttcaggattgtacaaatgttcaatatgatctcgtcaaaaagggtttccaaaatacgggtatccgacttaccgcagttggagatactaaacaaaaaattatgtcctgggcaggcgctttggaagggatttttttaacctttgctcaggattttgctgctgatcagctaaacttgtatcgtaattttcgatcaaaacccgaattgttgcggatgcaaaacgagataatcagaactttagatccagattcagtaatgccggatgatcaaattagcggtgagggaggggaaatatatatttgttcttttagtgatgaccaagaagaagctgaatctctggtagagcagatttcttcatggatacaagatgataatgttccattctcagaaattgcaattcttgtatctaaacaaattgatttgtatgcagcgccacttatgaaagagcttgagcgtaactctattccatacagaaatgagcatactatgcaggatataattgttgagcctgctgcccgattagtggtcgactatttgttgtgtctgtacggaaaacgtgagccagaggcttggagacggctaatggagttgcttattccattctcggatgatgaagaaggtcaagatgttctatattctgattggcagagctttattcactcggagaggaaagaatctctaaaagacacaagtgacttgagttttccaaaaagatgggaatttgtaaatcggtttttaaagaaagtaggtaagccgatcttaacagctttgtcacatgactatgaagcaaaagcgaggcttaaagaggtttttaaagaaactggcaaaagagtaaacgaattacttgcacatgaaccagagttaacaaaggcacttgctcgattttcagacgaccaggcagtacgtatattaactgtccataaaagcaaagggctggagttcagcaatgtaatattcttggcggttgaagatcaaactttttgggggaaggctgatgaagagcgcagcgcatattttgtcggggtttctcgtgctaaagacaagcttttattgacacatgttgatagacgaccaaggcatagcggtcattcagggatttggaatatttcaaggacaccgcatgaagagtttttaggatatgcagaagcagtactaacataa

SEQ ID NO: 78340 - DNA, 1926 bp, Vibrio cholerae; identical to SEQ ID NO: 72180

SEQ ID NO: 78341 - DNA, 1662 bp, Vibrio cholerae; identical to SEQ ID NO: 72181

SEQ ID NO: 78342 - DNA, 1872 bp, Pseudomonas aeruginosa; identical to SEQ ID NO: 73878

SEQ ID NO: 78343 - DNA, 1656 bp, Pseudomonas aeruginosa; identical to SEQ ID NO: 73879

SEQ ID NO: 78344 - DNA, 1926 bp, Xanthomonas campestris pv. campestris
atgcagctggcagtcgtcaggattagtaatttctggtccttcggtccagaaccagttgaagttaagctggattcgatgacttaccttctaggcccaaatggggcgggtaagaccgccgttctaacggccttggcgcgtatgttcggcaccacagggggcatgcgcgctgtgctcccttccgatttccatgtggcaatgggcgaagttccagcggaggggaaggccgcgagtctatggatcgagacagatttcacgtttcccgaggtcgaggagggcgagggcaccgcagctgttccgatcttcttctctcacatgcagctccaaagtgcgggcgaagttcccggggtgcgcattcgcctcacggctgagatggatgaaagcggagagatcgagcaacgcctagaatacgtgttggcagccgacgaggacggcgcgcctacgcagcttcgaggtatgcccaagctggatcggcaagccatccaggttcactatctcccggcccggcgtaacccagccgatcacatcgcatatagcgcagcctcactgctcggaagggccctccgagcggcagactggaccgctgagcgcaccaaggcaaacgatctatctgggcagctcggtgaagcagtcaccgaaaatgcgggcgttgcagcgtttggtaaagcacttacagttgggtggggtaagcttcacaaggggaagttcttcgccgcccctagtatcgcttttggcacaggcgggctcgctgaggtgttgaagcaagtcagtgttcgcttctcgcccggtcacgaaacgccctcagtggatttcgagcgcctcagtgacgggcagcagtcattgctttacatctcgctcgtgttggcagcacatgcggttgatgtcgcggcgtttgccgacgaagagtcccctttcgaccgggcacggctgaggccggctgcgttcactttgttggcggttgaagagcctgaaaacagtctttcgccccagtatctaggtcgcgtcatccaatcgctacgagacctcaaaaaagagtcaggagggcaagcgattgtggccacgcactcgcccgctatcttgcgcagagcgacccctgatctgatccgccatctgcggcttgatgctgatcgaactacacaagtcagccaaattgttcttccggatgaggcgcaagaatctggaaagttcgttcggcaagcggttatggcctatccggaggtctacttcgccaagcttgtcgttctgggtgagggcgacagcgaagacatcgtgctgcatcgcatgcttagcgctatgggcatcgaggctgacgctgccagcgtctgcgtggctccgctcggcggtcgtcatatcaatcacttctggcggcttttatcgagcctgagtgtgccttatgtgacccttctggaccttgactacggacgctttggtggcggctgggggcgcatccgcactgctcatcgatatctgcgttcttatccgaatggtcatgctattcgcaccatagctgagctgaaagtgatgcccggctggaaagcttcttgcctaacccctgagttcaaggcagagcgagaattccttatgcaggccggtgtcttctttgagtcgccaattgaccttgactacgcgatgataatgaaattccctgaaacatacgggattgaccagtatgttcctacggacgaagaagagaagaaaagcattgcaaaagcggtcctgggtaagaatggaagtttcgaactgttcgagcccattgataagggctactttcgtgactatcaccgaattttcaagttaggcagcaaacccgcagcccacttacaagcgatgtccaagattacggacgagcaactgttaaatggggcgcctaaatcgttgaaggatttgtgtaagcgcgtgatcgcgatgttggcggaagatgttgaatga

SEQ ID NO: 78345 - DNA, 1644 bp, Xanthomonas campestris pv. campestris
atgattacgccagctcagtggagtccagttgccatcgaaatgttagagcccggagcgaaggctgcgattacggcagttcatggcaacagcatagtcattgccaatcccggatctgggaagacggagcttttggctcagcgcgccgattttttgttcaggacaggcacgagccgttatcccaagaagatcttggccatctcgttcaagacagacgccgcgcacactcttcgtaggcgcgtcagggatcgatcaggctttgaccacgcccatcgcctcaatagcatgaccttcgacgcatttgcacgtcggatcatcgcgatctaccggccgcttctaaagccgaaggaccggctggatcatgggttcaaagtcggcgtgacccgcgtcaatgccatccaagtagcgttcaaggagttggtgcctctggcgcaacaactcatcgagcagcatccgatgatcaagcgatccatcaacatggcttacagtcatgtgttcttggatgagttccaagactgcacaagcgcgcaatacaagctgatccacactttgttcaaggatacctccacctcgatcacagctgtgggagacgcgaagcaaaagatcatgggctgggccggggcgctcgatggggtgatggggaagtttgctgatgagttcgccgctgtgccgttgaagcttgtccagaactggcggtctgctcctgccattcgtcgggtgcaaaaccgaatgatcatccagatggagccggtctcggctgtggcggagaacgatattgttggtgacgaggggagagtctatctggctcacttcgctgatgagcaggtagaggctgcgcgtattgcagaaaagatcgaggaatggattgccgaaggcatcgcaccgcacgagatcgccatcctccacattcgccaaagcgctatgttcaatcaagccatcgacggtgagttggatcgtcgtagcattccgcgtcgcaatgagcaggcgctacaagacctggtgtccgaacccgtcacagagtttgtcgtcaaccttttgcgcgttcttggtcgaaagcctgcgccaagcgcctacgcatcggttctgtatgctttgactgcacaggacgatgacgagcaaggcgactggatcaggctgcttagtgtcgctcgcgatcgtgtggctggggggctctctgctgatcacgcggagcttgccttcgagcagttgcaggaagtcatggctttgattccgattgcaacactgctgttgctctcttccgaatacgattccgggcgcgttgccgaaattttgggtcaggtctacgaggttctcgggaattttattcatcagcatcacgatctggaccaagctctggcaagatttctggatgaagggtcagtccgggtgatgacgatccacaaatgcaagggcatggagtttgagtgcgttgttttgccttgcacagagcgggagacttggtggggcgatcaaaacgacaaccgaagcgcttacttcgtcggtgtgagtcgcgccaagcagaacctagtcgtgacttatgtggaccgaagaggtgctcccattggggctaacgcacagtgggatgtcatacgtcatccacaagaagaattcctaggttatgtcagagcggaagcgatcccgctctga

SEQ ID NO: 78346 - DNA, 1905 bp, Pseudomonas syringae pv. syringae
atgtatctacggcaattggatgtcactggattcaaatgctttggtgagccgttcaccatcgaatttcgagacgggctgaacgtgctcgtgggagagaatggggccggcaagactggcgtggtcagtgcagtgcgccagctcttcaacgactcggagtcaggcaagcgaatcattagtgagcgcgatttctaccggggttttgagccgggcgcggtcgctgctgaaagcacccagattcaggcgacgttttcaggtctggatgatcaggacgccattgcgttcgaatcctggtgtggaaatcacgacgaggccaagctgacttttgaggcccgcaatcaagagtctcgcgggcgcttcaggcaccacacctacgcggggcacgagcatgccaaaccgttcgagtccgagacgctggactacatccattgtatttacctacctccgctgcgcgatgccgagaacaagttgcgcgaaggtcgccagtcccgccttgcccggctcatgaaggccctctgccgcaaagagctcgctgaggccaggaaggcacagactcttcacccgctggaagagcatgtcggaaacttcaatcgtgagctttcacagagcgacgaatttgcgatcaaacaagccaatcagcgaatcggagacaacctgaaggcagcgctggggctcaatctctctcagggcaccatgattcagttctcagaagtcagcttctcccggatcgtggagggcttgcggcttctgtacttccctaacctcagcgaggctgacacgacccagttccgatcgctggaggagaacagccttggctacaacaacctcctgtacatcgcgtcgatcctggctgaactgatcctggaggaagaagaggatcgaggcgaagagacctatctgcggctcctgttgatcgaggagccagaggcgcatcttcatcctcagcttcaactgcgcctgctgcggcatttgaaaacggtggctgaagaacgtggcatccaggtcatcatcaccacgcactcaacggtcatctctgccgccgtctccctggatcacctcatccacatttcaaatgacgcaaggccagtagcaataccgctcagcgcgtgcggccttcctgagcacagccgccgctttgtggatcgctggttggacgtcacaaaatccaacctccttttctccaaaggggcactgctcgtagaaggaatcgctgaggcgatggtgctgccagagctggcgcgtattgtcctgcgcccctacggagaggggaagaactgcctggacgactacggcgtctcggtgatcaatcttggtggcatctacttcaatcatttcatgcagctgttttgcgatgtcacgggcggccagccaggcgagaatgtcccaatcaggtgtgcagggcttaccgacaatgacccaccgaaatctatcaggtcggttgcaggcgatgacggtaaagaaatccccgttccgtttcttccccatgatgatgacctccttgtaggcgacaatccggccttggcattgatagggccgatcagccagtcgcagttcggcaggttgttcgtaggtaagtacaagaccctcgagtacgacatcgcgatggagggtaacaacctcagattgatgtcgacggctgcggccactctctggcctgtgcaaggcggggaagtggtgagagagctgacaaggcgggctggactggactactcgaccatgagttcaggggagagggcgccgtacgcgaatgacatgcttgatcgaatcgaaaccaaagaaattggcaaagggttctatgcgcaggcattcgcggacgcgctggctaacgtgagggatgactttatcgtgccggaatacatccgcttagccgtcctctgggcttgtgggatcgaggaacaagccgaatga

SEQ ID NO: 78347 - DNA, 1752 bp, Pseudomonas syringae pv. syringae; identical to SEQ ID NO: 72705

SEQ ID NO: 78348 - DNA, 2136 bp, Pseudomonas savastanoi pv. glycinea
gtgcatatttcaaggttacaactcgtcaactaccggaatttcaagtgtgcgaatgtcgtattcaacaagggcgtaaacacgatcatcggcgagaacggatcaggcaagaccaacctgttccgggcgttgcgcctcttgctcgacgacacgctgctgcgcgcggcatataggctcgacgagaaggacttccaccggggccttggcgactggcgcggtcactgggtagtcattagcctcgagttcgatgaggtatcccaagacgaagcgattcaatccctctttctccatgggaccggcaacatcgccgacggcgcgatcggcaaggcgacctacaaccttatttttcgccccaaggcggcagttcggcggaccctggccgaccttgccgccggtgacaccgtaggactcgccgaggcacgttcgaagatcaccatttcggattatgaaacgatcttcaccggcaagagcaccgcaaacttcctcgatcccgaaacctacaggcaactggttggcgacttcgatgcggtaatatttccccaagaactgacgaaccccgctatcgggggcgtcatcccgggcatgctctcgatctcgcgcgaagtgtgcttcaccttcgtgcaagcactgcgcgatgtggtcgccgacttccagaacaaccgcaccaaccccctcctaactctgctcaagtgtagaagcggtgagatcgatccgcagagcttcgagccgatcaccgcgctagtcaaagggctcaacgatgcaatcgagggcctaccagatgtaggaaccatccgcaccgatatccgcgacaccatcaccgatgcggcaggcgagacctactctccgcgatcactttcgatccgctcggatctgtccgacgaggccgaccgcctattccagtcgctcaagctgtttgtgggcgagagcgaggaagaatatgagggcgcgattcacgagttgagcctgggcggtgcaaacctcatttacctgacattgaagctgctcgagttcaaatatcagaagcagaaagagtccttcgccaatttcctcgtgatcgaagagccggaggcgcacatccacacccatattcagaaaacactgttcgaccggctgaactttgatgacacccagataatctattcgacccattcgacccacatatccgaagtgaacaacgtcgtgaacatcaacatcctcggccggcaggacggacgatgcgaggtgtttcagccatctgcgggacttgacgccggccagattggcaatatccagcgctacctcgatgcggtccgcagcaatctgctcttcgccaagagcgtggtcctggtcgagggcgacgccgaggagatcctcatcccaatcctcgttaaaaaagtgttcgggctcagcctggacgagctggggatcagcttgatcaacatccgcagcaccggcttcgagaacgttgcggtgcttttccacaacgagcgcatccgcaagcgctgcgcgatcatcaccgaccttgaccgcgcatttatcgatacgaccacggacatactagacagtgacgataaggcggccgcgaagaagaaagcactggggtcacagatcgctggactccagcgcgaggcagcgctcaaggagttgtgtgcccggaatacctggctgacggcgcacttcgccgaccacactttcgaggtcgatttcgtctccgccggcaatgtcggcactgtcgtttcggtgctgggcgacgtctataaggatggcggcaccatcgcgacgtctaagatggagctggaatcgggcgacatcgcacgtttcgggacgcgcgtgctgacgatggcacgttacgccggaaaagggtggttcgccatcatcctagggcgaatgatcacgccagaaacttcaatcccggattacatcctcgacgccatcttccaagcgcatatcccggtatccatccatacatgggcgcgtgtgctggactatcgggtctcgatccttgcggcgtcgcaactacacgcgctaggagacatcgacgcgatgcgcgcgcaaatcagacgctaccatcgcggcgagatcgactttgcaggtgtccgcgccgaaatgctacatgcctttccggcagacggcatcaacaccattctggcgggcttctag

SEQ ID NO: 78349 - DNA, 1812 bp, Pseudomonas savastanoi pv. glycinea
atgtttgtctgggacaggaaggatctgaacgacgcccaagtcgcagccatcgagcatccaggcagcgtcttcctcgttgcctgcccggggagcggtaaaacgaggaccctgacctacaagatcgcccgcctgttgtcggagcttaagtcggacaaaaaacgcgtcgtcgcgatcacctacacgcaccgggctgcggatgagattcacgaacggatcgagcagcttggcgtcgatacgagccagctttggattggcacgatccactccttctgtctcgaatggatcttaaagccctacggaatttatcactcggagctcaagcacggtttccgggtgatcaacgtccatgacaccgaacgaatgcacgaggagctctgcagcgcggtgcagggcactaagctcagcagcttcgactgcgcatattatttcacgccgaacggctatgtcctgacatgcaacaagaccaacaagcatgaagcaattgggggagtattgcaggcatattggaaggagcttcgtgccgagcggcaggtcgattttgaactgatccttttctacgcctaccaacttatcgagaattatccgtcgatcagcatgctgctgggttccatctttgaatgcgtgctcctggatgagtttcaggacacgcgggaaatccaatatgcgatcctcgcatcgatcctgaaagcgtctaaagacggtacgtccgccttcgtcgtaggcgatcctaatcaggcaatctatggctcgcttggcggctatgcgatcacggcggcggactttgggacgcagtgcggcatagccttcaaggaaatggagctatcagacaattaccggtcgtcatcgcgcattgtgagctatttcggcaattacaacgtcttgccttcgaagatcgagtcggtgggaaaggacaaggactacgcgagcgtggtgtcgttcgatcaccagacgcaccgcgatgcgctggaggaagagcttgtaaggctcatcaaattcaacgtcgaaacgctcgggatcgctcagcatgaagtctgcatcgttgcgccttggtgggtccatctcgcaagcatgacacgccggctggtcgcggcgcttccggcctattcattcgatggcccgggcatggtgcccttcgcgcgcgatgtcgacaatttctggtacaagctcgctcggattattctgacggaggcgtccccacagctctatgtacgccggatgcgatgggcgggagaggtaatcgccgacctcagagatgcgggcgtcgaggttccaagtttggaccgcaagacactgctgcgcgcctgcaacgccatcaccatcaccatcaccatcaccgagaccgatggcttggccttcctccggacgttcttcgaccagctatgttccactttcgggattgatcgccatacctacgcggcgcttcaagagcatcacgacgctttctttgaatgctcgcagaagcgcatcgataagctcatcaaggaaggcgctgaggcgattgctgaattggggatgttcaggaaggtctttgcggaccggactggtgtcacagtatcgacgatccacggggtcaagggcgccgagtatgacgcagtgatcgcctatggcctactagaagggatagttccccacttcagcgatccgaaccaagccgagacagcgaataagctcatgtatgtggtgtcgtcgcgggccagaaagaacctacatctgatctctgaacgcggtcgcagtcgaggctggagcggagattatcaaccaaccgacgtccttactggatgtgcattccggtacgaccagctttccacctga

SEQ ID NO: 78350 - DNA, 894 bp, Pseudomonas savastanoi pv. glycinea
gtgctcagtcgtgtgaacccgcgtgaggtgcgttactgccgatgtgagcctaagacacgggtctcgactgtcaaaaagattaggtttccagtcaacgaggtagatgcgagcaaatttgttcggggagccatgctggcgtatccggagctctatttcgctcgatttgtactgcttgttgagggagattctgaaaggatcgttctgccaattctggccgaagcgctcgatttgctgattgatccggccttcgttgccatcgtccccttgggagggcaccatgtgcagtatttctggcgtttgctaaaacacctgggtatccctcatgccaccttgctcgatctagaccttggccgtgatggcggagggtttggtcggattaaaaccgccattcaaaagctaattgagtttgacgtgccaaaaaccgcagtacttgagattgataaaggcattttgagtgatacagatcttgaaaaaatgcacgagtggtcaactactggtgatcacgcaaacctccaggcatggattagcaacaacttgagaccgcatggtgtgtttttctctgcgcctttggacctcgacctagccatgcttcaggcattccctgacgcgtatgcgggaatcattccaaaaggaggcggaccgcgcatggctgaggaaaaggccgccgatgctgtactaggcaccgcaggtccgggactcggcgcttacactggtccgttcgaggtgtataaagcgctgttaccggcttaccgataccactttctcaccaatagtaagccggccacccatttggcagcactatcgcggttaaagcagaaggacctacgtgaaaaaatgccggcagttctagctgaggtgctcaagcacatagaagcttcattgaggcgcgactag

SEQ ID NO: 78351 - DNA, 1671 bp, Pseudomonas savastanoi pv. glycinea
atggccgtttcgtcacttcgagttcgaccagaagattggacgccgattggggtaaaatctcttgaagccaatgctcttaaagtcgtcagagcgggcataaatcaatccgtcatagctggcccaggggcaggtaaaaccgagctactggcacagcgtgctgcctttttactccagacggaggccgcaccaacgccccggcggatcctcgcgattagtttcaaacgcgacgcagcctccaatctagctgctcgcgtccgtaaacgttgccatagcagtcacgccagccgattcgactctatgacttttgacgcatttgcaaaagggcttctggaccgcttcggccaagcgttacccgaattctggcggccacgcccaggttacgagataactacatactacgagagagattatagaaattttctagatctaattgcgggatctcctccaggggatataggtacgaaagcctctctgcgcgcgattggggcgaagtcgttcgagcgaaagcacctgctgggagcccccctacccgttgcggcttggcctaagcccgacgtcgctcaatgggcgatggcgcgtttttggcactattcactacacgaaggcaagaagagtgtattgacgttccctatgatcggccgactagtagagctcctacttcgaatcaaccctatggtgcgggacgcactgcgactcacgtattcgcacttattcatggatgaatttcaagacacaactcaggttcaatacgatcttgtgcatacaattttctgtggcactgacacagtggttacagctgtaggtgacaacaagcagcagatcatgcgctgggcattggccatggatgatcccttctccgagtttgacgcagattttgggggacttcgaacgacactcttcaacaactatcgatcatcccctgacttggttcgtatccagcacgtgctagctcaggcattagattcaggtgcgatggagccgatatcccaaaccgaaggtacgattgatggggagagctgcgtaatcctcgactttccaagcccaaaaactgaagcgcgacatctggctaaaactatttcagcggccattgctgacaagaaactgctccctcgcgattttgtcgtactcgttcggcagaaggccggggactacgcagatgtattgagaccagcttttgaagctgaaggcctttcactaagaaatgaggctggaactgctggacaaatcatgttgcaggagttgatgaccgaggatctgtctaagcacttagtttcgcttctccgtctcgcaatgaacccgcgcgctggacgccactggtctaactgccagacatggctcgctttattgcgcggcgtggcagccgatgaacctggcgttcagcaaaaactagcgattgacttagacgcgttcgcaagagccctcagcgcgaactaccccacccctccaggcgatgaagctacatcaaggtcattggttaccgaggtgctgaacttcttaggccgtgagcgtcttagcagctcctatccgagctatgcacacggggactggctagacacggttatagattctgcattgaaacatttattagattgctctttaaacagtatcgactggtgctccaccctaggagggtgtagacaaaataaattaaactttcactcccttgtctga

SEQ ID NO: 78352 - DNA, 1920 bp, Pseudomonas savastanoi pv. glycinea; identical to SEQ ID NO: 71928

SEQ ID NO: 78353 - DNA, 1683 bp, Pseudomonas savastanoi pv. glycinea; identical to SEQ ID NO: 71929

SEQ ID NO: 78354 - DNA, 1335 bp, Pseudomonas syringae pv. cilantro
  modified_base (89)..(89): a, c, t, g, unknown or other
atgcggctctgcgttcaggtgaatagtacggcacgaccagtctctttccgcccccgatatacttttttaggaaaaaccggagaggcganaactatcctgacaccgggggcaaccgtcacgaccttcgatgtcgagcggctgcttaaagaccatacccaggttaggtatcggggcgtaaatggactgactttgccggaaagctacaacggtttaggcgtccgcaatttggtatacatccttcttcagttgctaaaattctttagggagtttcaggcaacgccagcagcggcaagtgtccacctcattttcatcgaggagcctgaagcacacttgcatccccagatgcaggaggtcttcatccgtcagctccatctaatcaaaggggagtttgagaagcagttgaacgacagtcggccatggccggtgcagtttgttatttccactcattctccgcatatggccaacgaggcgcgctttgaaaccatgcgttactttttgtcagctaccgatgaacacggtgtgcggcagtccaaaatcaaagacctcagacaggggatgggtagcgtttctctgccggatagagactttctgcaccagtacctcacgctcacgcgctgtgatctgttctttgcagacaaggcaattttgattgaaggcacttctgagcgtctgcttttgccgaccatgattgccaaaactgacttagctgcggccggtgagtccaagcttgcgagtcaatacgtgaccgtgatggaagttggtggggcgtatgcgcaccggttccacgaccttctctccttcctggagttacgtaccctgattgtgacggatatcgattccgttcagccaaacgaggacaagaaacgaaaggcttgtcctgtggcagaaggtcagttcaccagcaatggatgcctcaaggactggtttgaacccgacatctctccgacgcaactgcttgcaaaaacgtcggcagagaagactaagggaactagacgtctggcttaccaggtacccgaggtagccggtgggctatcgggcaggagttttgaggacgccttcattctggcgaatcttggcctatttgatttaggccatggtgatgcagcgcttttggcttatagacatgcggctgatcagaaaaaatctgagttcgctctgaaatatgcgattgaggatacaaattgggcggtgcctcgatatatcgcagaaggattgcggtggttggccgttggcgctccggtcgtcgatttgcaggcaactgtccaagcaatggccgccgtcggagaggctgccggtcaggtaatagccactgaaagaggcaatggtgatgcctaa

SEQ ID NO: 78355 - DNA, 1764 bp, Pseudomonas syringae pv. cilantro
atgcctaaccaccaggagagcccagcagatattgccggtcgacaagcactagaacgcatgttcgcatgtctcgacgaaggccaaagttttcgactcgaagccggagcaggtgccggtaaaacgtactctctggagaaggctctgagccttctgatcaaacgtaggggaactgccttggtccgtcaggggcagcagattgcctgcatcacttatactaacgttgcgaaagacgaaatcatctctcgtttccaggcccaccctgcgatccgagcagagacggtgcatggtttctgctggtctgttctcaaggattttcagacttcgcttcggactttccttagtggccaagacttttggcgagaacgctttgaacctctgggaggaataggcgggagacgaattcattacgaaatgggcatccctagggtctctgacgaagaagtctcgattcggcacgaagatgtgctcattttgatgattcaagcgttaccgtcgcagaaattcagggcggtgatcacctcgcgatatccaattttgttcatcgacgagtatcaggacacggatgagcacttctttgaagctttaaggtcatggtttttggatcgtgcagaagggcctttgattggtctctttggggatcactggcaaaaaatctatggttcaggttgtggcttggtcgaacatgaagctcttcatgtgatcgacaaaaacgcgaatttccgatctgcctctcgtattgtcgacgtgctcaatcacatgcggccggaattagttcagatggtgagtgaacctgaattgatcggtgaagctagagtgtttcacaccaattgttggcctggcgttagacgaacaggacagggtggcgggcattggaaaggtgatactagcaccgatgctgcacgggcatatttttcataccttaaagcgctgctcatcgctgaagggtgggacttctcccccaagaaaaccaagattttgatcctcaaccacagcggcattgccagggaacagggctacgattccattccaccaatctttgggcggtttaatgagccgtggttaaaaaaggaagatcctcacataaagtaccttactgatcatcttgaacccgcttgcgcggcatacgctcagcgccgttatggcgaaatgttcaaacacctagcgagtgaccgtccaacaatccgccagcatggtgataaagtggcgtgggtcgaagccatggacaaattggccgcgctaaggctgacaggaaccattggcgacgtaattgatcacctccgtagaataccccaaatgcaattgcccaatgccttgatgcggaacgagcaaaggttggaggctgctggggaagagatgagtgacgaagaaccacggcggattacgcagctgcgaaagttgcggggggtgtcttatcgtgaattgatagcacttgatgagttcatcgatgggcacacgcctttcgcgaccaagcacggagtcaagggagctgagtttgagaacgtggtcgttattctagggcgcggttggaacgagtataattttgctgaaatgctcgaatggtatggggctggaccgcctgcggacaagcgtgcgcgatttgaaaacaatcgcaacctcttctacgtggcgtgctcacgtccaaagatacgtttggcactattgtttacccaactcctcagtccaaatgcactggggcagattacagcgtggtttggcagcgaattcgtcactgaactgcctccagagccaggttgttatcgctga

SEQ ID NO: 78356 - DNA, 2310 bp, Pseudomonas syringae pv. maculicola
atgtcagaagcgatcgtcaccacgccggtagccggaaatatcgcacttcgattcctagagctttgtcagttccgtcgacttggtaaggtgcaactcgatgtcgacaagaagactactattcttgtcggagccaacaacagcggcaaaacatcggttcttgcagcgctacgtcacttcctttcggatggctctccctttggcgctttcgatataagtctttcgcagtggccaacgttacgagcgctgggcaaagcctgggaggtgctaaaggaagacccgtcgacagtgaccgggtccgaaaaacaatggatggagcagctcggaatcatccactcggctatgccgacgttggacctctggttcgatgcggaggctggcatgttccactatgtcgccccgtttctctccaaattcagctggaaaggcggagccgttggggtacggttgcgtctcgagcccgctgcaagcgttgacgagttgaagcatttggcttgggcatatcacacggcgcgactgccggtgaaggatatgggggcggattcgcttgcctggcccattgacctcctcgacttttggttgcgcgagccgcacaagttgggtcaagtccgtgcatacaaactggatgccgataacaatcctctggaagggctacagacctatgcgactcagactctgacagcagactccagtccaattgagcgcaaacatctacagaagctgatatgcgttgatttcgttgcagcgcagcggggtcttggcagtgaggaagctgattcacggtctgcttctggtccccaccgtgtcggcatgttctccaatcaacttctaaagtttgctcgacagcacctaaatgttgctacaacaggtcatggacatcgcgcggatcttattaaagcggtcgctgaggcgcagcaggagctggataagaaaattcacgaggcgatcgctccgtcggtggaagaggttaaagaactcgggtatccagggttgcacgatccccaagagattcgcttccgcacgcgcatacagacagctgatttgctcgaccatgggaccgctgttcaatacagcatgcagaaggactcactggacgagcttcttcccgaatactccattgggctcggataccaaaatctccaatcgctcagctatcaattggtttcttttaaagccgcccgactcaagcctgaaaagggctccccggtacccgttcatctggtattaattgaggagcctgaggcgcatctccatgtccaagtgcagcgcgtcttccctgataaggcccacaagctgatcagcccgaacgacaaagacgcatcggggctaaaaagccagttaattatcagtactcattccagccatctcgcgcatgcggagaattttgaccgattacggtacgtccgccgtatagcgaagagtgcagaaaatctcatgccgaccaccgaggtggtcaatcttgggcaggttttcggtgatgacaagaagacccgtcgattcgcagaacggtatttccgcgttcagcatactgaccttttgtttgccaacgctgcaattttcgttgaaggcgttgctgagcgcatgctggtaccgcttttcatcgaacgagatttcaaaatgctcaacagccgctatctgtccttcctggatattggcggtagtcacgcccatcggcttaagccgctcgtggaaaaacttcgtattcctacggtcatcatcaccgacgtcgaccccgttgaagagagagctggcaagccagctaaggatggtgagccgaccatcactctagttgcagtggctaatactggccaagccgggctccaatgcgggaatccgactctgcgcggatggcacccgaaactgcaacagctcgaagatttcaagagcccggcagaggtgcaacttgtttggaaagaagtcgctgaatgcctagtgcgtttcgcttggcaactgcccgtggctgaagcgggtgaccattggcctagcacctttgaggactctcttattctcaagaacattccttggttcaaaggccttatggatgagaaggtcgacggtgatggcaacaaaattaagccgccaaaaggcgcgcttggctccgtagctagacgggttttcgaccatgaaaatatttcggacttgctcgcagctctgcacaaactcatgcacggctccttcaataaaggagacttcgctgcaagcatctttgagatggtcgcggcggacgaaccgattgcctgccctaagtacatttcggatgccttggaatggcttcaaacacagctggatcctaacccggaattgatgtcgtga

SEQ ID NO: 78357 - DNA, 1950 bp, Pseudomonas syringae pv. maculicola
gtgaccgcggtgccgatcgttggcgacaacgaccgcgatgccggcgtagttgaggaaatctgcggctatctcaccgaagaaccgccgcgtagctatttcctttttgcgggtgccggttccggtaaaacgcgtactctggttgaagttctccggcggcttaccggtgtcatcgaacacgataaaggcgaacatctagcacgacgtctgcgaatgtacgggcgttcgattagggtggtgacatacaccaagaatgctgtctcggtcatcagcggacgcctcggcgacaacgacttagtctgtgtatcgacgatccattcgttttgctgggaactcatcaacgggttcaacgatgatattcgagaggcccttattgccgtaaaagaagctcaacttgcgaaagagaccgccgaggcacaagcgaagccgaaaggcctcacgccagctaaacagagagaccttgacgaaatcaacgatgatatcgaggctttcagagcgaccgatgtgttcatctaccatcccgatcgcaacacgtacggctccggcgcgcttgcgcacaactacgtcctcgacgcgacagcatggctactccgaaataaacctacgctccaaaccattctcaaagatcgtcaccccatagttctcattgacgagtcgcaggacacaatgaaaggcatgctggatgccttaatggggcttgcagaacaagaggggagctacttgactcttgggctgctcggtgaccaccgccaacgcatttatgcgcacgggcacgccgatcttccaagtcttgtcccgaagaactgggcaacgccagagctgcagatgaaccatcgcagtcagcgccgaatcgtcacgctcattaacaaagtctgggaagctgagcttgaaggtcggacgcagcctacaaacggtgtggagcagcatcctagaactgaaaaagccggaggcgtggtacggctctttgtgggtgacacctcacgttctccggaggacaaagtgctcgacgaacgttggtgcgcagataggatgcacgaagctaccggggcagccgcctggagtcaaagtcaataccaattgctcgcgctggagcacaagctcgtcgccacccgcggttcgtttttccatgtatatgaggctatggtcctgctagatcctgacgccgcagcgccgtctggtagtggtgataacaaggggccttctgctgtacaggttctcctcaacgagcttgctcaactagaggtatgcgtaggtatcaacggtgcggtggacgagttcaaggctacagaagtatttcgtcggtatggaagcctcgacaacatgccggaggaatgtgccgcgcgagcgagtcgcgtggaagagatgcagaaggctataacagcatttgccactgcctgtgttgatccgaagtcaactgttgaggaagtgctcgcaccaatcttgagcgcaaaattatttgaaatcgatcatcgccttgtggaagcttatgccgataagtcgccacgtcttccgtcgccgggtcgaggagaggaggaatccaagcaggccagaatgcgtcgcgggtggtgtgcgctgttcgccgcaccctggaatcaactcaggctgtaccgaacttacctcgcaggggggaccgttctctcaacgcatcaggtggtcaagggttccgagtttgcacacgtaatggttgtgatggatgacgcgcttgccggtgggtttcttatctcctacgacaagatttttggtggtgtggagcttagcaagcgggacaaagagaacgtagggctgggcaaagaaacgactatcgaccgcaccttgcggttgctttacgtaacctgtagccgcgcccaggaatcgctggcccttgtgctttggtcgtccgaccctgcagcggcattggctaaaatcaaggtcagcaactggtttgccaatggtgagtttcaggcaatcccatag

SEQ ID NO: 78358 - DNA, 1986 bp, Pseudomonas syringae pv. maculicola; identical to SEQ ID NO: 71686

SEQ ID NO: 78359 - DNA, 1905 bp, Pseudomonas syringae pv. maculicola; identical to SEQ ID NO: 71687

SEQ ID NO: 78360 - DNA, 2133 bp, Pseudomonas amygdali pv. mellea
gtgcatatttcaaggttacaactcgtcaactaccggaatttcgaatgcgcgaatgtcgtattcaacaagggcgtaaacacgatcatcggcgagaacggatcaggcaagaccaacctgttccgggcgttgcgtctcttgctcgacgacacgctgctgcgcgctgcatataggctcgacgagaaggacttccaccggggccttggcgactggcgcggtcactgggtagtcattagcctcgagttcgatgaggtatcccaggacgaagcgattcaatccctctttctccatgggaccggtaatatcgccgacggcgtgatcggcaaggcgacctataaccttatttttcgccccaaggcggcagttcggcggaccctggccgaccttgccgtcggtgatgccgtaggactcgtcgaggcacgttcgaagatcaccatttcggattatgaaacgatcttcaccggcaagagcaccgcaaacttcctcgatcccgacacctacaggctactggttggcgacttcgatgcggtaatatttccccaagaactgacgacccccgctatcgggggcgtcatcccgggcatgctctcgatctcgcgcgaagtgtgcttcaccttcgtgcaagcgctgcgcgatgtggtcgccgacttccagaacaaccgcaccaaccccctcctaactctgctcaaatgtcgaagcggtgagatcgatccgcagagcttcgagccgatcaccgcgctcgtcaaagggctcaacgatgcaattgagggcctaccagatgtagaaaccatccgcaccgatatccgcgacaccatcaccgatgcggcaggcgagacctactctccgcgatcactttcgatccgctcggatctgtccgacgaggccgaccgtctattccagtcgctcaagctatttgtgggcgagagtgaggaagaatatgagggcgcgattcacgagttgagcctaggcggtgcaaaccttatctacctgacgttgaagctgctcgagttcaaataccagaagcagaaagaatccttcgccaatttcctcgtgattgaggagccggaggcgcacatccacacccatatccagaaaacgctgttcgaccggctgaactttgctgacacccagataatgtattcgacccattcgacccacatatccgaagtgaacaacgtcgtgaacatcaacatcctcggccggcgggacggacgatgcgaggtgtttcaaccatctacgggacttgacgccggccagattggcaatatccagcgctacctcgatgctgtccgcagcaatctgctcttcgccaagagcgtggttctagtcgagggcgacgccgaggagatcctcatcccaatcctcgttaaaaaagtgttcgggcttagcctggacgagctggggatcagcttgatcaacatccgcagcaccggcttcgagaacgttgcggtgcttttccacaacgagcgcatccgcaagcgctgcgcgatcatcaccgaccttgaccgcgcgtttatcgatacgacggacatactagacagtgacgataaggcggccacgaagaagaaagcactggggtcacagatcgctggactccagcgcgaggcagcgctcaaggagttgtgtgccgggaatccctggctgacggtgcacttcgccgaccacactttcgaggtcgatttcgtctccgccggcaatgtcggcactgtcgtttcggtgctgggcgacgtctataaggatggcggcaccatcgcgacgtctaagatggagctggaatcgggcgacatcgcacgtttcgggacgcgcgtgctgacgatggcacgttacgccggaaaagggtggttcgccatcatcctagggcgaatgatcacgccagaaacttccattccggattacatcctcgacgccatcttccaagcccatatcccggtatccatccagacatgggcgcgtgtgctggactatcgggtctcgatccttgcggcgtcgcaactacacgcgccaggagacatcgacgcgatgcgcgcgcaaatcagacgctaccaccgcggcgagatcgactttgcaggtgtccgcgccgaaatgctacaggcctttccggcagacggcatcaacactatcctggcgggcttctag

SEQ ID NO: 78361 - DNA, 1797 bp, Pseudomonas amygdali pv. mellea
atgtttgtctgggacaggaaggatctgaacgacgcccaagtcgcagccatcgagcatccaggcagcgtcttcctcgttgcctgcccggggagcggtaaaacgaggaccctgacctacaagatcgcccggctgttgtcggagcttaagtcggacaaaaaacgcgtcgtcgcgatcacctacacccaccgggctgcggatgagattcacgaacggattgagcagcttggcgtcgatacgagccagctctggattggcacgatccactccttctgcctcgaatggatcttaaggccctacggaatctatcacttggcgctcaagcacggtttccgggtgatcaatgcccatgacaccgaacgaatgcacgaggaactctgcagcgcggtgcagggcactaagctcagcagcttcgactgcgcatattatttgaagccgaagggctgtgtcctgacatgcaacaagactgacaagcatgaagcaattcgtggagttttgcaggcatattggaaggcgctccgtgccgagcggcatgttgattttgaactgatccttttctacgcctatcaactcatcgagaagaatccctcgatcagcgtgctgctgggctcgatctttgaatgcgtgctcctcgatgagtttcaggatacgcgggaaatccaatatgcgatcctcgcatcgatcctgaaagcgtctaaaggtggtgcgtccgccttcgtcgtaggcgatcctaatcaggcaatttatggctcgcttggcggctatgcgatcacggcggcggactttgggacgcagtgcggcatcgccttcaaagaaatggagctatcagacaattatcggtcgtcatcgcgcattgtgagctatttcggcaattacaacgtattgccttcgaagatcgaggcggtgggaacgggcaaggactacgcgagcgtcgtgtcattcgatcaccagacgcaccgcgacgcgctggaggaagagcttgtaaggctcatcaagttcaacgtcgaaacgctcgggatcgctcagcatgaggtctgcatcgttgcgccttggtgggtccatctcgcaagcatgacacgccgtctggtcgcggcgcttccggcctattcgtttgatggcccgggcatggtgcccttcgcgcgcgacgtcgataatttctggtacaaactcgcccggatcattctgacggaggcgtccccacagctctatgtacgccggatgcgatgggcgggggaagtaatcgctgacctcagcgtggcgggcgtcgaggttcaaggtttggaccgcaagacactgctgcgcgtctgcaactccatcaccgtcaccgaaaccgatggcctggtcttcctccgcgtgttcttcgaccaggtatgttccactttgggagtcgatcgccacacttacgcggcgctccaagagcatcacgacgctttctttgaatgctcgcagaagcgcattgacaagctcatcaaagaaggcgctgaggcgatcgctgaattggaaatgtttaggaaggtctttgcgggccggactggtatcaccgtatcgacgatccacggggtaaagggcgctgagtatgatgcagtgatcgcctatggcctgctagaagggatggttccccatttcagcgatccgaaccaggccgagacagcgaagaagctcatgtacgtggtttcgtcgcgggctagaaagaacctacatctgatctctgagcgcgctcgcagccgaggctggagcggagattatcaaccaaccgacgtacttgctggatgtgcattcgggtacgaccagctttcttga

SEQ ID NO: 78362 - DNA, 2403 bp, Pseudomonas amygdali pv. myricae
atgaagctacaggcatatcggctgcagaactatcgccgactgcgcgacgtcgtcattgagcttgacgatgagatttccatcttcgttggcgccaacaacagcggcaagacgtctgccgtacaaggcctgtactcgatgctccgtggcgaagcgaagaagttcgaactcttcgactttagcgcggcgttgtgggccgagatcgacgccatcggcaggacgcctccaggcgatgaggacgcgcccaagcagttgccgtccattcttttggatctctggttccgggtcggtgaagacgacctcgccactgcaatgtcgcttcttccgagcacggagtgggacggtaagtgcgtcgggatccgggtggcgttcgagcctcaggacgcccatgcactcgtccggaagttccacgaactgcatgaaaaggccaacaacgctgcgagcgcactggtggccagacgcagtgtaggcgcggaggcagatgcggaaaatgcggcggcggtggtagcggatcccggcgagtacaagccctggccggaaagtctgacgaagtacctcaccaaggaactgagcaaagaatatacgttccgctactacgtgctcgatgagcgcgcatttgtcggctatcagccaaaggaagttgattatgcgccgctgcccctaggcaaggagccgggtggcgcggcgattatcaagtctctggtgagggtggacttcctgcgcgcgcagcggcacctcgatgatccggatgctggcagctccgaccgcgccgagagcttgtcgcggcgtctgagccgtttctatcaccgcaatctggagaagcgtggcgacgaccatgcagcgctcaaagcgctcgatacctcggagaaagaactgaacttccacctgaaggaagtcttcagcgacactctcaagcgtctcgccaaactcggctatccaggcgtcaacaaccccgagatcgtgattcgggcggccttggatccgaccaccgtcctggggcaggattccaaggttcactacgtggttcctggtgcgatcaccgcgcaactgcccgacagctacaatggtctggggttcaagaacctagtctatatggtggttgaactcctagacctgcacgagcagtggaaagccgaggaagacaagcgggcgccactgcatctggtcttcatcgaggagcctgaggcgcatctgcacgctcagatccagcaggtcttcattaggaatgttttgcgcctccttgaggatgccaacgatcacgcaacgtttttccacacgcagctcgttgtcaccacgcactccccgcacattctctatgagcgcgggttctctcccattaggtactttcgccgtgttagcgagcagttggaccataacaccgaggtaaggaatctttcgctctttaagacgtgcgcggccgacgctccagcgcgcgaattcttgcagcggtatctgaaactgacacactgcgatctcttcttttccgatgctgtcatcctggtggagggcaatgtcgagcgcctgctcttgccagccatgatcgagacggcggccaagcgcctgcgttcctccgccctaaccatccttgaagtcggtggcgcgttcgcgcatcggttccaggaattgattgccttcgttggacttactacgctggtcatcacggatctggacagcgtagcggtcaagacggatgccgagaatgccgccgagcaagacgcaggagccggtgccgtcgacggaaataacgaggaagacgacctgaagcccttcgagctcgaagacgacgacgaagcagcaccgggcggcaagaagaagtccaagaagcgtggcagcacctgccatgctcacgtggagggtgcgtacacgtccaaccaaacccttatcagttggatccctaagaaacggttggttgccgaactctgggaagtcacggcggagcaaaaaacgctgtcgcttgccgaggggaccagcgctgaggttcgggtggcctatcaaaccaaggttttggtgacggtgggtgccacgacctcgcagctctgcggccgcacgcttgaggaggccttcggtcttgagaactccgactggtgtcaggctgaggctaaccgctcggtcggactcaagctgaagcgcgcaccaaacagccctgaagaactggctgagaagttgcacgaaagggtgatcggcaagaacttcgacaagactcgctttgcgctggaggtcctcgcaagcgggccgctcaactgctggaaagtccccacttacatcgccgagggcttagcctggctcgaaaccaaagtggcccacgagattgaggcggacgcggctattgccaacgaggtcgcgacaattgagccgactgcagccggtgttgtcgccgttattgcaggcgcggggcagacgacatga

SEQ ID NO: 78363 - DNA, 1932 bp, Pseudomonas amygdali pv. myricae
atgagcagacgaattgatagcccagacaccgacgccgaccgcgagatccacgcgtgtattgccgagacccccccgcagccgttcgtggtccgcgccggcgcaggttccggcaagaccacctcccttatcaaagcgttggactgggtgatctcagagcacggcgccagcatgcgggcgaagaagcagaaggtcgcctgcatcacatatacggacctcgccgccaaagaaatcttggcggatgtcaacgacgacccgctggttcatgtctcgaccatccacagcttctactggtctattaccaagacgtttcaggcagacattaaggtttggctacagaacgacctccgcaggcggatcaccgaactggaagaagaattcaagaactacagctcgcgtgtccggcagactacacgcgacaggaacaaggctgaccaacagcgttatgcccgaagccttgagactattgctggcgtcaagactttcaactacggggtgggcagtgactacgcgaagggcgtcctcggccacgaggacatccttcagctcgccgatttcctgctgcaaaatcgcccgctgttccgacgggtcgtagcgctgaacttcccgtttgtgttcattgacgagagtcaggacacgttcccgagcgtggtgaagtccttcaaggaagtggaagcccagatgcggcgcaagttctgtctcggtttttttggcgacccgatgcaggcgattttcatgagagggtcgggggacatcccgctggaggaccattggcgggctatcacgaaaccagagaattttcgctgtgcgaagcagatccttgacgttgccaacgccgtgcgcgcgcagggcgacggcatggagcaagtccgcgggctgcacgaaagggttgatggagaactcaagccggtggagggctcggcccggatgttcgtcctgccgaacacgctgaaccgaattgaggccctggcgagaatccgggcgtggagcgcggcgacgaacaacgacgagggttggacgaccccagacatcgcgctcaagattcttgtcatcgtgcaccgcatggccgcaaaccggctcggcttcggtggcatctactcggcgctgaacgataagacatcggagggcatgaagcaggggatgcaggatggcaccggctggcccgttcgaccgctcctaagttttgcgctaccgatcgttgctgccgtgaaagccggtaacgagttcgcggcgatgaacctgctccggaagttcagcccgcgtctggcgccagtggctcttactggccgacgtgccgcggctgtattgcgagagctgcacgctgctatgtctagacttgtcgccatgttggacgaggcagggaccaccattggtgacatagcactccatctctttgacacgggtcttttcgagttcgacgatcgctatgtgcgtgttctcggatttgtcagggatgttgcagacgctgcccaggagcccgaggctgctgatgcagttccggccgaaggactatcctcagatgcggcaatggccaagttcttcaagtgctctgcacaagagctttggccctatgagcgctatgtctcagaagggtctccctatgctacacagcacggtgtgaagggcgcgcagttcgaacgcgtcatggttgtgatggacgaggaagaaagcgactaccgaacgtacaactacgaacgtgtcttcgcgagcgctgaggcccgtgctgcagatcgtgcacgagcactaggcggtgatgaaaacacttggagccgaacgctgcgactgctttacgtctgctgcactcgcgcccagcgggggctggtactaacgttctttgtcgccgatccgacgaccaccttggaaaatgtcgtggcgagcgggatcttgccgcgaagcgcagtcttcacacaggaagttttagctggatggccatag

SEQ ID NO: 78364 - DNA, 2133 bp, Pseudomonas savastanoi pv. phaseolicola; identical to SEQ ID NO: 78360

SEQ ID NO: 78365 - DNA, 1797 bp, Pseudomonas savastanoi pv. phaseolicola; identical to SEQ ID NO: 78361

SEQ ID NO: 78366 - DNA, 1959 bp, Pseudomonas syringae pv. maculicola str. M6
atgcacattgaacgtcttgaattagagaattttcgatgcttcggccctcaaagaagtcagattactcttgacccttctcttgtcgcatttgtcggtgataacggaactggtaagacagctctgatgcaagccctccagagaatgttcggcatagcctccgatcagcgacgaatacgcaaacaagacttccatgttccgtgcgatgaagttgaacggcctgcggcacgtacgttcgtgatcgaagctatcatcgggttccccgaactggatgcagatgctgagaacgttgcagtgccagcgttcttcagaaacatggctgcggtagaaaatggcgagcttaaggtgcggctcagattgcaggcgagctgggtggacgacggaaccttggatggtgcaattgaagagtcctattgcgctatccagacgtttggcgacttcgatgaaaacgacatgcaacagattcgcggagcagacaggtctcgaatccaactcatctacattcccgcgacaagagatgggtcatcacaggtcacagccttcgttcgcggtcgtctgtggagggccatcaattggtcgcaggaagtcaaagagtcgttagccggtgcgggcgaggaggtcaatcaggcattcctagcagaaactgccgtatcaagtattagcaccgcagtgactcagcgctggcagcagcttcattcggctggtacggattcagtccccgtctttcgtcctgtcgacactcggtggcaagagttcatccgcagagttgaggttgtatttcaccccacggaagatggtcatgaccgtgcacttggggatctcagcgacggtcagcgctccttgtttcatatggcgatggctgccgcaactctagacattgaagcgaggatagcaggtggtgatactcctcaggggtttactcaggcaggagttcctcttcctgcgctcaccatcgttgccttggaggagcctgaaaacaacttggcacctttctacctgtcccgcatcatcaagcaggtgcaggaaatcgcatccggcaggaacgcccaagctatcgtttcaagccattcacccagcatcctcgccagggtcgatccttcgagtgtccggcactttcgactcaaccttcaaaatcgttgttcggaggtgcgtcaaattgatcttccgataggtgatgaagaggcttcgaagtttatccgagaagctgtcagggcctacccagaactgtactttgcgcgctacgtgattctaggtgaaggtgctacggaagaggttgtactgccactgctggccaaagcgatagattttcccatcgaccgatcctttgtggccgtcgtgccgctgggcggtcgacatgtcaaccacctatggcggttgctatcaaatcttcaagtgccctatgcgaccctcttggatctcgattgggggcgcagcggtggtggctttggccgtataaaaactgtgtgcgagcagttgctgagcgtaggcaagacacctgagcaaatctttggtactgctttgtcgtcaagtacgcccgaagcaattctcacaggttttccaagtcgcaatcaggcagatatccagagccttcgtaaatggacaacttggctagaacgtttccaaatctacttcgccgatccgctcgatctggacttcacgatgctgatggcatacccaactgcgtatcgaacgctcgaaaccgagatgagggggccgtcggcaaggggggagccgagagaggccgtgctgggcgaagaaggctaccctgcgttctacgatgcaaccgcagacgacgcactacgttggtatcgatatctcttcctgggtcgcggtaaaccaagcacgcacgtaaggattctgagttgcctgcctcaggagcaattagctgccgccattccacaacctttgcaacgcatgctggctaatgtccgtgaaactctagaaggaggtactacgctatga

SEQ ID NO: 78367 - DNA, 1896 bp, Pseudomonas syringae pv. maculicola str. M6
atgagctggcagcctgtctcgccagaggactggctgcctcgcggtatcaccaaccttgaacctaacgcttgggaagccctgcgtcgagagggggcgacgtcggttgtcgcaggtccgggggccggcaaatctgagtttctggcgcaacgcgcggcgtacttgttggagactgggttatgtaagccaccgcagcagattcttgccatctctttcaaaaccgatgcagcggccaacctcgcggcgcgtgtgcgcaagcgttgccctccggagctagctgggcgttttacgtcccttacatttgacgcgttcacaaagagcctcgttgaccgctttcatgcgtccattcctccgcattggcggcccactcgaccctatgatatcgacttcccaactcggcgcgtggtcgaggacgagttgcaccggattcgtgctatggggcagcctgcatggcaggcaaggctagcggacttttccccgggtacttttgaagcccagtacatcggaggaaatcgcctcgccttggaggttccacagcagctcacgacagcagacgactttgcccgctatcattggctgcataagcaactgttcggcaccgagccgtcaaagctgacgttcgtcactctcaatcgtctcgccgagctgattgtgcgagcaaatccaaagatcgctcgcgcgctgcgcatgacctatccctatgtgtttgttgatgagtttcaggacacttcttttgctcaatatgacttcctgctctctacctttggtcagggtggagcggtcgtcaccgccgttggtgaccataagcagcgcatcatgggatgggctggcgcgcgtcaggatgcttttgagcaattcgaagctgacttcgatgcgcggcggataaatctgctttttaattacaggtcctctccggagttggtgcgcgttcagcacttcgttgcgcaagccctagatccgcattcgccacaaatacaatctcaagcgccaagtcagctggacagcgatgttgtacaggtgtggaactctaggtccactgatgtggaaggacgacatcttgctcagtgggtcgagacagatatggcaacgcgtcagttacagccacgagactatgtactcctcgttcgtcaacgaccggaccagttcgaggaggagcttcagcctatatttgcttcggtcggacttagcatacgcaatgaaagccgtagcattggacgcaccaacgtccaggacttgatggtggacgaggcttcgtgtgtagcattggcagcattgcgtttggcctccgggcagcgcagcgcatcagcatggttgacactttcaggggccgtctatgcaatccgtgaaatcgatgaggaagatgaggtacagcgaggacgggccgatcgagatcttgagggattcttggaagagttgaaactgactgtccgcgctcacgcccccacatccgaatcggccgtacagatcgcgtaccaaatttttgagttcctggatgtttccgcgataaagcgcgcttttcctgcttaccttcgcaatgacctgcttgaaatcatgatagagggcttctcattacaccttcatagtgctgcgtcggagactgccacttggttggattgtatcaaccgatatctgggaacgaatgacataccgttaatgacggtgcacaaaagtaaaggattggagtacgacacagtgttcttcctcggacttgatgatcgatcatggtggagtcatacgccacgcaatccggaaggtatcgcgacgttttttgtcgccctgtcgcgcgccaagcaacgcgcaatctttatgttctgtccgcatcgaggtgcaagacagaatgtctccgagctctatcagttgctgactgacgccggtgttgaggagaccgaaatcggatga

SEQ ID NO: 78368 - DNA, 1986 bp, Pseudomonas syringae pv. maculicola str. M6; identical to SEQ ID NO: 71686

SEQ ID NO: 78369 - DNA, 1905 bp, Pseudomonas syringae pv. maculicola str. M6; identical to SEQ ID NO: 71687

SEQ ID NO: 78370 - DNA, 1920 bp, Pseudomonas savastanoi pv. glycinea; identical to SEQ ID NO: 71928

SEQ ID NO: 78371 - DNA, 1683 bp, Pseudomonas savastanoi pv. glycinea; identical to SEQ ID NO: 71929

SEQ ID NO: 78372 - DNA, 2136 bp, Pseudomonas savastanoi pv. glycinea; identical to SEQ ID NO: 78348

SEQ ID NO: 78373 - DNA, 1812 bp, Pseudomonas savastanoi pv. glycinea; identical to SEQ ID NO: 78349

SEQ ID NO: 78374 - DNA, 2238 bp, Pseudomonas amygdali pv. morsprunorum
atgcgtataacaaagatcaagatgcagaactttaggttgctgaaagatatatcagttgacttggaaagtggcctgtcagtaattattgggaaaaataataccggtaaaacgtcgtttcttctatgtttggagaaatttataggtggcacagcgacccgcaacacatttacctttgaggatctgaatagtgacgtaaaagataatctgttgaaaatagtctcaggtactgcgctgaatgaaagcagcattggtatcgttctgaaagttttcatcgagtatgacgacgatgacgaccttgagaatataggagacaaggttattatggatttagatcccgataataaggttgtcgttctcgcattcgaatataaggcgactacggatgatattgctacgctggtggatgattttaaagagctgacagcaaaaaaaaatgcagaaaaaaaatcgttgccctcgcttttcgagtacttgagggataagcacaataaatatttcaccatctcgcgtcgtagtttgtactttgatatgcaaacaaaaaaagaggatgatgagcatttcgtagacttagacctcgaaaatattaatttatctaaaatcataaatttcaaatggattagtgctaggcgtaatgtgtctaacaaggatgcggacaactctctatcacaactatcagctaagatttataaaaagctcgaagctagcaaccctaatgagtcggtggtggaagagttcaaagatacgttgactaatactgatgccaagctgaatatcgtttaccagaaaatatttgaaggggttataaatgatgtgaaaaaatttggggggttaagtcaaaatgattctgttataaaaattgtgtcatcgctgcagcatcgtgatttgttggaagagaataccacggtcatgtacggccttggtaataacgagcatgacctaccagaaaactataatggattgggatatctaaacctaatcagtatgatatttgaaattaaacttaagcttcatgactttcataaagatatcaacgaatctccatctgatataaatctgctcttcatcgaggagccggaagcgcatacacatccgcagcttcagaggatcttcattaaaaatattaagtctttgttaaagcctggtataaaaagagtcgatggtgtaaagcgagatctccagacgatactcagtacacactcttcatatatagtatctgaaagcgattttgaagatatcaagtatttcaaaaaaacggacaaaggcgtcacatccaaaaatctgaaagatctaaaagactactacgaagactcgcagtactacacatttcttaaacaatacttgaccatccaccgttccgagttgttttttgcagataaagcggtttttatagaaggtgacacggagcgtgttttgcttcctgcgatgatgtcgaaagttgatcaggaagatcttattaaggaattagaaacaggtgttgtaaataatattccactgctctctcaaaatatttccatgattgaggttggagcttattcacatatttttgaaaagttcgttaattttataggtgtcaggtcacttattatcaccgatatcgatgcctcggctatgatgcctgttatagataaagcaaccggccagcctaagctcaacaaaaaagccgaagttcaattaaggcttcagaagtgtaaagttgaacatggcactcacactacaaacgcctcgctacggtttttttataagaaagaagatttggctttttaccaaaatctagattcaagtcagaaaaccctagagaaaatggacgatgcccagtggtccccttctatattaggaaagctactctgtgcctaccaagtacccgaaaagaatatggagggcgaggtctaccatgccacgagctttgaagacgcgttttttcatataaatagagtttttattaagagcttagccttcgacgaaggtgattttttcattggagataaaaaacttccgtcgttagttcaaatacacctaaaaagttttgcgagtggagatgcagatgcattcgattgcgcggagaatgcgattacaagtaaaccgtcgtttgctatggagatattactaaacagcacaattaaaacggtatcagtattgaatgctaacacggcgaaattggagaatgtctcgatcgatttttctaattggaatacaccattgtacattaaggaggcattgcaatggctcaaacaaggctag

SEQ ID NO: 78375 - DNA, 1443 bp, Pseudomonas amygdali pv. morsprunorum
atggctcaaacaaggctagcactcgagcccgaggttcaaagcatatttgatcttgtcgatcaggggaaaaacttcttgctgagtggaggggcaggtagtgggaagacttattctctcgttcaatttatacggcaggtacttgctgaggatcccaagaaaacaatcgcatgcatcacctatacaaatgctgctgtagcagaaattcgaggacgtattagtgctcccaatctgcatgtgggtacaatccatgagttcctgtgggacattattcgtccatacaaggctgagctgattgatgcattgattttttcacttaaaagtgagtctctcactagtatcaaaaatccagatgataagtttgatccggaagttcttagaggtgcagaggtacagtacaaggagtatacaagggtcagagaggctatcgtttctcatgacgaaatcttgaagcttgctcatggtatgttcagcgcttatcctaagttatgcgacatcgccaaagatcgctataagtttatactggtggatgaataccaggatacgtctgaattggtggtagatatacttttagtgcactttcagaaaagtagcaaaacaagcattatagggttcttcggtgatgcgatgcagtctatatatgacgagggcgtgggagatctcaataagtatcgcaagctagggttggttgaagaggttaaaaaactacagaatagaagaaatcctaagttaatctatgagcttgcgaatagactgcgaaccgatggtataactcaagaggcatcaactgacgaaaatgcaccaaacatgtctgaaggaaaggttatatgtggaaacatgaagcttgtttttaccgccactgatctagataagctggacgaggttaaagactcgttagggtgggattttaaagatgttaaagaaaataaagaactcaatcttacccataatctaatcgcacctaaggctggatttgctgaactgatgctgatatacgacggtgataaaataattgcttatcgtaatcggataaaagatttcattaaagatggaaacatagaggaagacttctcagggtttacctttggggaggtgattgactatctagtagagagattcccaggtaaagtaaaagatgtcactcccacaaaagggatgaagccttttatcgatagccaccaagagctatatcaaatagctctggcgacaccttacgttacattccggcgaatgtatgttgccaaagaatcgctcatcgacgacaaaaaagatgacccttccgctaccagcaaagcgggaagcaaacgagatgcgctgataaagcacctttttaagattcaaaatattatcaatctgtatgagactggacgttataatgagtttttaaagagaactgagtttaaaataaggtctgtcgaagataaaagactgctaaggaaggtctga

SEQ ID NO: 78376 - DNA, 2136 bp, Pseudomonas savastanoi pv. glycinea; identical to SEQ ID NO: 78348

SEQ ID NO: 78377 - DNA, 1812 bp, Pseudomonas savastanoi pv. glycinea; identical to SEQ ID NO: 78349

SEQ ID NO: 78378 - DNA, 894 bp, Pseudomonas savastanoi pv. glycinea; identical to SEQ ID NO: 78350

SEQ ID NO: 78379 - DNA, 1671 bp, Pseudomonas savastanoi pv. glycinea; identical to SEQ ID NO: 78351

SEQ ID NO: 78380 - DNA, 1920 bp, Pseudomonas savastanoi pv. glycinea; identical to SEQ ID NO: 71928

SEQ ID NO: 78381 - DNA, 1683 bp, Pseudomonas savastanoi pv. glycinea; identical to SEQ ID NO: 71929

SEQ ID NO: 78382 - DNA, 1920 bp, Pseudomonas savastanoi pv. glycinea; identical to SEQ ID NO: 71928

SEQ ID NO: 78383 - DNA, 1683 bp, Pseudomonas savastanoi pv. glycinea; identical to SEQ ID NO: 71929

SEQ ID NO: 78384 - DNA, 1839 bp, Streptomyces sp. NRRL S-4
atgcaggtacagcgggtgaccctggagaacttccgcggcgtgaagggcgggaccgttcacctggatggccactccttgttggtcggctcgaacagcgtcggcaagtcgactgtgtgtgaggggctggagctcgtactcgggcccgagcgcatgttccgacggcccgtggtcgacgagtacgacttctacggcgggtgctaccaggaacgggagggcaagctgcccgaagtgaggatcgaggtggtcctcacccatctttccgacgccgccgagcgccggttcggcaaccatctgcgccgctggtcggcgcggacgagcgacttcctcgatacagtccccgacgcggttgaaaacgccgagaccggcgaatggtgcctgccggtagtcttcctcggccgctacgaccctcaggaggacgacttcgtcgggggaacgttcttcgcgcaccccgagagcgtcccggatggccttgacggggaggaggccggcctgggcgcagggctgaaatccttcactcgggaggacaagcggcactgcggattcctctatctgcggccgaaccgcaccggcagcagagcacttacttttcagcgtggctccctcctggacacgatcgtgcgactggaggcagagctggcgggcccgctgtgggagaaggcgcttcgtgacctggaccaagtcgcagtcgccgcggccgagtctggtttcggaaagatccgtactgagatacgcgaccgtgtcgaccgctttgtcagcctcggcgacaccgccgatccggtcgatctgaaggcgtctgaactcacccgtgaacacctgcgtgaggtattgcgcctgttcatcgctacccagcccgggccgcacgccgtgccgttcaatcggctgagcaccggatcgctgaacctgctggtgttcgccctgctcacctacatcgccgaactcaagggcgacaagtcggtgatcttcgcaatggaggagccggagatagcgctcccgccgcacgcgcagcgccgtctcatcgacttcgtggtcaaacgcatgggccaggtgatcgtcacctctcattcgccgtacgtgatcgaaaagttcgagccctcccgcatcgtcatgatcagccgcgactcaaagggcgcactcaggagcaaccgtgtcgtcctgcctggtgacttcaagctgaagaagtaccgcgacaaccgccggcagttcgctgaggctgtcctgggccgtgccgtactggtggtggaaggcgctgcggaagcggcactgttcccggccgtctcggacgtgctggaggcggaccccgccgtcacaggctacgtccctctggaccttgctggcgttacgatcttcgacgctcagaacgacgtctctgtgcccttgttcgcccccgtctttaaggggttgggcaagccggtctacgggatccacgatcagcccgacaagccgctcgacgcgaaggctgcggccaagactgccgacttcacgcattacacggtgctcaactacaaaagcgtcgagaagctgctggtcgccgaagtgccggttgacgcccagcgtcgcttccttgccaccgtggcccagcgcacggactatccctccggatgtgcacgccccgacccgtctgccatggacccggccgtgagcgccctgacttatgacgtgctgtgggcccgcaagggtgacggctatgccgcgctgctcatcgctgagtgccagggcctcagccaactccccgctgcactggccgatcttcttctccggatcgaccgcgatctggggacccccgcgagcgggggagaaaccagcgacacagcgcactcggacgagaccgatgaagattga

SEQ ID NO: 78385 - DNA, 1710 bp, Streptomyces sp. NRRL S-4
atgaagattgacccggtccggcaagagatcctcgatgctcctggccaccttctgatcgtcggcggcccaggctgcggcaaaaccaccatcgctcttctcaaggcccagacgaggctggccgccctcgaacccgaacagcgcgtagctttcctcagcttctcgcgcgccgccgtacgccagatcacggaccgaatgtccggagtcctgaaccgggccagccgccaacgcctggaagtacgaacttttcacgccttcttcctcgacgtcgtacgcagccacggacgactgctcaccggccggccttcttcgttcatcgcgcccgaccgcgaacggcagatccaggcggacttcgacggcgattggaagagcgaacgccatcgcctcgcgactgaggagggccgctacgtcttcgacctcctcgccggcacaacggcgaccctcctggagcgtagcgccgctctgcgcgccctctacagcagcatctatccactgatcatcgtcgacgagtttcaggacaccaacaccgaccagtggcgcgtgatcaaggccctcagtggcacctccactgtcatctgcctcgccgaccctgaccagcgcattttcgaccacctggacggcgttgaagagcaacgcctcgatgacgccgtggcgcacctcgcccccaagcccttcgacttgtccaaggacaaccaccgcagccccggcggcggactactcgactacgccaacgcagtcttgaacaacgccccccaccctcagccagacaacgtccgcacctggacctataccccgggctacggcgttccctggcagacccgtgtccacaagggggtcgtcgccgtgcgggatcacctcgccacccagctggggcgcactccgacgatcgccgtcctcgcaagcgtcaactccctgctgggccaggtgtccgagaccctcgacaccgacaccgacaccggagaactcacacttcctgcagttgagcacgctctgcaatgggatcccgaactgaccgcagcggctggctacgtcgtcgcgtcgatcatggagtggccaggtctacctcgcgcggaggctatcgcccggaccgtgcagtcccttgccgacttctaccgggtcaagctgaccggcggcacggtcggcgcacgcggcaagatcaaacccttggagaacgggctcgtcgcattcacgagtggcaagaccatccgttccaagagcgtcaaggctgtgactgctgcctacgatgctgggatctcctacattgggcaaccggtcgccgactggcagaccgcccgtgaccgcctccgcggctccagcgaactcgaagaagtcctcaaacacacgcgcctgctgcgcctactccacgctaccgacgcgatggcctggggcctgtctgatgcctgggacggccagtccacctacagcgaagccgcagccacagtccgcgccgtccttgccgccgaatccctcactgcagcccaacaagcgccagaaccagtctccctgatgagcatgcaccgctccaagggcaaggaattcgacggtgtcgtaatcgtcgaagggccctacacaggcactttgcttgaccccagatgggaccctgaacgtatgcgcgcccagagacgcctcctgcgcgtcgccgtcacgcgggcgcgtttcgtggtcctcttcgtccgccctcagggcagccaacgtctcacggcaacgccctaa

SEQ ID NO: 78386 - DNA, 2163 bp, Phaeobacter sp. 11ANDIMAR09
atgaaaatttctacctttgctttgaagaactatcgccgactatccgacgtgagcttggtgcttgatgataaacaaacagtacttgttggagctaacaacagcggaaagacgtcctgcatcggtgcgcttcatacattcctaaaaagccctgaaaacctcagggttcgagacatttcgaagaaaaattggaaggcaatccaaacgcttggcgaagaggttgagaaagcctttcctaagagtgaggatatggcagggctatctgcaaaactgatcagtttactaccgtgtctagatatcgacatcacagcggaggcaagtgaagcttataaggttcgcgatatccttcctgacttagaatggcgtggtggcatactgtcggttcgcatgacctacgaaccaaaggatatcgagagactctttcgtgagtttgtcgacgcaaggcacgtagtttctgaacataaaggtgaggtcagtctgtggcccaaggatctatgtgattttttagaaaaaggtaaaaacttcagcacgcacgtaaagcagaaacaccatattttgagtaaggcaagcggcgcctccgcgaccgagaccttgcagcctctcaagtctgaagcgttgaaaaagcttattcgagtagacgttatctccgagcaacgaggcctaggcgcagaagatagcgctgaacaaaaaggaccatattctgaaaagcaacggctaaacaagctgcttcgtgattattatgatcgcatattgaacccagaagatttcccagcagtggaagaccttactgtcttgggacaacagcagaaactggaaaagggatttactgataggttaaacgagcagttcaaggatcctttcgaagaactcaagatcatgggatacccaggaatcggcggcaacccaactgtcgaaatcgctgctaagattagcggaactgacgcgttgcagaagtcctcttctgttcaatacaaatttgacaaggatgaagacgattttctccctgaaagttatctggggcttggttaccaaaatctcatctacttgacgtttaggctgttagagtttcgagataagtggatgcgcgtcggaaagtccgcatcgacaatggaaaaagtggaagagcagattgaaccaatccatttggtcctccttgaagagcctgaagttaacttacatgctcaggttcaacgtgtatttatctcgaaagcttacgaaacactccgaaatcacgctaatttgcgcgataagggcaccggagtggataagcctgaatatcaaacgcaattggtgatcagcacgcactcgagccacattattgatgatattgatttcaaagatctacgctacttccggagaaatagcgcgaatgcatctattgcaatggaccatacatcaatcgcaaatatgtcagagctttttgcaagcccgaaagaagagcttcagtttgtacgaaagcatttaaagcttacacattgtgacatcttctttgctgacggcgtcatttttgtagaggggcaagcagagcgtctcctcgtgcctgaatttatagccaacagcttttcggggttgtcgagtcgatatatttctatgcttgaagtgagtggagcacatactcacaaatatagagatctggtcgagaagttaggcgttgcgactctagtgcttacggatctcgactctgttaacagcgccaaaaaatcctgcttcccgcagattcaagcggatcaaaaaactagtaatgccactctgaaaaactggcacccaaaagtagtgcttgtggatgagttgattgacaaatcaatgatggatcacgtgacaaacagtcgaggggctccgctctatgttgcttatcaaaaatcaactaaaattaacggccaagatgtcctgtcccgcacctttgaggatgcgttgattttggccaattttgataatgagttttttcaaaatgaaggcagtattagagatgcaaaagttgcctttgaggacggtagcaagcctctatcagagtcactgtatgactacgtaaaaaagttaaacaagggaaacttcgcctttgactgcctttttcacctgtcaagtgaagagaccgcgagattcagacctccggtgtacatgagcgatggcctcaaatggttggaagcgcagctctcgccaaagtcatag

SEQ ID NO: 78387 - DNA, 1923 bp, Phaeobacter sp. 11ANDIMAR09
atgtcacaagaaaaattcttagctgaaactaaacctatcgatcatgacagtaacattgatgaaggcatcagagagtgccttcgcattggatcggggaaaagcttcatcacctttgccggggcggggtcaggaaaaacatactcccttaaagaagcgctcgattttctgaactctcagcatttcagtgattttgctagacagggaaagcaaatcgctgtcgttacctttacgaacaatgccgctgacgaaattaaggaccgaatccagcaaagcccaatcttcgcggtgtcgacgattcatagcttttgctggtcggccatcgcggggttcaacgaagatattcgcaagtggtacttaggaaaagtgcctgcggatcttgccgaagttgaagatttggaacgtcgaggtcgcgcagggaccaaagcatccgacgcgcgcaaaagaacaatcattcgcctgcgagaaaagctagagtggttggcagaaccgcgcacattcgtctacgatcccaacggggtcaactcatcgcagaatgcactttcgcatgcagatgttctgaaaatcttctcaaactttttgaccacaaaacccatgatggctgaagtcattgtaaacaagttcccttttattttcatcgatgaaagtcaggacaccaacaaagatgtagttagtgctttctttgatctgcaaactgctaagtcggacagcgttgtgatcggactgttgggggatacaatgcagcgcatcttcggggggggggagcctgaacttgggaaaaccaagccaagcggttggatcacctttgacaaagaaatgaaccatcgttcggcgcggcgcattgtaggattaggcaatcaaatccgtagtgaagatgatgggcgtatgcagtttgcccgcgatggggctgcagaaggctacgttcggtattttttacttgcacacggtgtttcggacaaagatgcaatcgaagcgaaaattcgtgagttcatggcgcaagccacaggtgatgaagcgtgggtggattctagatccgaagaaaccgcaatcttgctcttggaacacaaaatggcaggacgtcgtcttggatttgatggtctttgggatcaactttctgtatcagaaaagatcaagggccagatttctgaaggcgacaataccgaattaaactttttttcaggtgtagtatttccattggctgaagcgagtttgaaggaaaaccgagctgagttgatgtcgatattgcggagaaacaagtccccacttctggaagctagtgtcctcgacgccaacaaagatgatccgcttaagcttggtcgggcagcagagcatgcgctgagagaagtagtttcgaacgacaaggttagctttcgggcggttcttgaagtgcttgctgatcacaggttacttcggcttccatcgaaattgcaggcttttgtgcccgcttccagaaacgatgaggccgaaacaggggaagacctaacggaagaggtatcagaactggtcagcgaagaggatgatgacagtgagatcgccgcttgggctaacgctttggagactgatttctttcaaattcaaaactatagagactacattgatcagaattcaatttttcgaactcaccaaggcgtaaagggaaatgaattcgaacgcgtcatggttgtcatggatgatgatgaggcgggtggcttcttgttctcatacgaacagtacttcggcgcaaaagagccctccaaagctagccagaagaagcgggacgctggcgaagaaattagcgcagatcgtacgcggcgattgttctacgttacatccacaagagcaaagaacagccttgctcatgtgatttacacatccgatatggctaaagttaaggctgaccttatagagagaaaatttgctaaagaaggtgaagtaattgaattttag

SEQ ID NO: 78388 - DNA, 1077 bp, Geobacillus sp. BCO2
ttgaaagtaaaaaagttgtatgaatatgtagactttccgatagaacaatatgaatatattatatacggcggagataatccggcgaataaatgtgacccatattttttaagaatgcttaagttagaggtactcgatgctttgagggatgcaaaaagagagttaaaagcaaatggggaatataaacttttgtatcgtattctaaacaaagattatgacactgattttgttggaatacgtactttattagaaaacttaaatgaagaaataaaacaaaatgaaaagttacaacaaatcaaaagggaattaactcattacttagatagagtgtcattagtcaattcggttgaacaaaataatatagactttaatttttcttcacccgaaattagcgagattttgaaaaaattaagtcttatttatggacaggaacctatttctattgaaagaaatggattaggaaaaaacaaccttctgtttatttctcttgtactttctcatctcgcttcacaaacagaaaataaatcgccattaatatttagagtgattgggattgaagaaccagaagcccatttacatcctcactctcaaaaacatttggcacacaatttaagtgatattagcaaagttgagacattagattcagacgaggggatacaaaagaatggtgagagtggtataaaaaaggatacacaaattattgtcacctcacattcaacacatattacaacatccatagatcttgagaatttggtagttttgtacaaagataaagggaaactggactatcattacatcttggacggatttaaagataatagggagggtagggaacatatccgttatttaaagaaatacatagatgcgactaattcatcaatgttctttgctagaaaacttattttggtagaaggtatctctgagcaaatattgattccaaccttttttaaattattgtatggtcaaacattagaaagaataggttgtaacatcatcaatgtcaatggcctggcttttaagccttttcttgaagtaataaaaaatggctattttataaaaatgtggagttgtaacggataa

SEQ ID NO: 78389 - DNA, 1290 bp, Geobacillus sp. BCO2
atggggagaagcaagaaaattagtaaacataagttaattattgcggctgctggatctggtaaaactagagaactaatcaaaagaataaaagataagattaaattattacctccatctaaacacttaattgttataacttatactaatgcagcaactaatgaaataaaagaaagactggaggaggaaattagtattcctgaaaatgtatttataggaacgatacacagttttttaattaaatacgtgattaaaccgtatggtaagattttgaggcttgttcccgatgaaattacaataacagattatgacatcaaaatagattcccagacgggaaatcaatattaccaaagaaaaaatcaaataattaatgcattgtcacgtaaaggcattattacttatgatggagttgtaactctagcgaaaaaaattcttaaaaatgacgtggtaagggcaagattttgtaagagaattgcgtatttgtttgtagatgaatttcaagattctgatttaggtcaatttcagatatttgaaatattaagaaaaggaaactgcactgagatagtacttgtaggagatcctgaacaaaacatcatgaatttccgaaagaaaataacaaatcatcctatcgtttcccttcaaggtaaaaaaacgtatcatgtagaatgtatacagaataactatcgttcgagtgaaacaattgtagaatttattaaccattttcattctgatattaagcaactttataagaataaggaaattacatctaaaaatcctattgtgtttattgaatcaactgaacttaatcaaattgtacgcaattttaatgatttatgtactaacaaggaatattgtgaaaacaaaccgaaaaaaaggttttttctagcgtatgaaaataaagaatttgatgaatataggattaataatagcggtaatagagagtctaaacaggcatttaaagttatagatttaattatgcaatatcttggtgctctttataatgtaaaaaagtctaaactgattaatcattttaatatggaaaccattgaattcagaaaaaggtgtttgaatctgttttttaaaattagaagcgatccaaatatgaaaatagagcatataattacatatctaaattcattatttccgcataagattagtcctttagaggaaaacacaaatattcaatttaaaattgataaaattgtagaagattttattaaagacatccaatctatcgattttaaaaaaatattgataacattattgatgatgattatgaagaccactttctaa

SEQ ID NO: 78390 - DNA, 2070 bp, Aneurinibacillus migulanus; identical to SEQ ID NO: 75376

SEQ ID NO: 78391 - DNA, 1719 bp, Aneurinibacillus migulanus; identical to SEQ ID NO: 75377

SEQ ID NO: 78392 - DNA, 2136 bp, Serratia marcescens
atgtatctaaaaagtttagttattcataactttaggaaatttggcgatgtgaataataaagtatgttttgttaaagctggtaaaacattacctgaacaatcaccagtggcggcatcaaccacagttgttattgggaaaaataactcaggtaaaactacgataacaaactcactatctttgatatgttctgacactgaaagattaacaggaaatgactttaaccataattatttgaggaagattttgtcttctatgatggcatcagatttctcaaagtatccagaaataaagttcgaaatggaatttatcttagatgacattcataatgatagcactagcaacttcgcaccattcatcgatatatcatcactaagtagtactcctggagaagaaaataatgctgcaacagcattagcattaataacctttaaaataaatgatgaatcaatttttcaggataaaatgaaagatctcattcgagaaaagcaggaaaattcttataatgacactgaggtttttaggcggtttttagatttaatatcaatgacagaatttaaaagagtaattaagaataaaagcaacagagtaattgaaaaggttagaataaaaaacataatcgatcttcgagttatcaaggtagcaaataatatacatgaccaaagactattagctaagtcttttaaccgcatcataaaattcatgtatgaaaaaaataaagatgaactaaaaagcattttgcatttagtagatggcaataatcatagccttacagaaatgatcaagctaagtcatcaggataatgtggagtcagtcttgaacacaatcatacttgatgaaagtttaggtattgaattaagagctaacttaactttcgataaattgatgggagatcttataacatatgagcatcgagatggtaacaatttaattcctgaaggacagtttgggttagggtatgcaaatcttataaatataattagtgagataattgattattccaataggagtctgcatgaacaaaaacaactaaagattcaactattatgcattgaggaacctgaagtcttcatgcaccctcaaatgcaagttaatttcattcgccatatcgaagaggcgctagtgaaaatattaggtcttaactttaaagatattagttctattaaaagtcaaataatagttactactcactcctctcatatattaaatagtattattcatggcagtggaacttttaatgagataaattacattaatagttccaaacggaatagcgaatgtatcgttctgaatgatgatgaactttgtgatggtggcaaggagtttgactactttaaatttataaaaaaacacgttaaacaccaagttcctgagcttttcttttctgatgcaataattttagttgaaggtattactgaagagcgcgtcctgaattatcatatcgataataacgatattttaagcaggagaaacatttcagtatttagaattgatggagcgcatggtaaggtttattcaaacctgctgaaaaaaataaacatccccacactaataataactgatatagatttcaaaagagatagttctcttttcaaacaagtgactataatggaggatggttcggaggttactacagagcatttcccacagatggagaaaattgacaattcaactgaaacaaccaattcaacgttaagctatttcttagggagtaagaaagttggagagtatcctacacatcatatctcagataatatatatatatcttatcaattagaaaggatatccattgatattcctggttccaaacagtctcattattatgccacttcatttgaagaggcatttatcctcaaaaactataaaaataacttattgagagaagtattgctgagagttgttggaaaggattactcagatataatttcaacgaaacaggatgattattaccttctcgcgacgaactcattcaaaatacaaaagaaactttccgattgtaaaagtgcatttgctaattctattatttttgaattaatcacgagcaacaaaaccaaacctatactgccatcatatatattagatggactatcctggctcgagagacaaaaaacaaaaaaggaaggatttgaccatgtatga

SEQ ID NO: 78393 - DNA, 2031 bp, Serratia marcescens
atgtatgaaatagataaaaacaaggccaaaaaagaagaagaaataattgaaagaatatattcattaattaataaaaaagaatctttttactttcaatctggtgctggctctggaaaaacatatgctttagttaaggcaatcaaacactcagggaaattagaccttataaaggacaaccatggtttcagaaaaatattgtgcataacatacacgaacaatgccaccagtgaaatagttgagagactgccaaactcagacctctattatatatcaacaattcattattttatttgggagctattgaaaaattataataaagaactaattgatgtacatgtatcgtttcttgaaagtgagataataaatatagaagatgcgatttttcataatcctgattctaaaccttcatataaaaaattcagagacattaccattacagacttagagtttgctatcgaaaagatatacattgacaagaccaattattatgaggttgcctttgggccagctaaagaatattggaattatctcgaatctataatggggacaactacattacagagaatcaagtctaacaagcaagatgtttgcgatgtaataaaattgctaatgaatattagaaattataaattttgtctggaatcaattcagaatggtcaccttgaatataagaaaataatatataactccaatcaaaacattgaaatacttcataggaacatcataggtcatgacacattgcttaaatatgcaaaaatgttattactgaaaaatcgaggcttatcaaagttagtgatagactcatatccatatatttttattgatgaatgtcaggatactaacccggacattatagatttctttgctgaaatatatgactactccaaacaatctgaagatgattttgttctgggattttttggcgatccaatgcaaactattttctctaaagaaatagttcatgcccctttctattctaggctcaatgtcatcaataaggatttcaataggagatcctatgatgaaatcataaatagtataaatataatcagagggaaccatcagcctattattcagacttctatttttaaaaataaaaaaggtggcttggttaagtttcaaaggttggacgaactatataatgaaaagtcattgataagagaaatcattgctgagcatgtacgtgagtggaatatatcatcagaaagttcttttgcatgtctagtcctgaaaaataaaatgcttgctagcttgtgtgactatgaaaaagtttatagtttagttgctagactctatcaggcagaaaactcttcttatcacaataaagttaatgaggaattcgttgtaagagaaattaagaaggcagggcggttggctataaccctccacaaaatattacttccattgttttttattgttaaggatgacaggttgtctttaaatgaagtcttcccagttattcccaaaggacaatataatttgaatgaggtacgtgaggctatatcgttcttcaaaagtgtatctaattgctctttgttagaatatattgataatattcgtaacaaattaaacagcacatatccccgtgaaataaaagaactaataggatgtaatttcccgacggaactagttaatgctgactcgagtttggaagcgactattttgggattgtctggatttaagagggtttctgagtgttctccaattttatctgaacttcttcaagttaataccaatgagtttttgaattggatgaattacttgcacggggagaaaaaaacctcaggcacaaattatttaacatgccactcatcaaagggattagaatttgataatgtactgattttactcgaagattcaatgttacatgataagaacattttttctgaacttctatcttcagatttaaacataacgttaaatgacaagttagagagagccaggcgtattttttatgtttcagtctcacgtgctatcaagaatgttagtatagttttgttttctaaaaatgctgttgattttcaaacgtaa

SEQ ID NO: 78394 - DNA, 2025 bp, Chryseobacterium indologenes
atgaaaataagtaatttaaagattaaaggatttagatcatttgggccagaagaaattaagattcctgttgatgaaaaactggttggttttattggactcaatagtgctggtaaaaccactgctcttgaagcactaagaaaattatttggacaatccttaacagatagggaaattttccggcaagattttcatatcggcaaagatgaaaagcttgaagatattactgaaaggactctttctattgaagccagaattgattttgacgaagaagagcaggaagcagttcctcatttttttaccgatatggtaattgatgaagaaaacagcaatccatatctccggttgagactcgaagcttcttggataaaaactgattatggtcctgaaggtgaaattgatagtaaagtttattatattaaagttcctgaaggtagtgtagaaggtgacgacaccaaacaaatatttcctaatcacttaaaacgtctgatacaaatactttatgttcctgcaatacgtagacctgttgaacaattaaaatatgcgtctggaagtatattatttcgtgttttaaaaaagataaaatcaaatgatacttttaaatcagaattcgatgaaaaaataaaagatataaatgatgcttttaaaggtttggaagactttaatatcgtacaaacatctattacagaaaattggagacaattccataaagataagcgttataaagatacgactcttggctttggaggaagcgatcttgattccattctgaaaaagcttgaaatatcctttagtcccaccggaacccacaaaacctatcagattgatgagctgggagagggctatcgttctttattttatttaacactggtatgtgccttactggaaatagaagagaaattagcagaaaatgatgacgaagagaatattgggataaataggcctcttctgacaatattagcgatagaagaacccgaaaatcatattgctccacagcttttaggtagggtaataaaaatattaaaaaaaatcgcaagtaaagataattcacaggttttactatcatctcatacacctgcgatcgttaaaaggctgaatccggaaagtattcttcactttagaattacggaaaaatttgaaactgaagtaaataaaatattacttccagagaaaacagatgatgcatacaagtatgtcaaggaagctgttcacaattatcccgaattatactttgctagattggttgtaattggcgaaggagatagtgaagaagtgatcttcaatagacttatggaagtaatggaagttgattttgatgacaatattatcacttttgccccacttggccaccgatttgtaaatcatatttggagattgttagaaacactccatattccttatgttactctcttagatttagacgtggaaagagaaggtggaggttggggaaggattaaatatgcacttaatcaattaattaaaataggtataaaaaaagaagagcttctaaagttggctgatggaagtatactctctgatgatgcattaaaagaaatgcatacctggagtttgacagaaaaagattcaattgaaaatttgaatggctgggtggattacttgagaaagtataatattttctattctaatcctcttgatttggattttctaatgcttacacattatccagaattttatagaaaagcaattccaaaaaatggaggacctcaaataccagatgaaacaactgaagctgaaaaatttgatgctaaagtgaaggtagccatccaagctacattaaaatcagagaaagcaaccgcagctacctactctgaggaagatcgaaaattaatgatctggtataattaccactttttaggccgaggaaaaccaactacccatattcaggtcttatcgtctatgactgatgaagaaataaatgctaatctacctcaggtatttatggaggtttttgattgtatatcgtcacttttaaaaacaaatcaagaagatgaagccaatcaaatctaa

SEQ ID NO: 78395 - DNA, 1854 bp, Chryseobacterium indologenes
atgaagccaatcaaatctaaagaatggatcccaacagatggaatggatcttgaagaaaacgcgtttaaagttgcaaccactatagaaaataaccttgttgtggctggtccgggtgcaggaaagacagagcttttagctcaaaaagcttgcttcctcttgcaaacgaatacctgtaaatttcctcataagatactagcaataagttttaaaagagatgctgcatacaacctaaaagaacgggttagacttcgttgcggtgacgaattatctaaacgctttgattcattaacctttgactcatttgccaaacaattattagatcgatttaagcaagcacttccagatgaatataaaatctcatcagaatatgaaattgtgcttggggatcaattcattttagctttatatgaaagtgaagatattaattatttcaatacaacacatcgaaataccattatccaacttcataacgcacaattaccgcacttatcaaataataaagctgaggctataagatataaagtttggcagaaaatgattcagcaatcaaagttatctttcaccatggtgatgcgtttggctgaatatattatcaatacaaacccgaaaattaaagaataccttcaacaaacttatcattttgtatttttagatgaatttcaggacactactgaactacagtatgatctattcaaaagttgctttttagatagtcacacttcttacaccgctgttggtgatgataaacaacgtataatgatgtgggccggcgcaagagaaactgtgtttgaggattttattactgatgtaaatgcgactagaattcctctcaatatgaactttagatgtgcgcccagactagtgactttgttaaatcatcttactcgtcatttattaggaaaagatgattttgctactccatcgccgaaatggaacgccgaacagggagaatgttacttttgggtttttgaaaatccagaatcagaaatgcaaatactttttcgtgaaattcaagattggataaatacagaagggataaatcccagggatatatgtattttggttaaacagcaattaacgcaatatgccggagatctcattacttattttaatgaaaatggtattaaagccagagacgaaaataaattgcaagatattttaacacaagaagtctgtatttatatcattaatattctatatgctatttttcagaaaaaagccggcgaagccaaacaagcggcatttgtttttttaagcaatcttcacacagaattagaagatgatcaattaataaaactgcaaaatatcatttcagtttttattaagataaagcaagatgcatatcaaaagagaactctcagtgaagagcagatcaatacacttattgatgaaatcatcgacttcgcaggtaaagaccgcattagagcaagttttccgtcatacaaaaatgctgctgaattcgatcgaaccattacttctttgaaagaggtgcttattaaagattatcatactactaagaataatatgattctagcgttagatatggtacttggtaaagacacaataccagttatgacaattcataaaagcaaaggtcttgaatatcatactgtgatttttattggcttggaggatggtgctttttggtcatttgaacgacaaccggatgaagataaatgtgcattttttgttgcattatcaagagcaaaagagcgtgtagcatttacatttagtaagaaaagaactggtcgttttggattgcgggatcaatcaataacaaatattagcgttattcttgacgaattaaaaaaatcgggtatagttacaatggctgaaagaaagttaaatagttga

SEQ ID NO: 78396 - DNA, 2079 bp, Pseudomonas aeruginosa
atgcggatcgagcgcgttgagattcaaaatttcagactgcttcagaatgtcagccttggcctagaagacggcacgacgctgattgtcggacgcaacaactgcggcaaaacctccatcgctgaggtgtttcgtcggctcctttcagacagggctccctctttcaggcttgaggatttctccctgggaagtcacgaagagttttggacggcattcaatgcatttcacggcgagatagcccgctccgatgttgccgtcatgcttcccgttgtcagggtcacactggacatttcctatgacattgatgccccagatctggggccgctcagcgaatgtatcgtagacctagatccagattgttcttgtgcgcgcatcgtcttgacctatggcccacgggcgacagcccttgagtcgcttttcgcagaaatcattgctcccaacgcggagcagggggatcaacgtcctggctttttcagcctgataaagaaacgcctggccgcggcctacgagcctcgcctggaagcggtcgaccccaacgatcctacgaaccgcaaggacctcgaccttaaagcactcactacgttgatccgcggcggattcatcaatgcgcaacggggcctagatgacgatacacaccgagagcgcgatattcttgggaaggtggtggaggtactgtttcaatcggcattgaccgaccccacagatcccgagaagcgaaccacagccgaacagctccatggcgcagtggagaagattcaaaaggagctgcatgacggtttcaacgctggattgacttcgctgctccctacgttcgagcttttcggctatccaggcttagatgacccaggcctcaccaccgtgaccactttcgatgtcgagcgcctgcttaaagaccacacgcaggtcagatacaggggggtaaacggtctgaccctcccggaaagctacaacggactcggcgtccgtaacctggtgtacatacttctgcaattactgaaattcttcagggagttccaagctacgccggcagcagcaagcgtacacctaatcttcattgaggagcctgaggcccatttgcatccgcaaatgcaggaggtcttcatccgacaattgcacctgatcaagggcgcgttcgaacagcaactgaatgacagccgtccttggccagtgcagtttgtaatttctacccactctccgcacatggccaacgaagcgcgcttcgaaaccatgcgttactttctctctgtgaccgatgaacacgggattcggcagtccaaggtcaaggacttgaggtggggtatgggcggggctccagcaccggacagagattttctgtatcagtacctgacgctcactcgctgcgaccttttctttgcggacaaagccatcttgatcgagggaacatcagaacgattgctgctgccaaccatgatcgccaaaactgatgcagctgcggtcggtgagcctcagctggcaagtcagtatttgacggttatggaggttggcggcgcatacgcacatcggttccatgaccttcttactttcctggaactgcgtacgctgatcgtgactgacattgactccgttaagccgaacgctgagagaaaacgaaaagcctgtcctgttgcggaggggctgtacacgagcaatgcctgcctcaaagactggtttgaggccgaagtgactcctgcccaactgctggcgaaaacctcagcagagaagaccagaggattgaggcgcatcgcctaccaaattccggaagggaacgaacccgggccttcaggcagaagctttgaggacgcgttcatcctggcgaaccttgatcgatttcagctggggcagggcgatgtggcatccctagcttacgagcatgcggcggaccagaaaaagtcagcttttgcgttgaaatacgcgatcgatgatacgaactggaatgtgcctagatacatcgctgaaggattgcgttggctcgcagtcggggcgccggtcgttgatgcccaaatggctgctcggaccatggccgcagtggttgaggctgttggcgaagcagtggccgctgaaggagggcaaggcgatgcctga

SEQ ID NO: 78397 - DNA, 1755 bp, Pseudomonas aeruginosa
atgcctgacattcaggaaagccccgcggacagagcagggcgagaagctctggagcgcatgttcgcttgtttggatgaaggtcaaagctttcgcctggaagcaggtgctggagctggtaagacctattcgctggagaaggcactgagtcgattgattgagcaccgaggtccagcgttgatccgggagcgtcagcaagtcgcgtgtatcacttacaccaatgtggcaaaagacgagatcatctctcgcttccaggcgcaccctgcaattcaagccgagactgtgcatggtttctgctggtcattgctcagagactttcaatcatcactgagagcattccttggcgcagaagctttttggcaagatcgctttgaaacggtgggaggcgtaggcagcaggcgcatccattacgaaatgggtattccacgcgtatcggaggacgaagtctcgattcggcacgaagatgttctgaccttgatggttcaggcgcttacgtctccgaagtttagggccgtattgacgtcccgatatccgatcctgtttctcgacgagtatcaggacacggatgagcattttgtcgatgcactgaaatcgtggtttctagatcgcggagaggggccgatgattggcctgtttggtgaccattggcaaaaaatttacgatgagggctgcggcctggtagagcacgaggcactccagccgatcgaaaaaaatgcgaattttcgctcggcatcgcggattgtcgatgtgttgaatcagatgcgaccaggcttgcaacaagaggtaagagatccggacttgatcggtgaagcccgggtgttccataccaatcgctggcctggagcacggcgcacgggagccgggggtggtcactggactggcgacaccagccctgaagcggctcgtgcttacttcgaatgcttgaaagttcagctaaacgtcgaaggatgggacttctctccccaaaagaccaagattctgattttgaaccacagaggcattgctcgtgagcaggggtactcctcgatccctccaatttttggacagttcaacgatccctggctgaagaaggaagatccccatatcaagtatctggcagatcagcttgagccagcatgtgtcgcatatcaacagcgtagatacggcgccatgtttgggcacctcgcaagcgatcggccaacgattcgaaggcacagcgacaaagtcgcttggactgaagcaatggaggcgcttctcgagctgaggttgaccggtaccatcggcgaggtgattgaccacatcatggccgtaccgcagatgcaactccccaatgcggtgctacgaaatgagcaagggttacagcacgccggtgtagaaccaggtgaggacgagccgcgcaggattactcagcttcgaaagctaagggaagttccttactcagagctgatagcgctggaccaattcatcgatgggcatacgccgttcgcgacaaaacacggggtaaagggagctgaattcgaaaacgtgatcgttgtgctgggccgaggctggaaccaatataatttcgctgaaatgcttgagtggtttcagccggggccaccggcgaacaggcgtgagaaattcgaaagcaatcgtaacctcttctacgtcgcgtgttctcgtcccaaggtccgtttagctttgctttttactcaactgctaagcccggcagcgctagctcagatcacggcctggtttggcgctgagcatgtattcgagttgcctgctaaccctggttga

SEQ ID NO: 78398 - DNA, 2079 bp, Pseudomonas aeruginosa; identical to SEQ ID NO: 78396

SEQ ID NO: 78399 - DNA, 1755 bp, Pseudomonas aeruginosa; identical to SEQ ID NO: 78397

SEQ ID NO: 78400 - DNA, 1974 bp, Rhodopseudomonas sp. AAP120
gtgcgtatccaatcaatctcgatctcagggtttcgctccttcgggccaacgccccagcgcgtgtccctggcaggcgatctgacgaccatcgttggaccgaatgcatccggcaagacggcgctgcttcaggcgctcgccaaaatgttcggcgtaacccgagcgcagcgcacgctccaccgatccgatttccatttgccaaaagacgtagcgcctgacgatcggacgacacgggacctgttcatcgacgttgtcatcacgcttcccgaactgaaagacggttcagcgactgcagaggccgttgccccgacgtttcggcatcagcagctcgaaggaccgaagaaggtacctgcttgccgcctgcggttggaagctcgctggcaggacgacggcacggcggaaggagaggttacgcaagaactgttttgggtcgatcatctcaaagagaaggtcgaggcggacgacaaacacactgtctcaccagccgaccgcgggcttatccagttctactacacgccggcctcgcgcgacgcggccacacaaatccgcgccactaccggcgcgcttgccgctcgcctcatcaaagcgatcgagtggtcgaaaggcacgcgtaaagctgtcgatgacgcgacaaagaagctctctgatgccttcggcggcgaagccgccatcgatgcgataagcaaagcgctcaacgtgcgatggaaggaattgcacgacgaggagacggacaccgatccaggcctcacactcgtcagcaaacggttcgaagaggtcgttgcgcatatacaagtgatgtttcagcacgggccagcaaagatcgagcgcggcctggatgtgctgagcgacggtcaacaatcactcttctatttcgctctcgccgccgcggtcttcgatttagagcgcgatgctgtggccaccaagatcgagggattccgcgcggaagagttgcgcattcctgctttgagcatcttcggcctcgaggagccggagaaccacctatcaccatactacctttcacgcatcgtcaagcaggtccgctccatagtcggcggaaatgcggcgcaggcgctcattacaagccattcaccatcggtgctcagccgtattgaaccgacagaggtccgctattgccgatgtgatcaagatacgcgtgcttcaactttgcgcacgatcgagcttccctccggcgcgactgaggcggctaaattcatccggggagcgctcttagcgtttccggaactctacttcgcgcgcttcgtcgtcctcgtcgaaggtgattccgaacgcatcgtcattccccggctcgcgcaggcggaagggctcacgctcgacccttcctttgtggccatcgtgcccatcggcggccgccatgttcagtatttctggaagttattgaacaatttatcgattccccatgcgacgctccttgatctcgatctgggccgtaaggacggtggctacgggcgggtgtcgaactcgctaaaggagctcgtcgctcgcggagaagaccaagatacgttgctgaagggaaaggattttgttgtcgatccagataagatgaagggctgggactcgtctgattggagcacgctgaaaacctgggtgaatttcttggagccatacggagtcttctactccgctccgctcgatctcgacatggagatgctctcggcgttcccggacgcgtacaaggcaatcatcgccaaagggggcggcccctcacttacgccggacgaggcggtggaagtggtgctcggcaagggcggaaacgggatcgcagagtacaaggcggccgaatttgctggctacaaagcccacatgcccgcataccggtatcactttctgacacgcagcaagcccgcaacgcacatcgaagttctggcacatcttgacgataaggcactcaagaaaggaatgccggacgtctaccgacggctcatcaaacacatcgacgaaaacctgaaccgggactag

SEQ ID NO: 78401 - DNA, 1905 bp, Rhodopseudomonas sp. AAP120
atgacgctcgtcagccgccgggtgcagcccgaccaatggaagccgatcgacgtcgatgcgctcgaactgaatgcgctcgacgttgttcactcaaccgataatcggtgcgttattgccggaccgggctcaggcaagacagaacttttggctcagcgggcatcatacttgctccagtgcggcatcgcaccaccgccgaagcgaattcttgccatcagctataagcgcgacgccgcctccaatctggcagcgcgcgtgaagagccgctgccatcccgatcacgcctatcgcttcgactcgttgacctttgacgctttcgcaaaaagtctcatcgaccggttcggacaggcgctgcccgagcgatggcgaccgtgccccgattacaaggttgtcgtcgatgcgtatgatcggacgttcgacgagttcctgcgctttttgtcgccgccgccaaaggcgatcgggagccgggccgatgtcatggcgatccactcgaaggacttccagcgtcgctggctattcgggacgcctctgcccgagggcgccccgaccatcacatctcccggagaatgggctgccgaccaattctggcagtcatggctacacgatccaggcggatcgtcgctgactttcccgatgctcagccgattggcgggactgctgatttcgagcaatcctatggtcggtcacgccttgcagctgacctattctcatctcttcatggacgaatttcaggatacgacccaatcgcagtacgacctcgcgaaggcgatctttctaggctccgataccgtggtcacagcggtcggagataacaagcagcagatcatgcggtgggccttggcgatggacgacccgttcacgccattcgagaccgaattcaaggcaaagcgcacgccgctgctcaacaactaccgttcctcgccggacctcgtcgctattcaggacgtgcttgcgaaagcgcttgacgccaagtcgtcaacgccggtgtcgaagacaaaagggacggtgtctggcgacagctgcgccgtttgggacttctctacaccggccgtggaggctgatcgccttgcagagtttgtgggcaaacagatggcggagcacaagctaacgccccgcgacttctgcattctcattcgtcagaaggccggcgactatatgaaggtgctggagccagctttcgcgaagaaaaagctgccacttcgaaacgaggtcgaacaggtcggcgaggtgacgatgcaggaactgctcgtcgaagacctctccgaattcctcatcgtgcttctgcgcctgtttaccacggtgcgcgcggggcggcattggacggcttgcctcgacatgatgtgtacgctcaacggcctcgcgctcgatgatgatgcgggacgagctaagttggtcaaacggcttaatgccttcgaagcggacttcaggaagacctatccggtcccggtgactagccaggctgacgcaaagaagattgttcagtcgctgatcgccttcatcgggagggcgaacatccttgccgcgtctcccgcatatcgtcagggagattggttcgacaaagtcagcgatgcagcggcactgcatttggaggcaagttcaagttccgccgcgaactggaccgaagctctcgatgaatacgaaggcgtgcacactgtgccgctgatgacgatccacaagagcaaaggcttggagtatcacacggtcattttcgttggtcttgatgaccaggcgtggtggagcttcgcgaacgacaagatcgaggccacggcagggtttttcgtagcgttcacccgagcgaagcaacgtgtgctgttttcatattgtgcgcagcgcggcgaccgcagtaagatagctgtcctgtatcagcttttaagcaaggccggcgttaagacaattaaggtcgcttag

SEQ ID NO: 78402 - DNA, 1872 bp, Bosea sp. AAP35
ttgaaaatttattccgtttcgattgagaattttcggggcatcagttccgcgaagctgattctgcccgaccatgctgtcctcatcggcgacaacaacacgggcaagtcttcggtcttggaggcgatagatcttgcgctcgggccggatagattgagccgcaggcctccggtcgatgagcatgattttttcgagggcaagtatcttcccctgaccgcggcctccgctgaggagggcgctgtggccgatgaagctggagcggcccccgtcgcggaagccccgaaaatcaccgtcgaagtcacgatcgccggcctgtcggaagagcaggaggccaggttcggcggcaacatcgagtggctcaatgtcgaaactggcgatttcttcaccgaggccaacccggcgggtgtcgatgccgcgcacattcaagcggcgctccgcgtcaccttcatcggcgcctacgatcccgatgaggacgatttcgtcggcaacactttctattcgcgcagcctaacggaggcggacaagcccgagccattctccaagaaggacaaacagcactgcggcttcctgttcctgcgctcccttcgcaccggctcgcgcgcgctcagcttggagcatggcagtttgctcgacatcatcctgcggctgaaagaaattcggccgcagatgtgggaaggcactatcggcacgctcgccgccttcgatgtggcgagcgatcccgcgctcggcatttccggcgtgctcgacagcatcgacaagtcgttgaagaaatatgtgccgcgcgaatggggtttgaggccgcacctcaaggtgtcaaacctcacgcgtgaacatcttcgtaaggtcgtcaccgccttcatcgctactggcgacggggatcacgcggcgcccttcttccgccagggcacgggcacgatcaacatgctggtcctagcaatgctgtcgcagatcgcagaggacaagcagaatgtcatcttcgccatggaagaggtcgaaaccgcgatcccgccctatgctcagaagcggatcgtgcatgagctgcgcaagctggcagcgcagtcgatcgttacctcgcactcgccttacgtacttgaggagttcaagctcgacgagaccgtgatcctttcgcggaccaatcacggtgtgctcagccaagcgcagatatcgttgcccgacagcgtaaagcacaagcgttatcggcaggagtttcgcacgcgcttttgcgagggcctcctatcccgccgcgtgctcatcgccgagggtgcgactgaggccagcgcctttccggtggctgcgcgccggctgtcggagctaaacccagccgcctatgcgtcgcttgaggcgctcgggatatgcgtcattgatgcaggcacggagtcccagatcgccgacctcgccgggctgtacaagggcctcgggaagcggacgtttgggctatgcgacaagcagaccgatccagcgaaggcggcgatcgaagcccaggtcgagcggctgttcatgcatgaggaaaaggggattgaagatctcatcatcaagaagacgacccaagatgcgcttgagcggttctccgacgcgctcgactggccgccgcatatccttgcgaaatatcccgatccgaagggcagcgtgaacgcggcgctgaaagagtatttcggctgggcaaagggcaattggggcatcgccgatttcctaggccagtgttccgaggccgagttcccctcctggattcgcgacgcctgcataacactgaaggcgatctgtgatccgccgcctgcgccgccgataccgcccgctcctcttgcaccgactgtgccagccccgccagcgccaccggcagtgaacggccagcaagccgcgccagcgtccggcgcctag

SEQ ID NO: 78403 - DNA, 1824 bp, Bosea sp. AAP35
atggtcgatctgacgccagcgcaaaaggatgttctggctgccgaggggcatcagctcgtcgtcggcggtcccggctcgggcaagaccactgtgtcgatcctgaaggcggcgaagatcgcgcgcgagaaacttaggccggggcagcgcatactttttctgagcttcgcgcgagcgaccgtctcgcgagtgttcgaggcgatcgacgaagaacggtcggtcaccaaggaggaaaagaagcggatcgaggtcgatacctatcactccttcttctggcgcatcctcaaggcgcatggctatctcgtcggatttccgcggcggatgacgatcctgacgccgccgaatgaggcgatcgcgctttcagcgatccgcggcggcttcaaggcgccgtcaaagctatcggatgaggagaaagtgcataaggccgcgctggaggtggccgagcgcatgcggctcgcgaccgaggaaggtaaggtctgcttcgatctgttcgccgagcgcgtggccatcttgctgcatgggtcaacaaaggtctgcgagcttgtctcgacgatgtacccgttcatcatccttgacgagttccaagacacaagcgctgatcaatggcgcgcggtcgaggcgatcgggaagagcagcacgctgatctcgctggctgatcccgagcagcgcatcttcgatttcatcggcgcggatcccgagcggctgaaccacttcaaggaggcgttcaagccgttcgaacacgacctggccggggacaatcaccgaagcaaggggaccgatattgctatcttcggcaatcacctcctcacgggcaagtttcgcgaccaaccctaccacggcgtggagtatgaggggtttgcctcgaatcctaaccaggcgtatgcgtcgctcgtcgctcaggtgctcagggcccggcaacggctcctcgcgctgggtcgccgggactggtcgctcgcaatcctggttccgaccaagcgtatgacacgtctggtctccgacaatttacgcgcgccgtttggcaacgtgccgccgatcacgcacactgcggccgtggatatggaaggtccgattcttgccgccgaggtgatcgccttcctgctgcaacagcgcagcaacagcggctgcttcgatgaattcgtaggagtgctttgcagcttcttcaacggacgaggcggagcgaccccgaccaagggcgatctagaggaagccttgcgcttcaagtccgcgctggagaaatggaatggatgcattgctaagggcaaggcgacgccgggtaacagcgttcttcaggcgacattcgccgtccatgaggccgcgagcactattgcgctgacggggcagcccgatgccgactggacagcgattcgagccgtcctcgaagccggaggctgcaagcgtatcgtcgaggttgcccaggaagcccgtaatgtccgcctgctagaacgcggaacccaactgcgtcaaagcctctcacaagattggcgcgacaccggcggctataagaacgccctcaccattacgcggcagtcctttgcccaggagcatttcgcgacggcacacaaacccgaatccggcatcgtcgtgatgaatatgcacaaggccaaggggaagcagttcgacgaagtcataatcttcgaaggctggcctaagcggttcaagggcgaaatcgtgggcaatccggatcgtatcgtcggcggcaatgtcaagtcgcgtgctttgacacaggcccgccaaaactttcgcgtcagtgtaacccgagcgaaaatgcgcacgaccatcatgtcgccgaaagacgacatctgcgtcctgttgattcccatggaataa

SEQ ID NO: 78404 - DNA, 2076 bp, Fusobacterium nucleatum subsp. animalis
atgattttaaaggaaatagtagtagaaaattttcgtttattaaaagattttaagttagagcttaaagatgagttatctttaattatagggaaaaataattgtggaaagacatcagtttttgttattttagataaaatgttaaattcatctgaaattgcatgggaagatgtaaacttagtgaaacaaaaagagctatacaatgaaataaatgaatttaatgggactcttcaagaaggtgacaagtatcttgaagcaataaaacttcaattgtatattgaatataatgatattgattcttatgaaaatattcaaaattttataatggatttagatccagaaaataatattattcttttagaatttattttattaatagatataaaaaatattttagagttaaaagatataataaaagaaagagaaataaaagatttttcaactttttcaagatatatgagtaaaaattttacaaaatattttaaaataaaaaagtattccagaggttatgataagggaaataaaaaattaatcccagatatgaaagaagaaatagatagtaaaaatatacaaaaagtgatcaaagttatgggaataagagctgatagagcagtttttaatgatgaaagaaatcatgctttatcaactctaacaagtagatattatgacacttacagaaaaaatataaaagatgaaagtaattcgatatttcaagagcttgaagtagagttagaaaaggcagataaggcactatataaaatttataatggagaaaaaacaaataacaagaaaggttcagaagggatatttaagggtattatagatgttgtaaaaacttatggtggatctgataataaaattaatatttcaatagaatcttcaatatctgaaaagaatttattaaccaacaacactagtttatattataaacatggtgatggggatagttcttcacttccagaaacttataatggattaggatatttgaatttaatagggatattatttgaaattgaaactaagcttcaagaattgtatgaacagcctgctgacataaatattttatatatagaagaaccagaagctcatacacacccacaacttcaatatatatttataagaaatattaaaaatcacattaatagccatagagataagttgaagaataagaaaaataaatatcttcaaataataatcacatcacattcatcacatattgtttctgaatgtgattttgatgatattatttatctaaaaagaatagaaaataatattttggctaagaattttaattctttaaaaaaagagtatgatggtgacaaacaaagaggatttaaatttgtaaagcaatatttgacattgaatagaagtgaattattttttgcagataaagttatttgtattgaaggagatacagaacgtatattaatgccagcaatgatgtataaagttgataaaatgcaaagttcaaaaaacaaatcaactattccattattgtcacaaaatatttctgtaattgaggtaggagcatattcccatgtttttataccattatttgtatttctaggaattaaagctttaattattacagatatagattctgccataaaaaataataatggtaaatatgagaaatctcatccagataaggcaactcatacaagtaatgcttctataagagaattttttaaagagagtgggttagatggtggaaataagcaatttaaagagcttatagaaaagaaaaatgaagataaaataaaaggcaagataagaattgcttatcaaattcctgaaattgaaggaggttatcaagctagtagttttgaggatgcatttatatcactaaataaagattttattttaaaaaataaagataatttttatgactatggagcattaaaaaaatttaatgaaaatgaaataaataaggattcttatgaattttctctaaataaaattgaaaaaaaatcagcatttgcttctggtttgctatattttgatgaagaagatgaaggtatatcatggaaagttcctcattatataaaggaggggttactatggatacaaggattttag

SEQ ID NO: 78405 - DNA, 1911 bp, Fusobacterium nucleatum subsp. animalis
atggatacaaggattttagaagatggagtaaagggagctttacaatgtatagaaaaaggagaaaattttatattagaaggtggagcaggaagtgggaaaacatattctctgatttcattaatagaaactttaattataaaatcacctgaaattaagattgtatgtattacatatacgaataatgcagttgcagaaattaaatcaagaattggtagtaaaaatctttgggtttcaactattcatgaatttatttggcatataataaaaaaatatcaaaaagaaataaaaaatgaactaatactttttattaatgatgaaacaattaaaaattttaaaaagccaaaagaaatggaaaatactataattaccatagattattttaataacatagatgttgaatatgatgaatattattctatgaatcctaatgctgaaaataaagttaaaattagccatgatcatattttaattctgactgaaaaaatgtttgataaatataaaaagctatcagatattttaaaagatatagccaattgtatttttgttgatgagtatcaagataccagcccatatatagctaaaattttattagaacaccttaaaaaaagtaaaaagaaaaatgttataggtttttttggtgattcaatgcaatcaatatatgatgaaggaataggagatttaaaaaaatacaatttaaaaaaaatagtaaagaaagaaaatcgaagaaatccaaaaatagttatagaaattgctaataaatttagagatgataatctgatgcagattccttctagtgataggaatggtccaaatatggataaaaatggagttgttattgagggaaatattaaatttatctatggaaaagagccagaggatataaattttcttaaaaataaagctcttttcaaatcatgggattttttagatggaaaaaaaactaaggaattaagactaacccataaatataattccgagatggctggatttaaaaaattatatgatttatacaatgatgatttgataatcatattaattgataaaattaaaaaagttattgatagtagtagcaatgaaaataatgagaaatcgttgagtaaattggtattagagttaagaccaacttataataaaaaagatttacttgaagaaattattaataacaaaatatataactctatttatcagagtatagaaaatttagcatggaaagatatattagaaaaatgtaaaattaataaagagtcattgatgtcttataaatttaatggaataagtgaaagatatgaaactaattcctatagagataaagttttacaaagattagatattttaaatgaattaatagagctgtatgaatctaaaaaatttaatgaatttttaaagaaaacaaatttttctattcaaaataaaaatgataaaagtaaactaaaagaaataatgaattatttaatacttgaagatgggaaaacaatagaagaagttttaaatttttctaaaaaacaaggtttaataacagaagatatgttttttgataactatattggtattaaaggtttttatttatgggaaagaattaaaaaaatatcttttaaggaatacagaaacagtatcctttatttgaaagaattttcgccaatttcaactcaacacagcataaaaggaaatgaatttgataatgtacttgttgtgttagaatcaaattggaataaatatgattttaaaacactatttggaaaaggttcaggaaatgaaaatgttataaaacgaacaagaaaattattttatgtttgtatgacaagagtaaaaaagaatttagtgatatacatgcctactgaagatttagaaatagtaaattcagctaaagaatattttggagaagaaaatgttctttcaatagattcaatttaa

SEQ ID NO: 78406 - DNA, 2076 bp, Fusobacterium nucleatum subsp. vincentii ChDC F8
atggttttaaaggaaatagtagtagaaaattttcgtttattaaaaaattttaagttagagcttaaagaggacttatctttaattatagggaaaaataattgtggaaagacatcagttcttgttattttagacaaaatgttgaattcatctgaaattgcatgggaagatgtaaatttagtgaaacaaaaagaactatacaatgaaataaaaggatttaatgggagtgttcaagacggtaataagtttcttgaagcaataaaacttcaattgtatattgaatatagtgatattgattcttatgaaaatattcaaaattttataatggatttagattcagaaaataatattattcttttagagttcatttcattaataaatataaaaaatattttagagttaaaagatataataaaaggaagaaagataaaagatttttcaactttttcaagatatatgagtaaaaattttacaaaatattttaaaataaaaaaatattctaggtgttatgataaaaaaactaaaaaaataatttcagatatgatagaagaagtagataataaaaatatacaaaaagtgatcaaagttatggggataagagccgatagagcagtttctaatgatgaaagaaatcatgctctatcaactctaacaagtagatattatgacacttacagaaaaaatataaaagatgaaagtaattctatatttcaagagcttgaagtagagctagaaaaggcagatagaagactatataaaatttataatggagaaagagcagatgatggaaaagattcagaaggtatatttagaggcattatagatgttgtaaaaaactatggcagttatgataatgggattaatatttcaatagaatcttcaatctctgaaaagaatttattaacagacaatactagcttgtattataaacatggtgatggagatagttcttcacttccagaaacttataatggattaggatatttgaatttaatagggatattatttgaaattgagactaaattacaagaattgtatgaacaacctgctgatataaatattttgtatatagaagagccagaagctcatacacatccacaacttcaatatatatttataagaaatattaaaaatcatattaatagtcatagaaataggttgaataaagaaaaaaataaatatcttcaaataataattacatcacattcatctcatattgtttctgaatgcaattttgatgatattatttatttaaaaagaataaataataatattttagctaaaaattttaattctttaaaagatgaatacgaaggagataaaaaaagagaatttaaatttgtaaagcaatatttgacattaaatagaagtgagttattttttgcagataaagttatttgtattgaaggagatacagaacgcatattaatgccagcaatgatgtataaagttgataaaatgcaaagttcaaaaaatgaatcaactattccattgttgtcacaaaatatttctataattgaggtgggagcatattctcatgtttttataccattatttaaatttctagggataaaggtcttaattattacagatatagattctgctataaaaaataataatggtaaatatgaaaaatctcatccagataatgcaactcatacaagtaatgcctctataagagaattttttaaagaagatggtttagatgatgaaaataatcaatttaaagaacttatagaaaagaaaggcaaagataaaataaaagacagaataagaattgcttatcaagttcctgaaattgaagaaggctatcaagccagtagttttgaggatgcctttatatcattaaataaagattttattttaaaaaataaagataatttttatgattatggagcattaaaaaaatttaataaaaataaaataggtaaagatttctataaattttctttaaataaaattgaaaaaaaatcagcatttgcatctgctttattatattttgatgaagaagaagatgatatggaatggaaagttcctcgttatataaaggagggcttactatggatacaagaattttag

SEQ ID NO: 78407 - DNA, 1902 bp, Fusobacterium nucleatum subsp. vincentii ChDC F8
atggatacaagaattttagaggatgaggtaaacactgctttacaatgtatagaaaaaggagaaaattttatattagaaggtggagcaggaagtgggaaaacatattctctgatttcattaatagaaactttaattataaaattacctgaaattaagattgtatgtatcacatatacaaataatgcagttgcagaaattaaatcaagaattgataatgaaaatctttgggtttcaacaattcatgagttcatttggtatataattaaaaaatatcaaaaagagataaaaaatgagttagtacttcttattaataatgaaacaattaaaagttttaaaaacccagaagacctagaaaataatttgattacaatagattattttaataatatagatgttgaatatgatgaatattattctatgaagcctaatgaaaataaagttaaaattagtcatgattatattttaattctggctgaaaaaatgtttgataggtataaaaaactatcagatattttaaaagatgtagctaattgtatttttgttgatgagtatcaagataccagcccatatgtaactaaaattttattagaacatcttaaaaaaagtaaaaagaaaaatgttataggattttttggggattcaatgcaatcaatatatgatgaaggagtaggagatttaaataaatataagttaaaaaaaatagtaaagaaacaaaatcggagaaatccaaggatagttatagagatcgctaataaatttagagatgataaaataatacaagttccttctaaggataagaatgctcctaatatggacgaaaatggagttattattgagggtaatattaaatttatatatggaaaagagcaagaggatataaattttcttaaaaataaagctctttttaagtcatggaattttttaaatggtgaacaaactagggaattaaggctaacacataaatataatgctgaaatggctggatttaaaaaattatatgatttatacaatgatgatttaataattaaattaattgataatattcaaaaaaatattgataataatgaaaataaagaaagtatattagatgaattagtactaaaattaagaccaacttataatagaaaagatttatttgaagaaattattggtaatgaaatatataaatcaatttaccaaaatataaaaaatttactatggaaagatgcattagaaaaatgtaaaattagtaaggaatcattgatgtcttataaatttaatggaataaatggaagatatgagactaattcacacagagataaaattttaaaaaaattagatgttttaaatgaattaatagaattgtatgaatctaagaaatttaatgaatttttaaagaaaataaatttttctattcaaaataaaaatgataaaagtaaacttaaagaattaatgaattttttaatatttgaagatgaaaagacaatagaagaagttttagacttttcaaaaaaacaaggtttgataaaagaagatatggactttgataactatattagtgttaaaggtttttatttatgggaaagaattaaaaaaatatcttttaaggaatatagaaatagtatcctttatttgaaagagttttcaccaatttcaactcagcatagtattaaaggaagtgaatttgataatgtacttgtcatattagaatcaaattggaataaatatgattttaaaacattattcggaaagggttcagaaaatgaaaatgttataaaaagaacaagaaaattattttatgtttgtatgacaagaacaaaaaagaatatagtgatatatatgcctactgaagatttagaaataataaattcagctaaaaaatattttggagaagaaaatgttctttcaatagattcaatttaa

SEQ ID NO: 78408 - DNA, 2076 bp, Fusobacterium nucleatum subsp. animalis
atggttttaaaagaaatagtagtagaaaattttcgtttattaaaaaattttaagttagagcttaaagaggacttatctttaattatagggaaaaataattgtggaaagacatcagttcttgttattttagacaaaatgttgaattcatctgaaattgcatgggaagatgtaaatttagtgaaacaaaaagaactatacaatgaaataaaaggatttaatgggagtgttcaagacggtaataagcttcttgaagcaataaaacttcaattgtatattgaatatagtgatattgattcttatgaaaatattcaaaattttataatggatttagatccagaaaataatattattcttttagagttcatttcattaataaatataaaaaatattttagagttaaaagatataataaaaggaagaaagataaaagatttttcaactttttcaagatatatgagtaaaaattttacaaaatattttaaaataaaaaaatattctaggtgttatgataaaaaaactaaaaaaataatttcagatatgatagaagaagtagataataaaaatatacaaaaagtgctcaaaattgtagggataagagctgatagggcagtttctaataatgagaaaaaccatgccctatcaagtttaacaagtagatattatgaaacttatagaaaaaatatagaagataaaagtaattcaatatttcaagagcttgaagtagagttagaaaaggcagataaggcactatataaaatttataatggagaaaaaacaaataatgggcaagattcagaaggaatatttaagagtattatagatgttgtaaaaacttatggaggatctgataataaaattaatatttcaatagaatcttcaatctctgaaaagaatttattaacagacaatactagcttgtattataaacatggtgatggagatagttcttcacttccagaaacttataatggattaggatatttgaatttaatagggatattatttgaaattgagactaaactacaagaattgtatgaacaacctgctgatataaatattttgtatatagaagagccagaagctcatacacatccacaacttcaatatatatttataagaaatattaaaaatcatattaatagtcatagaaataaattgaataaagaaaaaaataaatatcttcaaataataattacatcacattcatctcatattgtctctgaatgcaattttgatgatattatttatttaaaaagaatagataataatattttagctaaaaattttaattctttaaaagatgaatacgaaggagataaaaaaagagaatttaaatttgtaaagcaatatttgacattaaatagaagtgagttattttttgcagataaagttatttgtattgaaggagatacagaacgcatattaatgccagcaatgatgtataaagttgataaaatgcaaagttcaaaaaatgaatcaactattccattgttgtcacaaaatatttctataattgaggtgggagcatattctcatgtttttataccattatttaaatttctagggataaaggtcttaattattacagatatagattctgctataaaaaataataatggtaaatatgaaaaatctcatccagataatgcaactcatacaagtaatgcctctataagagaattttttaaagaagatggtttagatgatggaaataatcaatttaaagaacttatagaaaagaaaggcaaagataaaataaaagccagaataagaattgcttatcaaattcctgaaattgataaaggttaccaagctagtagttttgaagatgcttttatatcactaaataaagattttattttaaaaaataaagataatctttatgactatggagcattaaaaaattttagtaaaaaggaaataaataaggatttttatgaattttctttaaaaaatattgaaaagaaatcagcgtttgcatctgctttattatattttgatgaagaagaagatgataaggaatggaaagttcctcgttatataaaggagggcttactatggatacaagaattttag

SEQ ID NO: 78409 - DNA, 1902 bp, Fusobacterium nucleatum subsp. animalis
atggatacaagaattttagaggatgaggtaaacactgctttacaatgtatagaaaaaggagaaaattttatattagaaggtggagcaggaagtgggaaaacatattctctgatttcattaatagaaactttaattataaaattacctgaaattaagattgtatgtatcacatatacaaataatgcagttgcagaaattaaatcaagaattgataatgaaaatctttgggtttcaacaattcatgagttcatttggtatataattaaaaaatatcaaaaagagataaaaaatgagttagtacttcttattaatgatgaaacaattaaaaattttaaaaagccaaaagatttaaaaaatactttaattacaatagattattttaataatatagatgttgaatacgatgaatattattctatgaatcctaatgaaaataaagttaaaattagtcatgatcatattttaattctagctgaaaaaatgtttgataggtataaaaagctatcagatattttaaaagatgtagctaattgtatttttgttgatgagtatcaagataccagcccatatatagttaaaattttattagaacatcttaaaaaaagtaaaaagaaaaatgttatagggttttttggggattcaatgcaatcaatatatgatgaaggagtaggagatttaaataaatatggattaaaaaaaatagtaaagaaacaaaatcggagaaatccaaggatagttatagagattgctaataaatttagagatgataaaataacacaaattccttctaaggataagaatgctcctaatatggacgaaaatggagttattattgagggtaatattaaatttatatatggaaaagagcaagaggatataaattttcttaaaaataaagctctttttaagtcatggaattttttaaatggtgaacaaactagggaattaaggctaacacataaatataatgctgaaatggctggatttaaaaaattatatgatttatacaatgatgatttaataattaaattaattgataatattcaaaaaaatattgataataatgaaaataaagaaaatatattagatgaattagtactaaaattaagaccaacttataatagaaaagatttatttgaagaaattattggtaatgaaatatataaatcaatttaccaaaatataaaaaatttactatggaaagatgcattagaaaaatgtaaaattagtaaggaatcattgatgtcttataaatttaatggaataaatggaagatatgagactaattcacacagagataaaattttaaaaaaattagatgttttaaatgaattaatagaattgtatgaatctaagaaattcaatgaatttttaaagaaaacaaatttttctattcaaaataaaaatgataaaagtaaacttaaagaattaatgaattttttaatatttgaagatgaaaagacaatagaagaagttttagacttttcaaaaaaacaaggtttgataaaagaagatatggactttgataactatattagtgttaaaggtttttatttatgggaaagaattaaaaaaatatcttttaaggaatatagaaatagtattctttatttgaaagagttttcaccaatttcaactcagcatagtattaaaggaagtgaatttgataatgtacttgtcatattagaatcaaattggaataaatatgattttaaaacactatttggaaaaggttcagaaaatgaaaatgttataaaaagaacaagaaaattattttatgtttgtatgacaagaacaaaaaagaatatagtgatatatatgcctactgaagatttagaaataataaattcagctaaagaatattttggagaagaaaatgttctttcaatagattcaatttaa

SEQ ID NO: 78410 - DNA, 1983 bp, Pseudomonas libanensis
gtgcgcatcgagtcgatcacgatctctggctttcgctgtttcggcccgaatgagatttccattccaatctcagacgaggtcactacgatcgttggccctaacgctgcgggtaaaactgcgcttttgcaggccatgtcgaagctgtttggggttacgcgggcgcagcgcaccgtatcactttccgatttccacctagctcctggagaggatcctgagagccgcgattccaaagagctcttcatcgaggcgatcgttgccttcccggaattgttggacgggtctgcaaccgcggaaaccatcgccccttcatttcggcacatgctgattacgagagcagcccaggcgcccgtttgccgaatgcggcttgaagcacagtgggatgacgacggtacgcttgagggagaggtgtcacagagtcttttttggatcgattgcttagatgacgagcccgcagaggacaaataccaaccggtggcagtgaccgatcggggcctcatacaactttattacacccctgcaagtcgagacgccgccggccaaatccgagcaactgccggcacgctggcagcccgtctcctgagggccattgaatggtcctccgacaccgaagacaaagtgcaagaggcgactgagagccttactgctgcgtttgaaggcgagtctgcgatcacggcaattaccgaggctctgcaaacacgctgggcagacctgcatgacgacgcttccaataccaagcctaggctcagcctggtgagccgacgttttgaggaagtgatcaacaagatcgcggtcatatttgagcagggacctgacgggcgagaaagaggtattgaagccctcagtgacggacagcagtcgcttttttattttgcattggccgccgccgtttttgacctagagcgtgaggtcgttgaaggttttgtggacggttttcgggaggatgcactccatattcctgcgctcacactgtttgctcttgaggaaccagaaaaccacctttcaccctacttccttgctcgcatcatccggcaggttcgatcgttgactgaggccagtggtgcgcaggccataattacgagtcattcgccggcagttcttagccgagtcgagccaagcgaagtccgttactgccgctgtaacgcaaagactcgcgtatctaatgtgaagcgaattgagctgccaactgatgatgtagaggtcagcaagtttgtgcgtggtgccatattggcctatcccgagctgtacttcgcgcggtttgtcctgctcgttgagggtgattcggaaaggatcgtcctccctcaactcgccgaagcgcttgatctgctcatcgacccagctttcgtcgcgatcgtccctctcggtggaagacacgtccaatatttctggcgcttacttaaggggctaggtattccttacgcaactctcttggacttggatctcggccgtgatggtggaggttgggggcgagtaaaaacagctctggagaagcttattgagttcggtgaacctaaggacaaaatcctcaaagtcacatccggcattatgactgacgcaaagttggccggaatgcacaaatggagcaaccgaggtgaccactccaacctgttgggttggatgaataggctgaagaaatacaacgtcttcttctctgcgccgctggaccttgatctggagatgctaaatgccttccccgatgactatgccgccgtaattcctaaagggggtggtcctcgtacgaccgcagacaaggctgcagaggttgtgctggggacttcaggtccaggactttcggtatacacgggaccctatgaggattacccggcattgtttccgagttatcgttaccacttcctcacccatagcaagccagccacgcatcttgcggcattgacgcgtgttagtaaggcaagcctaaccgcagatatgccagcagttctggctgaggtcgttcgacatattgcaagctccctgaggcgagactga

SEQ ID NO: 78411 - DNA, 1905 bp, Pseudomonas libanensis
atggccgtttcgtcacgccgaatagctcgagaggattggaaacccgtcggggtcgaagctctggaagcgaatgcgctgaaggtggtccgttcgagaaaaaatcgctcgattattgccgggccaggcactggcaagacagaactgctcgcgcagcgtgccgcctttctcctgcagacggatactgctccttccccacgacgcattctggctatcagcttcaaacgtgatgcggcatctaatctggcagcacgcgtacgtcagcgctgccatcattcccatgcaaaacgcttcgattccatgacgtttgatgcgtttgcaaaaggattggtcgaccgcttcggtcaggcattacctgaccgctggaggccaagacccgattacgagatcacgactcacacggagcgagattttcgcgattacctccatgaccttccaccaccacctgcggtaatcggaacaagaaatgatgtgcgtgagatagggtctaaaacctttgagcgtcggcacctgctcggctcaccgttacctgtagaaggatggccagacccaactgtagcgcaatgggcggcagatgcgttctggcgagtgtcgctccacggcggtggcaaaagcgtgctgtcttttccaatgattggccgtctcgctgaattgctgctgcgagtcaatccgatggcgcgagatgcattgcgcctcacctattcacatttattcatggacgaattccaggacaccaccagagttcagtacgatctggtaactacgatttttcgaggcacagaaaccatcgtgactgctgtaggagataacaagcagcagatcatgcgttgggcaatggcgatggatgatcctttctctgcatttgatgctgatttcggaggtgtccggacttcgctcttcaacaattatcgatcttcgccggacttggtacgtattcagcacgtgttggcccaggcgttagatgtacaagctgtgcagccgatatctcagactgacggcacaattgacggagaaagctgttcaattctcgacttcccgagtccgaaaactgaagcgtgtcatttagcgcaatcagtagcgtcatacattgccgacctgaaactgactcctcgagacttcgtcatactggttcgacaaaaagcgggagaatatgcagaaatcttggaacctgccttcgcgaacgaaaatctggcgctgcgtaacgaagctggaatggtcggcaaagtaatgctgcaggagctgatgacagaggaaatctcgaagttggcggtcaactttctccgcctatcaatgactccgagagcgggaagttattggtcgacttgccagaattggctcgcctcaatgagagggatcgatgccgatgactcaatcaggcagagtaggctcgctcgtgtgttggacacctatgcaaccgaactggctgcacgctactccctccccccgagaagtaaggtggcctcacgcgcacttgttgatgacatcctaaatttcgtgggtgtagagcatgtgatccgtttcaacgccgcctatggccaagggagctggctagaaaaagtgttagacgcaacggcggaacatcttttatccagctcgctccacagtaaggactggtcccacgccctcgacatgtacgaaggcgtgcacgcaattcctttaatgacgatccacaagagcaagggccttgagtatcacaccgttatctttgtcggactggatgatggcgcttggtggagtttttctcaggatgaaattgaggccacggcaggattttttgtggctttcacccgtgctaaacagcgggtcatattcacttactgtgcttcgcggggcacacgaacaaaaattgcaacgctttacgagctgcttactaaagccggagtccaaatcacgactggatcgagttga

SEQ ID NO: 78412 - DNA, 2100 bp, Chryseobacterium sp. ERMR1:04
atgaaaataaaaacgatagaaattaaaaattttcgacttcttaaaaatacaagtttatcattagaagatagtacaacagtaattgttggacgaaataattcagggaaaacctctttaacggaggtttttcgaagattaataggagataaaaatcctgttttttcactttatgattttagtattagttctattgaaggatttaaaaaagcactccaagcgaaattagaaggaaaagaagatgcagaaattcgtagtcatattccctcaattgagattatcataacaattgaatatccaaaagatttagctgaccttggtagtttaggaaattttgtaattgacttggatgtcgaaagtaatgttgcagttattgtaattaaatatggacttaaagatggtaaagttgactcactttttgaaaacatcgctgatagtagtaacgaaagtgttaaggtcttatttaaatctttaaaggagaaaattcctaatttatttgaaacaaaaattatagcccaagaccctaccgatgaagaaaatatttctttaatggagtattcacaattcaaatctgtattgggtgcaggctttataaatgcacaacgtggtttagatgatgtcacgcattctgaaaaggacgttttgggtaaagttttagcacaactttttaaaacatccaaatcatccaccgcccctgtagatatgaaaactaagtctgatgaaattcaaaaaatcgttgatgaaattcagataaaagtagatacagattttaatacggaagtaaataagttactgcctgctctatctctttttgggtacccaggtctttccgaccctaatttaagtactgaaactacacttaatgtagcaaatatgttggatagtcatactaagatccgatataaacaaggtgataatttatatctgcctgagacatacaatggtttaggatcaaggaatttgatttatatcttgtttcaattatttgaattctttagagagtatcaaagtagaccaatatcgaacgcattggatattatttttattgaagagccagaagcgcatttacatccacaaatgcagcaaattttcatcaaaaaattgcatgaaattgcagatcaattttctgcaactctaaatgatggcaaaaaatggcaagttcaatttgttgtcacaacacattcaacacatattgctaatgaatcagaatttgaagctattagatattttctaacatctaaaaacgagcaacgagaaacaaaaattaaggatcttagacttgaatttaaccaaaaagttttaagagaagacaaggagtttcttcacaagtatttaacgctaacaaaatgtgatttatattttgctgataaggcaattttgattgaaggtacagccgaaagaataatgttacctgttctaatgtcgaaaactgacgcaatggattcagcagctcttcaattagctttgcagtatctatctattattgaagttggtggagcatatgcacatcatttctataaatttttggattttttagaacttagaacgctggtaattactgacttagattcagttgttaaatcacctgagaatacatatcctaaatcccttgttaaagatggaacgcatacatccaacgccggaataaaaaattggtttgctaaaggaactgatgggcattacttactctcagaatgtataactaaaactccacaacaaaaaatttctggctacagaagaattgcatttcagattgcagaagacgggaaaagcgccattggtagaagctttgaagaagcccttatcttggctaaccgaactaattttggaattacaagtactgaagaagatgaagttgaaacaattgcacaatcaaaaagcccttcaaatgataaaaagtctgaatttgctttaaagtatgctttgttagaaacagattggattactccaaagtatatatttgaaggacttaaatggcttgctgaaaatcccaatacacctgctgctgaagtggtagcagaaatagaagaagttgttaatgcaacttttgagaactctggtgaagggtcagaagaaaatacgttaactgaaactgaagaataa

SEQ ID NO: 78413 - DNA, 1749 bp, Chryseobacterium sp. ERMR1:04
atgccatcagaaaatgaaattagtcctgcggaaaaagcatcacaagaatgtctagagttagtgtataaggctatagacgataatgaaaattttctagtggaagcaggtgcaggtgcgggtaagacttatactcttattaaggctttaaagtatttaattaaaaaatacgaagttgactacgagaaaagtcataaaagaattgcatgtattacttttacaaacgttgctaaagatgagatccaatcgagaacagataatcatcctattattattgccgacacaattcatgcttttgcatgggattgtataaaaggctttcaaaaagaacttcgtaatagaataggtggattgagtgataaatggcaaattagagttgatgagactggtcttaaatctcaagaggttatttatagtcttggatatccaaaaatgacagacaaggaaatttatcttcatcataatgacgtcataaagctatttatcttactcttaaatgaaaagaaatttagaaaattattttctagtaattatccaattatcttgatcgatgaataccaagatacaaataaagatttggcaaatgctatagttgataaatttattttgacgagagaaggatcgaaaataggtttttttggagatcattggcagaaaatttatggatctgaatcatgtggtttgatagaagcagatgaagacaagcttaggattataggcaagaaagctaattttagatcagataaaaatattgttgaaatgctaaataggcttcgccccgaactacagcagcatgaatatgattcatcttctgaaggagaattgttggtgttacaaacaaataactgggaaggagagcgtcgtcaagaatcacattggaaagatgaccttcctgaagaaacagcgcataaatacttagaatctgtaaaggaaaagcttactaataatggttgggatttgtcaagtaccaaaacgaaaatattaatgttgaccaataatgttttagcagcagaacaaggttatcaaaatgtagctaatgtatttgatactgaagattatttaaaaaagaatgatgattatatagcatttttaacagatgttgtagaggttggatgggaagcatttaataagaagaaatacggagaaatgttaaaagttttaggcttaaaacagataggaattaaaaagcatcatgataaagaagtttggcatgatgcaatggtgagattatctgatttacgccaaaccggaacagttggacaagttattgaattattaaagagcacttctaagccgcagctttctagaaagatagaggaaaaagaatttcgttattcgactgttagcaagcttcgtgaagaagaccgcagtgatgaagataaagttttttttgataaaataaccagaatgagagcgattgcatttacagaaataactaatgtatcaaagtacatagacgatcaaacattgtattctacaaagcatggcgtaaagggtgctgaatttgagaatgtaattgtcgtttttggacgaggatggaatctttataattggaatcaatttttagaatggtacaattcgggaaatattccggctgcaaaaaaagatgcttatgaaaggaatagaaatttattttacgttgcatgctcaagaccaaaaaaaagattatgtcttttgtttactcaggaattatcagaaggtgctttgcaaggtttgaataaattatttgggaatgttatcaattcggcatag

SEQ ID NO: 78414 - DNA, 1197 bp, Bathymodiolus azoricus thioautotrophic gill symbiont
atgttatctaaaattgaatattcccctgcggatattcaggcaatagagcaacaaattgagcagttgaatgaaaaggcggtgagtagcagtaatattctaagccatataaaggagactctgaaaggcttggattcggcactggaaaatacccgcagtggcattgaattaacccctttcacaaaaaagatacgcgatttaaacaaggggctgatgatttattatggggatagccaagacagcttttccatggaatatcatggcatgggaacgcgcagttggtcttctttgttaactttgaaatcctttatcggcttactggcaagcaatgccgaaaaagtaggaagtgtgttttttcctattttagccattgaagaacccgaagcgcatctgcaccccaatgctcaaaaacaactgtatagccaaataaacgacattgcagggcaaaaaatcatttctacccattctccgtacattgcggcggtggcagatcttggtcaaatacgaagtttctacaaagaccaggagggtacgcgctgtgacaaagtggcgattgattcactgactgatgaggatcaacgaaaaatcacacggcatgtgatcaatagccgtggtgaaatcttcttttctaaattgatggttttgtttgagggtgaaaccgaagagcaggcattgccgatttttgccaaacatcattttggcaaatctgtcgttgaaatgggcgtggattttattggcgtgggtggctatggcaattatttaccttttttacgctttgctgaatccttaaatatcccttggttgattttgagcgatgcagaagaaaagacaagaaacagcgtaaaaaaacagttcgacaattgccgctcaaaaaagacagaagcggatgtgattgtgtttctggataatgacaataatattgaaaatcaattattaaaggatggctttcaggatgaaataagacaggctttgattgaactagatgactatcatagtgaacaagaaaaaacgtcggcacaggtaaaaataaaagcttttaatgacgaaaaactttacaaacaaatgaaaaaatccaaaactcaatttgctccagttattgcagaacaaatcatcaagagtaaaaaaacattaccgcctaaaatcatagaactgttcaataagataagttccattttaaatatcactgagaaggcttcatga

SEQ ID NO: 78415 - DNA, 1881 bp, Bathymodiolus azoricus thioautotrophic gill symbiont
atgagtcatcctattcccctttcagaacaacagcggtctattgtcaatgctcaaaatggtgcgctctatgttaaagccagtgcgggcagtggtaaaacgcgcgtattaacagagcgtattcgtgttttattgtctcgaagcaatagaaaaatattagcattgacctttactaacaaggcggggaaagagatccaagaccgattagcggatattgaagatattgagcaaagaacatttgtcggtacttttcatggattttgtcagtctgtacttgagaatcacaggcatttattgggctatgccgaaatgccacatatttttgaggatgaaagcgaccgtttagaattaattgaacaagccattcaattaacaccctcttatgcggcaagttatagaaaacaagataaaaagcagcaaagggattttcgttatcgagcattgaattttattgctaatatgaaactcaggttaattaatgaagcggatattgcagcacaaacagagaatgaaaatatcatcctgctttattgtagctatcaggatattttaaagtcgcagaatgctatagattttgatgatttattgctaaaagtctatggtttatttaacgattatcccaaaatagctgcattgtatcgacgcagtttttttgcggtgtgcgtggatgaagcgcaggatttgaataatgcccagtataatttgctaaaagctatggcaaatggagagttcagaaatatcctgatggtgggtgatccaaatcagtctatttttcattttaacggctcttcacccgactatatggataaggaatttgttaaagactttcaagcaactattattgaacttaccgaaaattatcgttcttcaaaagctatattgcaagccgcacaaaacttgattcctgatgctgatcaggtagagcatatcgttaagcagggcatatttaagctatataaaaccaaagatgaaaatagggaagcgcaatggctcgcccaaaaaatccagcaaattgtcggattagaaaaacatgacgacatcgagggtgaattgagttatgaaaaaatagcggtattggcaagaaacaaatatctatttaagccacttgaagaggctttagaaacaacaggtattcctcattactacaaaatgacaccaggtgctttaaaatttgagtcttctttgatgcaaatttttgacttggcattgcggatcaagattaattcgcaggatgaattgcattggcgacggttattagtggctttgtcgttgggttatgaaggagacgttgacttatctaacgtagtagaaaagatagaagacactaacaaaaaggtcattattgaactcgttttatccctcgcagatgatagtgcaaactttaagcgacagttggagtcttacaaagagaatgtgacacttgaggattccgatgaaaaaaatatgctgtttggtgatattaatgaattactgattcattggcacaattatgccaagacaacagataacacctcattacatcagtttaaaaatgccatggcactggggcaaactgcccccttatcgcagcattcaggggtaacactgagtaccgtgcataccatgaaagggcaagagtttgatattgtttttattattggcatggatgatgaaacttttcctgattacagggcggttcgtagtgggggtattgaacttactcaggaaaaaaataatttgtatgttgcattcactcgctcaaagcgttggttgttcgttacatggcctgaaaatagaactatgccttggggagataccaagcgccgcgaaatttcacgatttcttaaaaattttccacctactgaggttcaagaagaatcaatagggttctgtcgcgagaactag

SEQ ID NO: 78416 - DNA, 2025 bp, Propionispora sp. Iso2/2
atgcaaattacgaaactcaaggtgtctaattttcggtccttgggagaggaagaaaccattattcctttaaaagatatgtctatccttattggcaacaatagcacaggaaagaccactgccatgcaggcactaataaaactttttggtgtgtatgcgaaagaccgcgaactcgtgcgtgccgattttcatgttcctcctggagtcgaaccggaggacattactgaggccgaactttatattgaagcagtaatagaatttgctgaattgcaaaatacagatggctcaggaacgggatgcattcctcaattatttcatcaaatggttgttaacggacaaggacaagctccatatgttaggatcaggctttcggcaacctggcagcgaggaaacacgcctgacggtgatattgattctaaacttgaatttattacggttgctgaaggggagactattactgatgataatagaataccagtcaaacctcatcagcgctcactaatccaagccttttatgttcctgccatgcgtgatcctcgagctcagttaaaacatgactctggcacaattttatatcgtttttttaaggcagtaaaatggacttctgatcttgccgagacactaaaagcaaaaagtgaagaagtaaatggactcttcaccagtcagcctggggttaaaactgtcgaaaatctaataaaagctcaatggaaagagtttcacgatgatatcaaatattcggaggccaggcttggtttctcggcgacggagttggaaaaagtattaaagcgggttgaagtttattttcagcctactcctgaggaaaaaagctatacgattgatcaattgggtgatggtctccgctccttgttttatattgcgttagtttccgctttgttgaaattagaagctgattatacaagtatgacagccgaatcaggaattgaaattgactgtaactcaatacctgtattaacgatcatggctcttgaagaaccggaaaaccatttggccccccatctgcttggccgggtgattggcttactaaaaagtgtttccagccagcctaatgcacaagtgatcatctcctcacatacacctgcagtgttaaagcgtgtggaacctgaaaatattctctattttcgaatgttgaatcctcagatgcgaacttgtgttaaaactatcacacttcccccagctacctctgaagcattcaaatatattaaagaggcagtcaaggcatatccggagttgtatttcgcgaagcttgtaattttaggcgagggagatagcgaagaattaattctggcaaagactcttgaagcgatgaatactcctatcgaccgaagctttatttccatagtaccgttgggggggcggcatgttaatcatttctggcgtctcttaagtcagcttgatattccgtatgttacaattcttgacctggatagggaaagagatggaggtggttggggccggattaagtatgcgataaagcaactcaatgaagttggtgttcccataacagagttgactaatattgagtttgaagatgggagtacaattgcttttacgaatgaacaactagaaggaatgcatttatggccattggacccagaacgtttagaattaatggataagtttgtaaaatggctacgtaaatatgggatatttttctcaacgcccttggatattgattttatgatgctttcatcatttccaacaatctatcagagtgccacggaagggactggtcctagaattcctaacaggacagaaccggcatttttggagaaattaaacacggcgattaaggcaactttgaaaaatgaaaaatgtactggttatacatacagtgaggaagaaaaggaactgtttatttggtataattacttgttccttggtcgtgggaagccagtgactcacttacttgctttaaaagagatagaggatggggcgctggtaggcaatctgcctgaacccattacggcattaatgaatactgtcgtcaatagacttgggaggcgttaa

SEQ ID NO: 78417 - DNA, 1905 bp, Propionispora sp. Iso2/2
atgttaacgccaattcgccctgaaaattgggttccatctgataatattattcttgagccgaatgcagaggccgctgttcgtagcaatgttaatacggtagtggttgctggtccgggggctgggaagacggaattacttgcccaacgagcttgtcttttacttcaaaccaatagctgcaaatcgccaaaacgaattttggcgattagtttcaaaaaagatgcggcaactaatttggcagaacgtgtggaaaagcggtgtggcaagcttctggcacaacgtttcgattcctatacctttgacgcttttgcaaagtcactactcgataagtttttaaatgcactgccggcagactataaaccttcaagaaattacgagattatttttccgaccagagatcagatgcaagaagcaattcaagaactcgttttgccacctgcttggtctggccacaatatctacgaaatacatgcgcagagagtattaaataatctttgtgttagaaagctgccgttaaataatgacactactttagagcagtgggctataagggaaatatggcaaaaatggttacatagttctaattcatcacagttgacttttccaatgatcagtcgtttagcggagtatttgctaacgcaaaaccctttgctagtcaaggcattacaaatgacgtacagccatatctttttggatgaatttcaggatactacataccttcaatatgacttattaaaaacggccttccataattcgcaggcgatttttacggccgtcggcgatactaaacaaagaattatggggtgggcgggagctttacctaatatattttcaacatactgtaatgactttcaagcccaaaggttagacttaataaaaaatcatcgatctgcccctgtactggtgaatattcaagcagccctttttcaacatcttgaccctgaagcagttccagccgtagcggcggagggatggaaagcaaatgaggggatatgtgaaatttatttgtttgatagtcatatacaggaagcagaggtgctagcccggcagattcatgaatggataactctcgaatatatagatccaagaaaaatagtgattttagcaaagcaacaggttgatgtttatgcgagagaagtaattaatcaactaagtcttgtcggccaaaaagctcgagtagagtccgatatgcaggatttgttagcagaacctttgattcagatcattttgcagtttttaagactagcaaccatggaacgcatgcccacagactggcaagcggttgttgatctattgttagaacttcgtggctgccaacacgaggaaaagtctggaaaaaatattgagattgagagacagttagctagttttcttcagacacttaggaatgaactcggtaatgttactatggagacttgttcttctacagtgatacggtatatagtaaatctgattgtcagttttgtgggtgagagttcgatcaaaagccaatttccgcaatataaaagggaccgttggtatgatagcttacttaataaggcctcaacaattctctctgatgattaccaggtttcatgtgaatggtcgcagacattagacaatttcattggaaaaaatacaattcccatcatgacaatccataaaagtaaaggtcttgaatacgatatagtcatatttataggactggaagatgacgctttttggagttttcgtaatcaaccccatgaagatacgtgtgcattttttgttgctttatctagggcaaagaagagagtttattttacgttttgtgagcgcaggcagacgcggcggggaaacaatcgccaagcgcgtcaatccattggatcattatatggtcttttgacaggggccggtgtggcggtcattgataataggaaatgtaattag

SEQ ID NO: 78418 - DNA, 2109 bp, Mesorhizobium plurifarium
atgcgcattaaaaaggtcgcaatcaagaattttaggttgctgtcagacgtaagtctcgtcttgcagccgtccgagacgctcatcgtagggcgcaataatagtggtaaaacctccctatcagaggtcatgcgccggctgctcgacgatggtcctgtaacctttcaacttgaggatttctccagcgcgagctaccgcggattctgtgccgccgtccatgcccatctcgccggccaacaagaggatggagtccgcgctcttctgccggctatcgaattgcgcttgtattgcacgtatgatcccgatgtccccgagctcggtccgctcgccccgttcgtggtggatcttgatccaggcgtgagcgacgccttaatcgtactccgctacgagctgaaggacggagggctgggcgctctttttgacgggcttgccgatggttcattggatgacgcatcccgcaaggcgttccttgttggcctgcgggagaggatacccgccaactttggcctcaggatccgagcggaagatccgaacgacccgacgaattaccggcagttgcagccggcggcgttgcgcagcttggttcggaccgggttcatcaacgcgcagcgtggattagatgatgtgacatcgcgagagaccgacgttctcgcgaagatccttgaaggtctcttcgtcactgcctcctcgccaacggcagatgcggcggacaaggtcatcgcggaggcccttgccacagtcgttcaaggacttcagacgcagatcgacggcaatttcggaaatcagttgcagaacctgatgccgaccttgaccagctttggctatccgggattgggcggccaagagctgcagactgagacaaccctcgatatccgcaagcttctttccaattttacccgggttcgatatgccggctacggcggcgtaacgctccccgagtcctacaacgggttgggtgtgcgcaatctgatattcattttgctccggatcgtcgagtttcacaaagcgttcaaggccgagccgaaaacgccaggcgttcatcttgtgtttatcgaagagccagaggcgcatctgcatccacagatgcaggaagtcttcatcaaacagttgggcaagatcgctacgcaactggctggcctgggtgcgggcgctgtcccttggcccgtccagtttgtggtctcaactcactcatcacacatcgccaatgcagctggtttcgagagtatccggtacttccttggcgctgatgtgccgggcgctgatgccggcattcggcagaccaagatcaaagacctccgcgaaggaccggggagcacgccggcgcccgacaagcagtttctgcaccagtatctgacgctgacacgctgcgacctgtttttcgccgacaaggccatccttgtcgaaggtcttagcgaacgggtcatgcttccggttatcatcggaaaggccgaaggcgcagaacccgccattaagctctcaagtcaatacctgaccatcatggaggttggcggggcctacgcacatctcttcttcggtctgctcgatttcctcgagcttcattacctcatcatcacagatttggattccgtcgaggcgcctgggggcgccgcatgcccggtccaccttggtacagcgtccagcaatgcttgcctgaaaacgtggttcgacgacaatcctcatagcctggccggggtgatggccaaatccgacgatgacaagaccaatggacgcgggcgcatcgcctaccaggttccggaggtagatgggggcccctgcgggcgaactttcgaagacgccttcattctggccaatcaagcctttttcggcctcgcggcaggcacgccccaagaacaagaagtggcggcacgcgatatggccgcagggcaaaagaaatcggaattcgcgttgaaatatgcgattgagaatacgggctgggtggctccaaagtatcttacggacggcatccgctggctggccgtcgactatgtgcctcccgttgatccggcactggcgatcgtagcagcagccgccgccgcaccggcgcctgcaccagcagcaccagcacccgcggcagtgccagcacccgctccggaaggagggggccttgagtaa

SEQ ID NO: 78419 - DNA, 1734 bp, Mesorhizobium plurifarium
ttgagtaatcatgagtctcctgccgaagaggcgagccgcatcgctcttgaagaggtcttcgcgtgcatacaggccggccggagcttccgccttgaggcgggcgctggcgccggaaagacgtactcattggtcgaggcgctcaagtatctgattaagcgccacgagagagatttcatgcggcgggggcagcagatcgcctgcataactttcaccaacgttgcaaaggatgaaatcgaagcgcgaaccgacaagcacccgataatctattgcaacaccaatcactctttctgctggctcctcatcggcgggttccaaaagcagctcaaggccctggtgcagcagatgcctgcctggcaggacaagctccaggaggcgggtggcataggcgatcgtggggtcgaatacagtcttggacaccgtgccgtgcgtgagcgcgtgctctcgctacaccatgatgacgtcatcccgctcacgatctcgctaatggagaacccgaagtttcgcaaaatcatggcggaccggttccctatcgtcctgattgatgaatatcaggacaccgacaaagcttgggtggaggcacttaagttgcgcttccttggtcagccgaattcaccgctctttggcttcttcggggaccactggcagaaaatttacggcaacggatgcggagagcttaacgacgccgccgtcaccccgatcggcaagaaggcgaattttcgctcggtgaatgcgattgtcggatgcctcaaccggatgcgaccggcgttgccgcagtttgtcaaagaccctgcagcgccaggtcgagttcgtatcttccataccaatggctgggttgggcaacggcaagcagggcaacattggggcggcgatctgccgtctgaagtcgctcaccaagctctcgaagccacaaaagcgaagatgattgccgatggctgggatctctcgccaaagcagacgaagatcctgatgctgacccacagagtccttgccagtgagcaaggttactcgaatctggcagatgcgttccgctacaacgactcctatctcaaaaaggaagaccgcctcatcgcgttcctgatagacgtcttggagccggccgccgacgcttactcggcaaagcgttatggcgccatgtttgaggcaatgggtggaactgtgccactcctcaggcgtcaggcagacaaagctgcatgggcagcttcttttgatcgactcctggagcttagggaaggcgggtcgattggcgacgtcgtcgaccatctcatggcagagcaacgcccacgattgccggacagggtcgaagacttgcaaaacgcgctagcagcattcaatcctgaggcgggcattgacaaaccccgaccgcttgcagagttggaaaagcttcgggtggtttcgtatttggaggtcaaggcgctgcgaaaatacctcgaaggctactccccgttcgaaaccaaacatggcgtcaagggtgccgagttcgagaacgttctggtcattctgggtcggggctggaatcaatataatttcggagaaatgttggagctggcgggcggtgcggtgattcccgcgaacaagcaagcagcctttgagaggaaccgcaatctgttctacgtggtttgttcgaggccgaaacgccgcctcacattactgttcacccaagaactgtcgaatgcagccttgtctaggcttcaggcgtggttcggcgtcgattctattgaggcactggtattctag

SEQ ID NO: 78420 - DNA, 2298 bp, Achromobacter sp. ATCC31444
atgagcgcaccggctcaaaaatcttctgcaactcccactgtcagcctggcctgcgtcgagctgagccaatttcgaagactgacacgagccctggttaagatcgacaagaagacgacggtactggtaggcgcaaacaacagcggcaagacgtctaccctaatagccattcgcaactttctcgctccagggcaggtcttcggtgcctttgacatcagccttgatcagtggccagcgttgagagcgctcggagaagaatgggagaagctgactgaagacccggcgtctgctgcaggtgaagtagccaagtgggaggggcagttggcggcgctttgggcctgcatgcctacgctggacttgtggttcgatgcgcagatcgggtcctacaaccttgtcgcacccttcattacttctttgaactggaccggtggcgctgtgggtgttcgccttcgccttgaacctgcctcctcggtagaagggctgcagcgactggcttggcgctaccgtgaggctcggcagcccgtgaaaggcctgaacaaagaggctcatgcgtggcccgttgaccttgtcgactattggcttcgtcacgcagctgaccttggcaacgtcctggtttacaagctggacccggcgaagggaccgctggcgaacccgtccgcgggcgcgccgcagcccctgtcgtctcaggcagcgccgattgaccgcgcaaagctctcgaagctgctgcgagtagattttgttgccgcgcaacgggggctggggacggaggaagcagaggcgcgatcaacatcgggcacccacagagtcggcttattttccaaccaactcttgaagtacgcgcgtcaacatctgggcgtcgcgaccactgggcaaggccaccaccctgagctcattggagcaatggccaaggcgcaactcgagcttgatgctcgcatcaaagctgctctaacaccttccatcgaggatgtgaagaagctcgggtatccaacgcttcatgatccgcaggagattcacttcagaactcgaattcaggccggtgacctgctggaccacagcacggctgtgcagtaccgccttgacggtcaacatgctgacgtctaccttcccgaatattcaatcgggctgggctaccagaacctccagtcgctgagctaccaattggtctcgttcagagatgccaggctcaagccgcctgaaggtagtcccgcagccgtgcatctcgtgctggtggaagaacccgaggcccacctgcatgtccaagtgcaacgcattttcccgcggcgtgcatcggagcttatcagccctactgcccccgagcatgcacatctaagcagtcaactgattatcagtacccatgctagtcatttggcacacgccgagaacttcgaccggctgcgctacgtgcggcgaattccggtggcggtgggtacgatgccttgttccgatgtcatcgatttggccaccgcctttgggagcgacaaggagacgaagacttttgcggaaaggtatttccgagtgcagcacaccgacctgctattcgccgacgccgcgatctttgtggagggtgcggcagagcggatgcttgtacccctttttatcgagcgcgatttccacgagctcgacaagcgctacatctccttcctcgatcttggtggtcgccacgcacatcgactgcgtccgctcgtcgagaggcttggaattcccacggtggtcatcaccgacgtagaccccgtggagctgacgcaggacgaggaaggcaaattcgtacgcaaggccgctgcaatcgtcgacccgaaggtgctggagtgtggaaacgataccctcaacggttggcaccccaagaagaaagagctacatctgctggcggaaccagccgatgcagaccaagtctgggccaatggaagcggaggtcgggtcagatttgcatggcaggtccctgttcaaaagggaggtccctggccaagttcgtttgaggactcgctgatcctgaccaatattgattggttcaaaggcattgatccaaagaaggggaagaaggaagttgaaggtgaagttgcgccgccgaaattagttggccccttgcgtgtggtcgtggaaattgtcgttgctcaaccggacgccgaggagctcaatagggcactgcacgccatgctgcggaaaaaattcgccaaggctgagttcgccgcgaccatgtttgagcgcatcagcctgggcgacaaggtgacctgtccggcgtatatcaccgattcgctggcgtggctagaaaaggagctggcatcctcgaagaaggggaacatctga

SEQ ID NO: 78421 - DNA, 1983 bp, Achromobacter sp. ATCC31444
atggctgggctgaaggttgatccaaatgaacgcgacgcgggcgtcgctgacgaaatcgtcggctacgccacgagcgcgccgccgcggagcttttttctctttgctggggccgggtccggcaagacacggacgttggtggcagtccttcgcaagctcaccggcatcgagcaaagggcttcacaagatcaattacagcttgggtttgatgacccggctgtcaggtttgcgcgagaattgagggcgcgagcgcagacaattcgtgtcatcacgtacacgaagaacgccgcgttggttatcaccggtcgattgggcaacaacgacctgacacaggttgcgaccatccattccttttgctgggatctgattgcaggtttcgatgacgacattcgtgaagcgctgctagcgttgaacgttctggcgttggaaaaggcaagcgtagccgcagctggtcgaaagaaaggtgcgaccgaaaaggacaaggtgacgattgcagagcttgaagccaaggcaatcgctctgaccgcaaccctacagttcacctatagcccggatcgtaagcgctatggcgacggggcgttgaaccactctcaggtcttggcggtggcttcctggctgcttaaacaaaagccgacacttcgtagcatccttcgcgaccagcatcccgtcatcctcatcgatgaatctcaagacacgatgaagagcatcctcgattcgctgttggaggtcgttgcggaggacccttcaaggttgatgttgggattacttggtgaccatcgccagcgcatctatttggatgggcatgcagatcttccgaacactgtcccgccgacgtgggcaacgccgaagctggagatgaaccatagaagccagcggcgcatcgtcgacctcatcaacaaaatctgggattctgatttgggtggccgaacccaggccaagaaggcagttcatcaacatccgcgcgatgaaaagtcggccgggatcgtgcgcatttttatcgggaacacgacttctacgcctgacgacaagctgcgtcgtgaagggctttgcgagttggcaatgcaggctgtgacaggtgtttctgagtggcagccgggtagccttggacacaagattctggctctggagcatgcgctggtcgcacggcgtggtggatttctcgaggcgtttgaagcgctctcattgcttgatccagactcagttcgacctgacgcgaatagcgaggccagtgggcctacggcagttcagatgttattgagggagatgacggacctcgccgactgcgttgacgatggaggggcgtccgacttcgccgttacggaagtgctccaccgctacggccggctccagcagctgcctgaagacggtgacgcgcgattgcggcaagtcaaagcctatcagcgagcggttgatgagttcgctaaagtctgcgtcaatcccactgcgactgtacgggaggtgctcgcgccgattcttcggggcggcctgttcgagcctgacaagcgtctggtagcagcattcaacgacacgaatccgcctccatcgacgccaaagtcgcgacagccagaaaccactgaaaacaggttggctcgcggttggcatggtctcttcgcctctccgtggagccagcttcgccggttcaaaatgtacttgagcggcaactcgcatctagcgacacaccaagttgtcaaaggatcggagttcgaccatgtaatggtggtcatggacgatgaggatgccgcaggttccttgtttgcctacgaccgcctgttcggcgcacctctcggtgattcagacgtcaaaaacgcggatgaaggcaaagagacgtcgatagacaggacgctccggctcatctacgtgacctgcagccgggcaaaggagagcctggctctggtgctttgggccagcgatgcggcccaggcgctggcgtacgccgagaagagcaattggttcaagccaggtgaggtccaggcgattccagattaa

SEQ ID NO: 78422 - DNA, 2139 bp, Achromobacter sp. ATCC31444
atgcacatctccaaactcacgctggtcaattaccgaaacttcaagaacaccagtctgacgttccagcgcggcgtcaacaccatcatcggagagaacggcgcgggcaagtccaacatcctccgggccatccggctgctcctggacgacaacatggtccgcgcagcttatcggctagaagagtccgatttcagtcgcgcgctggatcagtggaagggccactggatcatcatcagcatagagttcgagaacctcagcccggatgaggcggtccaggcgctgttcttgcacggcactgctggtatccacgccggaccgatttccaaggccacctacaatctcatcttccgccccaagaaggaaatccggctgaagctggcggccctcgatgactttgactacgcagagttgaaggcaatccgggatggcataaccatcgacgactacgaaaccatcttcaccggccgaagcagcgctgattttagtgatccggcgacgtatcaacggatcgtcggagacttcaacttttgttccttctctgacgaaaccgagttccctgagattggggccaaggtgcccgggttcctgtcggtcactaaggaggtgtcactcaccttcatccaggcgcttcgcgacgtcgtggccgagtttcacaacaaccgcaccaatccgctgctcactctgctcaagagcaagagcggtgagatcgacgcggcggccctcgtccccattgtggacaaggtgcgcgatctcaatggcgccatcgaagggctcgaggatgtgcaggcggtgcgcaaaaacatccgcgagaccatcaaggacactgccggcgaaacctactccccgacgtcactatctatccggtcggatctgcccgatgaagcggagcagctgtttcagtcgctgcgtctgttcgtcggcgagtcggaggacgggtatgaagggacgatcaatgagctcagccttggcggcgccaatttgatctacctgaccctcaaactgctggagttcaagtaccaacgcgagaagatggcgatcgcgaacttcctactcatcgaagaacccgaagcgcacatccacactcatatccagaagacactgtttgatcgcatcgcctacgacgatgcccaggtgatctacacgacgcactccacgcacatctccgaagtcagcaatgtaaggaacgtcaacatcctgggtcgacgcggtgcattctgtgaggcctaccagccggcgaccggactggatgctgctcaagtaagcagcatccagcgatatttggacgcggtgcggagcaacctgctgttcgcgaagagcgtgatcctggtggagggggatgcggaagagatcctgatccctgcgctcgtgaagcaggtcctgggcctgagcgtggacgagttggggctcagcgtcatcaacatccgcagcaccggattcaagaacgtagcggtcctgttccacgacatccggatccgcaagcggtgcgcgatcgtcacggacatggacacgatcttcttcgacaccacgccgaatccggcggacgatgacgccttcgccgccaggaagcgcaaggcgatcggctcgcaaacggctggggcgcatcgaaaggtcgatctggacgcatttggggctggcaacgtgtgggtgcggagcttctacgctacgcataccttcgaagtggactttgtcgcggcgggtaaccatgaagcgatcgtgcgctgcgtcgacaaggtctacaaggcgccagcgacgatcgcgcaggcaacgaccgagcttcgctcgggcctccttcatcgaagtggcactcgcaccttgacgatggccgagcaggaaggcaaaggatggttcgcggtcttgcttgcccaaattctggattaccaagttgtggtgccgccctacattcgagaagcggtgctattcgcgcatggaacgttctcgcgcccgctgatcattcgaatcctccaccaccggatgacatgcctgtggcgcatcgatgtcgcctcgcatgctcgtctgaatgcgtttgcctcggaccttgagcagttccgtgaccagaagatcgatctgcctacacttcgcgcggcggccgcaacggcgttgccgggcgacgtggtccatgcgttcctatccgagatgaactga

SEQ ID NO: 78423 - DNA, 1782 bp, Achromobacter sp. ATCC31444
atgtttgcctgggatgctaccgagctcaaccccgagcaagcggccgccgtcgaagaaccgtcgagcgttttcttggtcgcctgcccgggtagcggaaaaacgcgcacgctgacctacaaaattgcgtatgagctatcacggcgcacggacaagcgcatggtcgcggccattacctatacccaccgcgccgctgacgagattcaggagcgaatcgaagcgcttggcgtcgaaaccacagccctttggatcgggactatccattcgttctgtctcgaatggatcatcaagccttacggcatctatgttccggaactcgcgcgtgggtacacggttttggatcgacacgaccgggagaagatgctcgagcggctctgcgcaccgtaccgcggcgtgaccttgtgggactgcgactattacttcgaaggtgatgagtaccggctggggtgcgccgacacatggaagcatgacactatccatcaggtgctggcggcctactttcgagaactggcgggcacaagacgaatcgatttcgagttgatcctctggtactcccaggtgctgatccgaaatcagccgcatatcgcggcgctgctctcccaagtcttctcctatgtcctcgtcgatgagtaccaggatactaagcggatccaatacaacctgttgggggccatcctgcgggcaggaggaggcagcaccaagacgttcatcgtgggagatcccaatcaagcgatttacggctcgctcggtggatatgccatttcagcggcggactttcgcgcgctcacggacatccccattcgagagatggcgctgcgattgaactaccgctcaagcgacaggatcatccggtacttctccaacttcaatgtccacgccaccgacatcgagggcgcaggggaaatggttggatttccgagccaagtctcttacaaccgacttgttgcgcaagaagacctcaacgatgagctggtcaggctcattcaaaagagcttggccgaagggcatgcacccgaagagatttgcgtgctggcgccgtggtggatcttgctggcgtctaccacccgaaaacttgtggcgctgctccccgagcagcagttcgacggcccaggattggtgccgttcagcaatgatcccgacaatttttggttcaaactctccaagatcgtactgacggagtcgttgccccagatgctggtgcgacgcatgcgatgggccagggacgtcatcgctgacctaagagatctcggcgtagatacgtccaaaatcacccaaagggtcctgctgcgggagtccaactccctgaacatcaccgaaacagacggcctggcgtatctggatcaggcgttcgccgccttgcttgatcgcctggggattcacttgaattcgtttcccgggctgctggagcaccgcgaggcgttctttgcgagttcacaggcgcggttggaaaaactgcagaacgcaggtgcggcctacatcactgacttgtcgttcttcaaaaaagtgttccgcgagcgaagcggtattactgtgtcgacgatccatggagtcaagggcgccgaattcgacgtcgttattgcattcgggcttcttcagggcatggtgccccactttagcgatgtcgacggtgatatcgctgcgagcaagttgctatacgtcctggcttcgcgcgcgcgcagaaacttgcacctgatctcggaggctagtcgatcgcgtggcagacgcggagattacgggcccacagaggcgctgctccgctgtgggttcgactacaacggttactaa

SEQ ID NO: 78424 - DNA, 2415 bp, Achromobacter sp. 2789STDY5608632
atgaagttgcaggcttatcgactgcagaactaccgccgactgcgcgacgtcgtcatcgagctcgataacgagatatctatttttgttggcgccaacaatagcgggaagacttccgcagtccaagggctgtattccatgctccggggcgatgcaaggaagttcgaactctttgactttaatgcagcgctgtgggccgaaatcgatgccgtgggaagatcggctccggcagatgaggaggcggccaagagattgccatccatcctcttagatctttggttccgcgtcggtgaagatgaccttgctaccgcaatatcactgctcccgagcactgagtgggagggaaagtgcgtcgggattcgtgtgtcgtttgagcctcgcgatgcctccgaactcgtccagcgcttccatgacctgcataagaaagccaacgacgtggcgaacgcgttggcggcacagcgcaaagcaggcaatgagactgctgccgaggtggatgggggaaataatgttgaggtgaaggccgacgctagcgagtacaggccctggccagacagcttgacgaagtatctaaccaaggagctgagcaaggaatataccttccgctactatgtgcttgatgagagggccttcgtcgactatcgggcgacggcaggctacgagccgcagccgctaggcaaggagccgggtggcgcgaacattctcaagtcgctggtgagggtggacttcttgcgcgcgcagcggcacctcgatgacccggacgccgctagctctgaccgcgccgagagcctttctcggcgcctcagccgtttttaccaccgcaacttggaaaagcgtggcgacgaccatgcggctctcaaagcgctcgatacctcagagaaagaactgaacttccacctggaggaagtcttcagtgacaccctaaagcgcctgggcaagctgggctatcctggcgtgaacaatcccgaaatcgtcattcgggcggctttggacccaaccacagtcctagggcaagacgccaaagtccactacgtgattccgggcgctgccaccgctcaactacctgacagctacaacggcctgggattcaagaatctggtctacatggtggttgaactgctcgacctacacgagcaatggaaagccgaggaagacaagcgggccccgcttcacttgatcttcattgaagaacctgaggctcatctgcacgcgcagatccagcaggtattcattaggaacgttttgcgcctgcttgaggatgccaacgatcacgcgacgttttttcacacgcagcttgtcatcacaacgcattccccgcacattctctatgagcgcgggttttctcccatccggtatttccgacgcgtcagcgatcaactagaccattacacggacgtgcggaatctgtcccgtttcaagatggacgaggctgaggcatccgcacgcgagtttcttcagcgatatttgaagttgacgcattgtgatctcttcttttccgatgcggtcattttggtggagggcaacgtcgagcgcctgctcctgcctgctatgatcgaatcggcagctaagcgccttcgttcctctgccctgaccatcctggaagttggtggggcgtttgcccatcgtttccaggacctcattactttcatcgagctcactacactaatcattacggaccttgatagtgtgacggtgaagttggatgacgagaaggccgctgcgcaagcggctagtgctggccctcccctgaacgatgctgacgaagacgacgacttgaagtccttcgaacttgaagaggacgacgccacgcatccgagcggcaagaagaagtccaagaagcgcggcagcacctgccatgcgcacctggaaggtgccgtcacgtccaaccaaactctcattagctggattccaaagaagcgttcggtggccgaactctgggaagttacgccggagcagaaaacgttgtggttggccgaaggttccagcgcagcggtccgagtcgcctatcagacaaaggtccccgtgacagttggttcggcgacggcgcagctatgcggccgcacgcttgaggaggcttttggtctggagaacgcagaatggtgccaagcagaggccaatcgagcgattggtcttaagctgaagcgcgcgcccagtaacccccaggagctggctgagaagttgcatgacagagtggtgggaaagaatttcgacaagactcgcttcgctctggaggtcctcgcaagtgggcccgtcagtggatggagggttcctgcgtatatcgctgaaggcctggcttggctcgaagcgaaggcagcccacgaagttgaggcggaggcggcaatcgccaatgagctcgcgatgattgagccggctgcgaccgctgctgtcgcagttattggcggcgcggagcagacatcatga

SEQ ID NO: 78425 - DNA, 1944 bp, Achromobacter sp. 2789STDY5608632
atgagtaggcgagtcgacagcccggacacagatgccgaccgcgagatctatgcatgcattaccgcaacccccccgcagccctttgtggttcgtgcaggcgcaggttccggcaagaccacatccctcatcaaggcgctggactgggtgatgtcggcgcacggcgctagcatgcgggcgaggaagcagaaagtcgcctgcattacctatacggatctcgcggccaatgaaatcctggcggacgtcagcggcgatccattagtccatgtttcgacgatccacagcttctactggagcattaccaggacatttcaggccgacatcaagctttggttaaaggacgacattcgtaggcgggtttctcagctggaagaagagttcaagagctacagccagcgtgttcggcaaagcacgcgcgacaggaacaaggccgatcaggagcgctatgcccgaaatctggaggcgctcgacgacgtcagaacgtttaactatggtgtcggcagtgactacgcaaagggtatccttggtcacgaggacattctccaacttgctgattttctgctacaaaatcgccctttgtttcgacgggttgtggcgctgaactacccgttcgtgttcattgacgagagtcaggatacgttcccgggcgtagtgaagtccttcaaggaagttgaaagccagatgcgaggtaagttctgtctcggtttctttggcgatccgatgcagtcgatcttcatgagaggggcgggggacatctcgcgcgaagaccattggcgattcatcacgaagccggagaacttccgctgcgccaagcaaattctagacgtcgctaatgccgtgcgcgcgcagggcgacggcatggaacaagttcgtgggctgcacgaaagggttgatggagagttcaagcttgtggagggctcggcccggatgtttgtcctgccgaacacgttgaaccggactgaggccttggcaagggtccgagcatggagcgcggcagcgaacaacgatgagggttggataactccggaccttgcggtcaagattcttgtcatagtgcaccgcatggctgcgaatcggcttggtttcggcggcatctactccgcgctgaacgataagacgtcggaggccatgaagcagggaatgcaggatggcaccggttggccagttcgacccttcctcagttttgcgctcccgatcgttgcagcgatgaacgacggtgacgagttcgcagcgatgaacctgctccgggagttcagcccgcgcctggcgcccgcaaatctgaacggtcgccgtgcggcgaacgtactccgtgagctgcacgtagctgtcatgagactcgtcgccatgctggacgagcccggtaccactgtcggtgacatagccatccatctgcgcgactccggcctgttcgaattcgacgagcgctatgagcgagtgcttggcttcgccagagacgttggtgaagtcgttcaagaggccgaagtcgctaccgccgctcctgctgaaggacgatcctcggatgcggcaatgctcaagttcttccaatgcgacgctcaagagctccagccatatgcgcgatacgtctcgcaaggctccccctatgccacgcagcatggcgtgaagggcgctcagttcgaccgcgttgttgtggtgatggacgaggaggagagcgactacagaacgtacaactatgagcgggtcttcgccagcgctgccgcccgagccgcagatcgtgcgcgagcccaggagggcgatgaaaacacctggagccgaacgctgagattgctgtacgtctgcagcactcgcgccaagcgggggctggtactaacgttctttgttgctgaccccgcgacgaccgtagataacgtcgtggcgagcgggatcctgccgcagagcgcagttctcacacaagaggcgctggctacctcgctgccggctcgcacatga

SEQ ID NO: 78426 - DNA, 2415 bp, Achromobacter sp. 2789STDY5663447; identical to SEQ ID NO: 78424

SEQ ID NO: 78427 - DNA, 1944 bp, Achromobacter sp. 2789STDY5663447; identical to SEQ ID NO: 78425

SEQ ID NO: 78428 - DNA, 1746 bp, Achromobacter sp. 2789STDY5608609
gtgtatctggcacaactgagaatatccaacttcaggaaactacagaaagttgatctgagcttccagccaggactgaacgttctggtcggctctaacaacgtcggcaagaccgctgtcgtcgatgcactgcgtgcgctgcttgcggggcatgatgagccgtaccctcgcctcgacagcgaggatatgcaccggcccaagggcggtgctccggcgggcgacatcgagttccagtacgtctttcgtgatttggacccggatgacgaggccgatttcctggcggcgctgaagcccgacgcactcggcaagctcgaagcgcatatcaccatccgttactcggaagccgacaagacgggaaggctgcgtgccaagcgctggtgtggcgaccacgaggacatgggcttgaccgcagacatgatggagaacttgcgcggtgtctatctgcccccgctgcgggacgcttcgcaaggactcaagcccagtcgcaccagccaattggcccggttgtttcagctcctggctgacgacgcgggacgcgatggcatcaatgacgcgctgaagaagctcgacgaggagttgaagaagcacgagcctgtcgtcaacactcacacagccatcaagaaccggcacggtacgatgcttgggccgcagcttgcccaaattctggatcttggcctgagcggtagcgactttcagcggctggcgtcgcgcctgtcgctggtggtggacacgttcgagattgagcagaacgggctcggcttcaacaacttgatcttcatggccgtcgtgctcagtgagctggccaagaacccggaagcaagctatcgaggcctgatcatcgaggagccggaggcgcacctgcacccgcaacttcaggcggtactgctggactatctggggactatcaaggccgtcgagggcgagaagcctgtccagttgttcgttacaagccactcccccaacttcgccagcatcgccgatctcgacagccttgcctgcctggtcgatacggggagctccgtggagacattctttccgcgtacgatcgccttcggcaaggggaagcgggagaagctggaacgttacctcgacgtgacccgtgccgagttgttctttgcccgccgtgtcatcttcgtcgaaggtgcggccgagttgatgctggtgagcgtgttggcggagaagtgcgggcataggctgcgcgaacacggtgtcagcctgatcagcgtcgaaggattgaacttcgactcgttcctgccgctgttcggcgaaaaggcactgaagatcccggtcgctgtcataacagacgcggacccggtcggcgaacccgacggcgacggagaaccgcaggcggcctaccccgcgcccggtactgctgtgaaggtgtcggacaacaccgccaagatgaaggaaggcgaggataccttcgtcaaggtattccacggtctcaagacattcgaatacgacttggccctgcatgccgacaaccgtgtcgcgatgctggcggctctcaaggaactgcatccgaagatcggcgaaaccgtcgcagtagcggtcgaagccgcggaaggcgatgcggccaaggcgcgcgcccttttcagcggcatgtttgagcgcccgcagaacaatgtgcagaaaggccgcttcggccaggcactcgcgcaggtgattgccgatggcgccgcgtgcgtagtgccggactacatccgcgaggcaatcacccacgcctgtcaagtcaaggagcccgagtag

SEQ ID NO: 78429 - DNA, 1740 bp, Achromobacter sp. 2789STDY5608609
gtgacccagccgtccgacgagcagttgcaggtcatcggcgcaccaatcgcaccgatgtccgtaattgcctgcgctggcagcggcaagacgttcaccgctgtacgccggctggcgcagatgcgccgacagctcggtgacgaccgcggtcgcgtcgctctcctgtcgttctccaatgtcgccgtggatacctttcggcgcgaataccagaatatggtccaggaggtgccctccagagtcgcccacggccgcgttgagatcgacacgctagacaccttcatcaccggcaacgtgctgcgcccacacgcatatcgaacgatgggtgcgcagcaggccgcattccttgtgatgggcggtgaagcgttcctgggcggcttcaggttccagacgaacacgtatcctcgcgagatcacgcagatgcaggttggcatcgacaacaacggtgcctatttctgctacgcggacaacgaccggacgctcaggctggataccatgcaagcgacgcgccttgtgcatcgtcttggacaggtaggtgcctatacacacaacctcgggcgctactggtgctaccgcacattggtagaacagcccggcatcctgcgcgccctggtccgccgctatccgcacattctgatcgacgaagcgcaggacatcggtacggctcatcaggccatcatcgagcagcttgtcggtgcgggctgccaggtctcgttgatcggtgatccaaaccaaggcatctacgagttcgccggtgccaatggggcgttcctgacacggtacggtcagcgggaaggtgtcaacagtctccacctgaccaggaacttccggtctgtgccagcgattctggatttggccaatatgctgtcaacgcgggcagacaccgcggacaggttagtgcccgatacgacgcatggcgctttcttcgtgccctaccggaacgccgaacgcgagaacctcatcgctgctttccaggcggcggtgctggcggccgacctgaagctggaaagctcggccgtgctgtgccgcgcccgggacatggccaacaagctcggcggcaacgaaggggcgccaggccagggaaccgtcaaggctctcgcacaggccgccatcctgcgcgaccggcaccaggactatctcgccgcgttcaagctggtggcttccggcatcgtcggtctacttgccaacccgccgcagggactggtggcaaggatcacgcagcccgcgcgctacccggatgatcgaatgctgcgacggctcgtttgggcattcacacgcaatcgggattcggggctgccggccgcgacattgaccggggacacgcagtggcatccgctgctgctggaacggacgaggacattgctggcgcaaatcgcacaagaccacggcttggcgagcaccaacaacctgggcaacaagctcgcaaaaagggggttgcccaatgcgccgctgatcaccgccgctgacttggcagcgaacgacgacgcaccgcgcatccgagtggacacagtccatcaggcgaagggcgaaagccttgatgctgtgctgtacttggcgaaccgggaacacgccaatgcgctgctggccggcgtagacaccgaagtcgggcgcatcggctatgttgccgtgactcgcgcccgcaatcttctgtggctcggtgtaccggccaatgcgctggaggaattgagacccgtcttgcttgaacgggggtttcaggaagccggcgcagcgatagccctagcgtag

SEQ ID NO: 78430 - DNA, 1785 bp, Achromobacter sp. 2789STDY5663443; identical to SEQ ID NO: 71894

SEQ ID NO: 78431 - DNA, 1815 bp, Achromobacter sp. 2789STDY5663443; identical to SEQ ID NO: 73827

SEQ ID NO: 78432 - DNA, 1758 bp, Streptococcus pneumoniae; identical to SEQ ID NO: 76066

SEQ ID NO: 78433 - DNA, 1539 bp, Streptococcus pneumoniae; identical to SEQ ID NO: 72173

SEQ ID NO: 78434 - DNA, 1758 bp, Streptococcus pneumoniae; identical to SEQ ID NO: 72172

SEQ ID NO: 78435 - DNA, 1539 bp, Streptococcus pneumoniae; identical to SEQ ID NO: 72173

SEQ ID NO: 78436 - DNA, 1758 bp, Streptococcus pneumoniae; identical to SEQ ID NO: 72172

SEQ ID NO: 78437 - DNA, 1539 bp, Streptococcus pneumoniae; identical to SEQ ID NO: 72173

SEQ ID NO: 78438 - DNA, 1758 bp, Streptococcus pneumoniae; identical to SEQ ID NO: 72172

SEQ ID NO: 78439 - DNA, 1539 bp, Streptococcus pneumoniae; identical to SEQ ID NO: 72173

SEQ ID NO: 78440 - DNA, 1758 bp, Streptococcus pneumoniae; identical to SEQ ID NO: 72172

SEQ ID NO: 78441 - DNA, 1539 bp, Streptococcus pneumoniae; identical to SEQ ID NO: 72173

SEQ ID NO: 78442 - DNA, 2070 bp, Streptococcus pneumoniae; identical to SEQ ID NO: 71808

SEQ ID NO: 78443 - DNA, 1818 bp, Streptococcus pneumoniae; identical to SEQ ID NO: 71809

SEQ ID NO: 78444 - DNA, 2070 bp, Streptococcus pneumoniae; identical to SEQ ID NO: 71808

SEQ ID NO: 78445 - DNA, 1818 bp, Streptococcus pneumoniae; identical to SEQ ID NO: 71809

SEQ ID NO: 78446 - DNA, 2070 bp, Streptococcus pneumoniae; identical to SEQ ID NO: 71808

SEQ ID NO: 78447 - DNA, 1818 bp, Streptococcus pneumoniae; identical to SEQ ID NO: 71809

SEQ ID NO: 78448 - DNA, 1758 bp, Streptococcus pneumoniae; identical to SEQ ID NO: 72172

SEQ ID NO: 78449 - DNA, 1539 bp, Streptococcus pneumoniae; identical to SEQ ID NO: 72173

SEQ ID NO: 78450 - DNA, 1758 bp, Streptococcus pneumoniae
atggaatttaaaaaactagtaattgaaaattttcgtaattttagttctattgaggttgctttatcaaataaaaatgttatatttggaatgaatgattcagggaaaacaaaccttctatttgcaataagatacctcttggacagaactatacgaaataaaggttttattaaatcggattatcatagacatgatactagtagacctataaaaatacaacttgagcttgatttgtctgatagaaaaatggagggggatgaagaatcactaaaatcttcacattctcgtcttctaatttcaacggtagctggagcaagaaataactctagcttagatacattctttatctcattagaagcagtttataatgagaaagagttatttggaaatccggtattaagctggggctcaacactagataatttagtggaagttcctcaatatggtacaagaagtgacattgataaaatattccaaatagtttatgtaaatcccgctatagagttagattccttttttaagcgaaatagaaggatattgttctctgatgattctaaaactgatgaggatgtaaagcttgaggaagagattgagaataacattgaaaaattaaatgaaaatatttctaacttacatttgattactagtgttcaatcacagttgactgaagcctataaaagttatcgtaaagaaaatttagaaattaaaattcgatcagagatatctatttcaggatatttagacaatctcacaccatacattaactggaatgatgatactcacaattatccgacgtcaggagacggtcgtaaaaaacttttatcatatgctattaaccatttaatttcagagaaacaatacaacaagaaggtaattatttatttaattgaggagccagagaatagcttacatcgttccgttcaaatctctctttcaaagcaactttttgttcagaatatttatgaatacttttttctaacgactcattcagcagaagttctttatgaaatggataatactcagctcattaagataaccaatcaacaagatgcaacagggcaatcagtctattacacagttcctaatgaattttcaaacttaaagaaaaaattaaataaatcgttggctcagtcaatcttttatgataggattcttttggtcgaaggtccatcagaatattatctattttctgctatttttgaatatgtaagtcccaatttcgaggctgatggaaaatacttattacaagttgatggaataaattttaaaccttattcagagctatataaggcattagggattgatttttggattaaaactgataatgatttaaaagctagtcgtggagataaacatgtattttctcctattggcttaaataggtgtattgacttgcttgatcatagtgcgactcctatattagataattatcgtatagatttctcttcaaaagatgagagaaaacagaatataaagtctaaaaaagaagaattatatttgactaatcataatctagtattacaattaaatgcagatggaatctttatatcggaaattgatttagaaaatgatttagctcaggttttatccgatagcgagagaaatgaaatgagtaaattagattttgtgaattggttacaaagcagtaaacaatacaatatgctagaatatataagtaatcatcttactaaagagattgcgcttaagattgtggaatcaggatattttaaagttttggcggagtttttagactatgagtga

SEQ ID NO: 78451 - DNA, 1539 bp, Streptococcus pneumoniae; identical to SEQ ID NO: 72173

SEQ ID NO: 78452 - DNA, 2070 bp, Streptococcus pneumoniae; identical to SEQ ID NO: 71808

SEQ ID NO: 78453 - DNA, 1818 bp, Streptococcus pneumoniae; identical to SEQ ID NO: 71809

SEQ ID NO: 78454 - DNA, 2070 bp, Streptococcus pneumoniae; identical to SEQ ID NO: 71808

SEQ ID NO: 78455 - DNA, 1818 bp, Streptococcus pneumoniae; identical to SEQ ID NO: 71809

SEQ ID NO: 78456 - DNA, 2070 bp, Streptococcus pneumoniae; identical to SEQ ID NO: 71808

SEQ ID NO: 78457 - DNA, 1818 bp, Streptococcus pneumoniae; identical to SEQ ID NO: 71809

SEQ ID NO: 78458 - DNA, 2070 bp, Streptococcus pneumoniae; identical to SEQ ID NO: 71808

SEQ ID NO: 78459 - DNA, 1818 bp, Streptococcus pneumoniae; identical to SEQ ID NO: 71809

SEQ ID NO: 78460 - DNA, 1758 bp, Streptococcus pneumoniae; identical to SEQ ID NO: 72172

SEQ ID NO: 78461 - DNA, 1539 bp, Streptococcus pneumoniae; identical to SEQ ID NO: 72173

SEQ ID NO: 78462 - DNA, 1758 bp, Streptococcus pneumoniae; identical to SEQ ID NO: 72172

SEQ ID NO: 78463 - DNA, 1164 bp, Streptococcus pneumoniae
ttgcaggatggtattttcgggacttacgactttcctacttctaaacacggcaagaatttcaaatgtgaagttgctttagatattttgaagacaatagattctgcgtcagaatatataaaatataaatttaatactttgtatattgatgaatttcaagattgtgaccagtctatgaatgatttatttctgtatctaaaaaatgagttagggattcctttatttattgtaggagatgataagcaatctatttatcagtggagaggagcatcacccaaatatataaataatttatggaaaaacaaaaatgattttagaaaaaagagatttattgggaattttagaagtttgcctagaatagtggatttctctttagctctgactcctgaagtgactgtcgataatattagagaagagggttcaattctatatttagaacctaatcaggattatccaaaagaagatattattaagtaccttattgataatggtgatataaatttacaagaaaagaattattttttaattggaattaataaagatattgaagaaactgcgacacatttgaatgatattctttcaaataaagttgattacgttagaaaaaatccatttatagattgtactaacagtaattttttgcaatctatggctcaatattattttcttgaagacttttctgagtatgatgtattgaataatctttttcctgaatataacgatgaatttaggaaagaacttttaaaaaaattaaagaggcttcgtcaacgacctacacagtcacttattgaggaaatagcttcgtatttagatgtttcaattacaaattatgaagataagttagaaagtcaaatactgttggaaattttgagtaatttggataataaaaaaatgtttgatacaaatttaatgagtaataatttattaatgactactcatgcatcaaaaggtttggctgcagacactgtagtaatttttgtagaatatctaattgattggcgcacaggattgaaatttgaagatcattatgttgcaattactagagcaaaatcaaaagtcataattattgataatcgaacaatttatactagtgaaatcaatagattattaagtaacaacaatgggaatttttcttttgaagattttatagaaagaagatatatttga

SEQ ID NO: 78464 - DNA, 1758 bp, Streptococcus pneumoniae; identical to SEQ ID NO: 72172

SEQ ID NO: 78465 - DNA, 1539 bp, Streptococcus pneumoniae; identical to SEQ ID NO: 72173

SEQ ID NO: 78466 - DNA, 2070 bp, Streptococcus pneumoniae; identical to SEQ ID NO: 71808

SEQ ID NO: 78467 - DNA, 1818 bp, Streptococcus pneumoniae; identical to SEQ ID NO: 71809

SEQ ID NO: 78468 - DNA, 1758 bp, Streptococcus pneumoniae; identical to SEQ ID NO: 72172

SEQ ID NO: 78469 - DNA, 1539 bp, Streptococcus pneumoniae; identical to SEQ ID NO: 72173

SEQ ID NO: 78470 - DNA, 2088 bp, Streptococcus phocae
atgaaattaacaaaaataattattaataattttagatcgtttggagaaagtcaagttattagattcaacgatcaaactgtattaattgggaataatagttcgggaaaaacaactttattacaagcattgagtaagctgttttcagacaaacaaagtgatagaataattcgaaaacatgattttcatctaccaaagggatcaagccctggcgaaaatactagaactctttttatagaaactatttttgagtttgatgagcttgatggaactgtcggtggaccagctatcccattgtttttcgaacactttacagtttctcaagatgatacaaaaccttttctacgaatcaggttagaatcttcttgggaagatgatggaacggttgaaggaagtgttgatactcaaatttattatatttcatctgatgaagatattattagagatgaagacaagcatcgtgctcctagaaaggatttggataaaattagggtactttatgtaccagcttcaagaacacctgagaaggagctgagtaatgcttcaggtagtatgttaagtaagcttgtaaatagtataaattggactgagaatgagataaataaaattacagataaaattgatgagttgaataatacttttttatctgaaaatggagcattaactcagatcaaccaagagattcagaaatcatgggaaagatatcatcaagataatcatttttctcaggcagagttgactattaattcttctgagatggcggcagccctcagacagattggcttaaaattttcaccaacgaccactgaagaagcatttacagtttcagatttaggagatggactgagatctattttttatttttcactcgttaattcgatacttgatattgagttaaagattacaaaaaatcgtgaagaaaattctaataatccaagatttaagctgatacctccaatactaacgatcttagcaatagaggaaccagaaaatcatattgctccacatcacattggaaaactggtaaaaaggtttaaacaattaagcaataatgacaattctcaagtaattttaacttcacattctccagctattgtaaaaagaattgacccagaagatttgaggtatttaagaattgaaaataatggcagagttcttcaaaccattgtttctgatatacagctacctcaagccataggtgaatcttataaatatattaagggagcaattcaagcttatcctgaactatattttgcgaagttagtagttctaggtgaaggtgacagcgaggaactgctattaccaaagttttttgatttacttggtaaagagattgatagctctcagatttcaattgtccctctagggggcagacatgtcaatcatttttggaaattattgaattctctcagaattcctcatatcacattattagattttgataacgaaagatatggaggtggctggggaagagtaaaatatgttatccaacagttactagaaataggtattgagcgtagtgatttagtgaaattgaaaggtggtagaatattgaaagatgaagacattgatagaattagttcttggaagatatgtgatatcttctcacaatcattgttatcttggataaatcatttagaaaaattcaatatattcttttctgcacctcttgatattgatttcttgatgttacaacattataaggaacgttatctgggtacgttatctttgaaagaaggaccagtcgtttcatatgctgattcagatgggaataataaaaaagtaaaattaactgatttggattgtattgataaattgcagttagaaggtctcaaaaaacgtatagaagaagcaagaagagctactttaaaagataagagtggttcaggagatagttttactgaagaggaaaaggaacttatgatttggtatcaatatttctttttaggtagaggaaagccaacaactcacatgcaattattatcatctattagtgatgatgaattaacaacaaatctacctcctgtatttgaaaaaatggttaaacgtgctgaagaattacttggagatattgaacatgataaagagtga

SEQ ID NO: 78471 - DNA, 1818 bp, Streptococcus phocae
atgataaagagtgaagagtggtttcctaaaggagatatcaatttagaagatgctgcattaggagccatcaaagatgtggataactgtctagtcattgctggaccaggtgcgggaaaaactgaattactagctcaaaagttagactatctattttctacaaataaatgcgtttctccgaaaaaaattctagcattaagtttcaaaacagatgctgcatcaaatttgaaagaaagagttaagagacgttatggcgatgaatatgcttctcgttttacctcttttacctattcggcttttgaaaagcgaattttagaccaatttagagatgttcttcctgaggagataagaccttcgaaggactatatgattgaagaaatggaagtcataaaagaagttcttgacagaaacggattcaatactactggaatggggatgaataggattaaggatactgcagaaagtattgttttgagtgagaatgattcaactataaaaaatgatctgttaaagggtactcagtgtaataagccagttcttttttatagacaaataactaagttagctactcgtataatagataaaaacgaatatattcgtaaagcacttcaaatgacatacaattttgtatttctagatgaatttcaggatacgacatatgcccagtataatttattaaaaacttgttttttaggttcgtcttgcaaattgactgcagttggagataataagcaagccattatgagatgggcaggtgcaaagcctgatatttttccagactatattcgagactttaattcaaataaatatcaattattgatgaatcaccgctctgtacttaaactggtagaatttcaaaaagaggttgatcaaatcttaaataaaaataccaatatttttcagataaatgattattcagaatttcaagagggtgagataacattatttgaatttgacaatgaaatttctgaagctaagtcaattgcagatgatattgaatcaaaaattcaaggaggtatacgaccatcaggaatttgtatcctagcaaaacagaaggttgatgattatagttcaaaattgatacctatattaagtggcaaagggattaaagcaagaaatgaaaatgagtatcaaaagcttttaaaagaccctacttgtaacctattattagatttaatatcatgcagtcaaggaaaacgtgatcctttaatttgggaaaatattagtaatttttatggaaatatcaatggaatagatgaatttacagatgaattaactttggcaaaaaactacagggagattgataatataattagtgatgttacttctctaattttaaattcgattcccaatgaagacagcatgttaaatttaattgaatgtattattaaaaaaataggtgataaaagaattatttccagcttttcaatatacaatgggaaaagtgacctagatatcattgtcaagaaattttcaaagttattatacaaagaatattctcaaaaacaagatgactggatagatatagtgtctaatttcaagggtgaaaactcaattcccattatgactatccataaaagcaaagggttagaatacggggcagtgtattttctaggcttggaggattctgcattctggaattttaatgatcaaccagaagaagataaaagtgcattcttcgtcgcactttcaagagcaaaaaaacacctaatctttacatattgcaaaattagagatggtcgcaaacaaaagaataaaaatattaatgagatgtattcattactgactcaatctagtttagtagatgtttgtaaaagctaa

SEQ ID NO: 78472 - DNA, 1651 bp, Thiotrichales bacterium SG8_50
cctcaacatagacggctcaggggtcggtgaaaacaccgatgcaccagcgcgaaacgcgcccaatgagcttgacgatggggaggcggagcgtgctcagatcaagatcgaggtgaccgtcacgcacctctccaacgaacagcagcggcatttctgggactgggtcgaatggtggaatgagctggagcagagcttctacgagaaggccggccctcaaggcgtcgaccatcccgacatcgttgcggcactccggattacttttgtcggtcggtataactcagaagaagacgatttcgagggcgacacctattttagtcggagcctggaggaaggaggagagccccaatcctttcggaagcgggacaaacagcggtgtggctttctgtatctgagggggttgcgcaccggatcgcgcgcgctcagcctcgagcgaggaagcctgctcgacatcattcttcgtctaaaggagctccgcccgcaaatgtgggaggacacgatcgccgaactcgccgacgttgatgtcgcaagtcgacccgagctaggcatttccggcgtgttggagagtatcaacacggcactcaagcgctacgtaccgcatgagtggggcgttcagccacatctaagagtgtccaacctcacgcgcgaccacctgcgcaaagtgatcaccgctttcattgccacagggcaacgcgatcatgccgctccttattaccgacagggcacgggcacaatcaatatgcttgtcctagccatgttgtcccagatcgcggccgacaagcagaacgtcatcttcgcgatggaggagcccgaaaccgctatcccgccctacgcgcaaaagcgaatcgtgcacgaactccgcaacctttcgtcgcagtctatcttgacctcgcactcaccctacgtcctcgaggagttcgacctggaagacacggtcatcctgtcgcgtaatgccacaggcgaagtagaccaggccacgatcgagttgccgtcgagcgtgaagctcaagagatatcgccaggagttccggacgcgcttttgcgaagggcttctcggccgtcgcgtgttgcttgcagagggcgcgacggaggcccacgctttccctgtggccatacgaaaactggccgaactcgtgccggatgaattcacttcgcttgaagcgcttggcgtgaccgtcatcgatgctggtggtgaaagaaatatccgagatcttggggccttgtatcgaggaatcggaaagactgtcttcgccctgtgcgacaagcaggaggctgccacgaagactgcgatagagtcgaaggtcgatgagctgttcatgcatggcaagagcggtttcgaatccctagtcctccaaggaacgacccgagccgctctggaacggttcgtggctacgatcaactggccaccccatctgaaggggcgtttcccggagcccgagaatgatcctgaggcagcctcggcagcctacttcgaatggtcaaaaggcactggcgggcttgccgacttcctagcgcagtgccagctggacgaaatccccgagtggatcaaagacgtcggcagacgccttagagcaggctgcgaccccggctcgatagacgatccgacggaagctggacagcgtgaccacgattcgctcgtcgaagcgggtgatgattga

SEQ ID NO: 78473 - DNA, 1815 bp, Thiotrichales bacterium SG8_50
atgattgagctcacacaagatcagcgagctatcctagaagccgagggtccgatcctggtggcgggcggccccggctcgggcaagacgaccgtatctattctcaagggggttcgcctcgcgcgccaacatctgcgagccggacagcgggttcttttcctcagctttgcccgggcaaccgtgtcgcgcgtgatcgaggcgatcgatgaagcaggcaacatcacacctgaagagagccgtctcatcgaggtcgatacgtaccattcgttcttctggcgagttctaagaacgcacggctacttgctgggcctgccaagacagctttcgatcctgactcctcaggccgaagctgtcgcgctttctgacactcgaaatcagtacccgggcaaaccgaagttgtcgggcgccgacaaagccgagaagcgcgcccatgaggaccaggttcgatcctcgttggcaaccgaacaaggccgagtctgtttcgatctgttcgcgccaatggtcggagacattctggagagcagtgagaagatccgctgccttcttgcagaccggttcccattcatcattctagacgagttccaagatacaaattcggaccaatggcgggtcgtacgggcgattggtcgcaacgcaaccctaatcgcactcgccgatccggagcagcgcatttacgatttcatcggcgcggatccggaacgccttgatcattttcgcagtgcgttcagcccgacggaattcgatctgagcgacgccaatcatcggagtccccgcactgaaatcgctatcttcggcgacgatgtgttggctgggaagttccgccagaacagctaccggggtatcgaacgcgccacgtttccatcctacaacaatggagcgttcacggctctagtcaccactaccctccaaggacgggcgcgcctggcgcgttcagggacaccggattggtcgcttgcagttctcgtccctacgaagaagatgacccgattggtctccgaggcattcctcaatccggttggcggactgccagtgatagcccacaccgcgttcctcgaactggaaagcgctatgctcgcggcagagctcatcgcttgtctcctagagccccaggttcctccggatatcggtcaagtggtagccttgctctgtgctttctaccggggacgaggaggcgccgatccgagtcgttcggatctcaaaactgcgagccaaattgagacatcacaccagaggctaagagcttgtcagcaggctggaaaaccccttcccgcgaatgccatactcacgaagacgcaagcggttctcgaggccgccaagacgctggaactctccggtgatcccgatacggattggctggctgtccgtgcggtgcttgacaacggtcagtgccgtcgccttcagcgtgttgctcaggacgttcgcaatctgcggatgctcggtcgggggactcagttgagggcagcgctctctgaggattggcgagagaacggctgttatcaaaacgcgcttgcgatcacgagggctgctttcgtcagggagcactttgccagcagtcggcgacccgagactggtgtggtggtaatgaacatgcacaaggccaagggcaagcagttcgacgaagtcgtcatttttgaaggctggccacgccgggcggatggggagatcgtctcgaatcctgatcggatcgtgtggggcaacgacccgaagcgaaaggatgtatcaacgctccagaatctccgagtcagcgtcacacgcgccaagcagagaaccacgatactcacaccatgcgatgatccctgcgttgcactgccaagttga

SEQ ID NO: 78474 - DNA, 2370 bp, Pseudomonas viridiflava; identical to SEQ ID NO: 72950

SEQ ID NO: 78475 - DNA, 1983 bp, Pseudomonas viridiflava; identical to SEQ ID NO: 72951

SEQ ID NO: 78476 - DNA, 1854 bp, Bellilinea caldifistulae
atgtacttatcaaaagtttgcatcaaaaacttccgcaatctggaagatgttaccgttgaattcggcgaaaaaattgtgctgttaggcgaaaacggtgccggtaagagcaacttcattgaagccttgcgaatcctgctggactcgaactatcgcccatcgttgggagaaagtgatttctcacggggcagcggcaaaaagccatttgggggacgaacaatcgaaattcatgcctggttttcagggctcgactgggaaaatgaacaggatttactgccgtctttccatgattgtcatggaaaagacaacggtacgtatcaaatatctgccatttaccgccccaagaaggatacgaatccccaaaatgcaataaccgaagatgattacgaatttattcgatactgtggtggtaacgagaacaatacagagggagcaaaacggcttcgccaatatgtgcgcctggtcgtgataccggcagtgcgtgacatggaacgcgatatgcaaagctggcgtacttcgccgctgcgccgtttggttgaaatgatttccctgaccaatgacgcgaacttcaaattggtcgcccagagcgttcaaaacgcatccaaaaaactggggcaaatcccatacattcaagatttacaaaaagacattagcgattttctagggactctggtcgaagggcaatctattcaaccaaccatcaacattgccggttcgaatcccgaagatttattgcgactgctcaacatttttgcagagtcggatttaccgcttgagcgcagcagtctgggcatctcaaatattctatacctgataacctggctgatttatgccaaacgtctgcgcactatgcctgtcaaaggtgaccaaaagcccgaatacgtcttgctcgctatcgaagagcctgaatctcacctgcacccgcattttcaacggctggtttttgaaaacgtattcaagcaagagcatcttttgctcacctcaacccattctccgaccatcgtcagtatcgccgacccgcgtcattttgttgtgttgaaacgcacttctaatggcacagcagctcgctcaacggcgaatttcgctcaaaaagatgaaaagatgcgccaggatatcagccgctatctggatgctacacgcggagaaatggtctttgcgcgcggcgtcttactggttgagggcgacgccgagatgttcttaatccctgcgtttgcaaggaaaatgaaagaggctggaaaaatatctcacaccctggacggggcaggaatcagcgtgtgcaatgtgtatggcacggatttccgaccttatgttgagtttctatcagggttagatattccatttgcagttttgaccgatggagatcctgacactcaaaaccctgggctaaaacgtggactggaattggtgcaaaaaataaacgcgccaaagcacgcagaaatagaagttcgttttaacaaaaaagaatggggtgctgttaaaaccggtttggaagaagttggtattttcgttaatcagcgcacgcttgagggggaattgatacaggcagggtatggagatgaattgtgcgaggtttaccaagaactcggcgccagcgacaggcaagtgaaaaacttggaagaagaaattgccaataatgattttaaagcgattattgatcgtattcagacaaccggcatgggcaaagggcgttttgcccaacgcctggcagaaaaagtagatgctgaccgcgtgcctccttacatcgagaaagccatcaaataccttttggcgaaaatgccccaaccttccaccgacctgcaattaccgccggaatcggtagaaaggccccaaaaccctaaagacgagatttccttctaa

SEQ ID NO: 78477 - DNA, 1869 bp, Bellilinea caldifistulae
atgtctgaatacctgaaacgacttggcaaaatagagcaagacaacaaccagcgcgccgctttctattcggaaggcagccaagttgtcattgcaggaccggggtcaggcaagacgtatttgctaacgatgaaaatggcgaaggcgcttttggaagagaaagtgcgctatccgcagaaaattgcctgtattacgttttcgcggcagttggccgaaaagttggtcaaagagttgcgcgagttgggcgtgtatgactctgagcgcatgtatgttggcacgattcacgctttttgcattgcagaaatcattctgccagcagttaacttgctaccaccggggagcattccagaaccgtttcggattgcttccgaaaaagaaagaaaagatgccttatcccaggcattacaaaaacaggggaaatcacttcccaaaaaagacggggcaataagagacatagagagcgatttggacaagttccgacgcaggtgttttcaaccagagaagaaggatttttccagcaactctctcgcaaaagtaagtgactacagccaaagagctttacagggtttagactggtcgcaattagcgggcgattatcatgcttaccttgagcgacaagtccatggcatggatttcgttcaaatcgaaatgcttgctttacacatcctcaaaacgaagcctgcactggcaagaacgcttacggcgcgctacccctggtggttcgtggatgaattccaggacctcagcccgttgtttcaccagatggtcatgcaccttgtagagcaacaacttatatccgtctttgcgattggcgaccccaatcaatgtatttacgaagacttgcagggtagcaaaccggaaactatccacgaattatctgatacagtagaacgactttgtcaaaatcatccaattaccttgcagaaaaattatcgttcttcgcagaatttgattgagttcagcaatctggtattggatagcccaaccccatatcaatctaatcaaaagcaccttgccgaaattcattacattcaaatcaaagactgtccatacccccaatcagtctcccaaatcttaatggagcagggaaatgataagcatatagcagtactgatgtcacaaagaagaaaatcacaaaaagtaaaaagtattgaggatttgttgccagaattagagcgtcttggtatggatttgagacctgacaaagatcctgattatggctcgaataccgagttaatcgaatggctcgaaaaagtggcacaatggtgttcgggtgatgaagtctatttctacgacttactgccgttttggaatagcttttgtcaattagagggagaaagcgataacgcgaaacggcttgaaatagaacgggaactgtttcatgcactctggacacttcgaaacggcgaaatgctgctcaaagattggttagaacaactctgtcaggcagtattgacaagttctaggttagaggaatacagaagacttcgccctgatgacgttgaagaatttgaaaaattgatggcagcggtttctacaaaggaacgattacaaaacaaggctctacactcgttcggcaaacaaaaatcccaaattttgctgactaccttttacagcagcaaaggactagagtttgataccgcgattgtgattgacttggatagtattcgaaaaagtcaatctgcgcctgacctgcacaagcgcctggcttatgttgccctttcgcgggctaaatcgaaactgtatgttttagattcaaagcaaggcaacttgcaaggcgactttgcaaaaatattacaaggtgcatctgtggagcaattagaattctggacttgcgacagccagggcaaatctacccgacgtaatgagtaa

SEQ ID NO: 78478 - DNA, 1929 bp, Vibrio splendidus
atgaagcttagttttgtccggctatcgaattttcaatcattcgggccagaaccaaccactcttacactcgatgacatgacctatttaattggtccaaatggttcaggcaaaacagctgcgctattggctctgagtcgcatgttcggtttcaacccttccgtgcgtagaattcagcgctcagactttcacgtacctttaggggaggaagaaactcctgaagaacgcacgctttggatcgaatctgaattcatttttcctgaacttgtagagggcagtgataacagcactgtagctccgcactttggtcatatgaggttagacgatcctgatggccttccgcgagtacgataccgccttactgcgacgatggggattgatggtgatatcgaagaaacacttgattatgtgctagaagtaaactcagatggctcaccactaagtagtgcgaaagttccacgtggcgagcgcaatcacatccatgttcattatcttccagctaggcgcgatcctgcggagcacgttacatacggctctaatgctattttgggcagaatgttacgctctattcagtgggataatgaacgagaaaccatctcaaggctaacaggagagataagcgatagtttggttggtaatccatctattgcggctctaagccaaggtcttacaaatacgtggaacaaactgcataaaggcaacttctttaaagaccccaaggttacatttgtcacatcagaaatagaagctttgttgcgacatacgtcgatttctttcggaccagggcatgatgaggggttcatcgatttttctcgccttagcgatggacaaaaatcaatgctttacctctccttagtgttatcatctcaaacagtaaacaaggccaccctctgcggtgaggatactgcgtttgacgtagaaaaacttaagccaccagtttttactatcgttgcactagaagagcccgaaaacagcctctcgccttactatcttggccgcatagttaatgcgctcgtagaaatgacgaaaggtggcgatgctcaagcgctgatagccactcacgcaccttcgatgctacgccgtatcaagcctgaagatattcgttaccttcgacttaactctgctcgtaacactcaggtgaagcatattcaaatgcctcctacaactgatgaggcacacaaatttgtccggcaagcaatacaagcctttccagaaatatacttctctcgcttagtcgtactcggcgaaggtgacagcgaagaaattgttcttcctagaattctagcagcgaaaggtatacctgttgatgagtctgcgattactgtagccccactgggtggacgacatgtgaaccatttctggcgacttctatcagcattggaaataccgtacctaactctgttggaccttgatgtagctcgctatcaagcaggctggggaagaattaagtacgcctctgagcaactcgccaagtattccgatacaaataaactatcagatgttttctcccctataccgaagtggaacgagcctaagatcccaataagaacacaccactttttcaacaatgggaccataagtgttttccaagagttggagtcaaaaggagtattttattcatctccgatggacttagattttgcgatgctaatttcataccctgaagcctacggtgtgcaagaggaagaacctgaagagtctacgattaaagctgttttaggtaaaagtcacttcaactctgaacaatacacagccgatgagttaaggctttttggcacttatcaccaactgtttaaactaggtagcaaacccgcatcacatatcgaagccttcgctaaactatctgatagcgacttgctcgatagcatgcctgactccttggttcgtttagcggacagtatcaaaacacgtcttgaggctataccagagtga

SEQ ID NO: 78479 - DNA, 1650 bp, Vibrio splendidus
gtgatatcaattgattcttggcgtccgtctgatgggttacagctagaaccgaatgctcaaattgctgcaacagagcagaaccaatcactagctcttacagcaggacctggagcagggaaaacagagatgctagcgcaaagggctgattttttgctgcgcactggtgtatcaagataccctaaacgaattcttgctatttcattcaaggtagacgctagcaaaaatttaagagaaagagtgcagcggcgttgtggcactgagcttggttctcgtttcgatagctacacttttcatgcatttgctaaacgcattattgatagattcagagtagtacttacaggtgatgatgcgctcactactgggtatacaattggtgagacaaaaattcctcatcagcagattttgtttcttgacctagtccccttagcaatcaaaattcttcaaagttcagaaattgccagaaacgcaataaggcagacatatagcgacgtgtttcttgatgaatttcaggactgtaccaacttgcagtatgagttggtcaaagtagcattccttggaacaggtgctcgtcttacggctgttggtgatacgaagcaaaagattatggggtgggcaggagctcttgagggaattttcttgcaattttccagagattttggggcaaggccactgaacatgtatcgaaactttcgatctcagcctgtgttacttcgcctacagaacgagataattcgtactctggatcccgtatccgttatgccagatgctcaactagccggtcatgaaggcgaaatgcattcgttgagttttgacacttgtagtaatgaagctgaatggatagctgatacggtcttacagtggatcagggatgaacgcctgcccacctctgaaattgccatattagtatccaagcaactcgacctgtacgcagctccacttatggccgcttttgaggctcgaggaatcccttatcgcaatgaacagcagatgcaagatatcactacagagccattagcccgactcatcgttgattaccttcaatgcctctacggggagcgttgccctgacgcttggagaagcttgtctaagcttctgacaccattcgaggatgaagatgcccaatccagtgttaagcaatcttttggtcagttcattcggcaacaaaggcgagaaattgttcaggagaatgctgaaggagataggtattattcttggtgggagggggttcgaaactttctgactttcgtcggtcttgaggttgttacatcattatcaccagattacgagtcgaaagtgcggcttaatgaagtggcagccgaaactcatgcccgtataaatgaattaagggaaattgaagaggacttattgggcgcactaagccgattttccgatgaccaggccgtcaggattctaaccatccacaaaagcaaaggccttgaattcgattcagtgatcatgatggcaattgagaatgagattttttttggtgatcagggcgcaaatcgctgcgccttctttgtgggagtgtcgcgtgccaagcgaagactagtgttaactcactctgaggtgaggcaaagacctgacggatacaccgggcgttggagcgaacgaagaacacctcaagaggaatacttgggttatacgcgatga

SEQ ID NO: 78480 - DNA, 1998 bp, Citromicrobium sp. RCC1878
atgcgccttgagaacattaagatccgaaacttcaggttgctgcgccgactctcaatcgatctcgcccaggacaaaacgacgaccattttggtggggccgaacaatagcgggaaaacctcagtaatggaggctctccggctgtttatcgggcaaggagccgaggctcctaaaatctccttccacgacctctctcagcttcgccaccgggacctgaagcggatcgagcgaaaggttgcggctgaagctgatccagaaaagaagattgagctgcttaggcggcttacaccgcgtatgcggctcgatctgaccttttcctatggcgaagatcccgccgacctcgttgcagccaccaagcttttgatggaccttacgcctggcacaagcagagtgcgcatgcggatcgactatcgactggagaacgcgaaaaagcttctcgacgagtttggggccaggcctcgcaaagacgtctcgctgtgcgactatctgaaagagacgttcagagatcatttcaaacgcgttttcttcaaagtgtcccctgacggcaaagaagtggaacaactcgaagacggcaatttgctgaaatccctactgcgcatcgacatcgtgcccgctcagcggcacgtcgatgacgatgagggaagccggtccgcgaagctctcaaaacttctccacgatcattacgaacgcttctatcgggtcgatgacgctgccggttatcaagcgatcgaagatgcactcacggcgagcgcaggcgaccttacggggatgtacggcaaagcctttggccgtttgacgaagcgccttcagagttttggctatccgccaggccaaaaagcgccggacctgagggtacgtgctgaactgagcgcagaaacaatttaccgtgacaatgcgcgaatatattatgccagcgaacacgccgaaaaagaaggagtaatggaggagttcgagctgcccgaaaaatataacgggctcggctacaaaaacctgatttacattgtcctgcagctggagtccttccgcgctgcgatcgacgcgacgatgggcgacaagccgcgcgttcatataatcgcgattgaagaacccgaggcgcacctgcacccgcagatgcagacggttttcatcagcgagatttcgaaggttttggaaacggacggagggacgacagcacaagttctgctctccacacactcgtcccacatgatcgctcattctgagttcgagcccgtgcgctatttccgcagggttggccgtcaggtcgtcatgcaggacctttcgcagctaccgctgccaccacacaaccccgaccttctcgacttcctgcgccgctatgttcgactgactcattgcgatctgtttttcgcggacaaggccatcttcgtggaaggccaggtcgagcggctgctgctcccaatgatgattgaggagcaagccaaggtggctggctgcgagacgctcggaagtcagtatgtcagcatttctgaggtgggcggggggcacgcccataagtttaagccgatcatcgactttcttggcattccgagcctgatcattaccgacctggactcggtcgatgacggaggaaaaaaatgcccggtcgcgacggggaaaagcactagcaacgcctgtctccgcaaatggattcccgagaaggaaaccgtcgaagaattgcaagcctgcgataatgcggccaagacgcaaggctgcattcgggttgcctatcaggtcacccaggacgggcattgtggtcgttcattcgaggaagcattcatctacgccaacatcacttggctgactgacaatcatgccaagctcagcacgactaaggctgccgtcaagaaagcgatagacgcaggcctgacagcacaagcgtgggagttgagcggcaagctcgggaaggtcgatttcgccctcgatctgatgggcgcaccaggctgggagattcccctctatattcaacaaggcctccaatggctggccgagcatcccgcaaaatga

SEQ ID NO: 78481 - DNA, 1701 bp, Citromicrobium sp. RCC1878
atggctggccgagcatcccgcaaaatgatgacggaagcggacgaaaaaatcctggattgtctgcacacgcgacagagcttcctgatcgacgccggggcgggctcgggcaaaacatcgtccctcattcgcgctcttgatttcattcgaggaccggaccgttcgagcgttatcggggaaggccagcgtgtggcctgcattactttcacgaatgtagcaaagaatgagatcatcgagcgtacagagcacgaccccttgtttgtggtctcaacgatccacgacttcttatgggcctcgatcaaaaactttcagaaagagctgaggcccgcccttcttgcgttcaatgaccggttgcctgcaagcagccgcagaaagcaagatcaggaggaattggcagaagctttaaagacggtaccgacgatcgcctactccgatcgcggcgcaaacttcttggaaggccgaatttttcacgacgaccttttgggcgtggctcacattatgttccacgaccatccgcttttatcgaaagtggtcgccgctcgattcccgttcatatttgtagacgaataccaggacactgatccgctggttgtctccgccctgttggatcatcttcttaagacagagcatcccccgctgatcggtttctttggcgacaagatgcagaacatctattcgggaggggtcggcgaattgtcggccgatcagcaggcacagctggttcaaatcaagaaggaggagaactatcggtgctccaaggcggtgatcgacgttctcaacaaggtccgaactgacattcagcaggagccagcgggtgccaatttaccggggggcgcggtgtatgtcagtctcaccggcacggctccggacgcggacattgccgaactcgccgtccagaaagcgcaggatgtcttcggctggagtgtacagggcgagttgaaggttctattcctcactcaccgccttatcgcccgcaaggccggatatgccgatctattggcagccttcgccagtcggggaagctttacgcaagataagtttcagagcggcgaagacccgattgcagccttcttccttaaaaaagtcgagccatttattactgcttggcgtgaagggcgggtggggcgcgctatcagttcattgaaggaacgcccgatcccgatcgcgggggcagccgagaaggcgcgagtgaaggcggccctagatgacctcatcaaactaattgatgccggaggaacgattgaagcaatcttaatgcatctgcgggcagcgcaattggtcacactccttgatgacttggaagcggccgtggcaggccctgtggtggctgccgaggcaggatcgcccgaggcagcgcatcaggcctttctggatcttcttctggcggtgccctatctggaagtcagtcgttaccgcgccgtgctggaaaacagcatgccgttctcaaccaaacacggcgtgaaaggcgatgaatttcagaacgtgatcgtggttttggatgacgctggcgcgaactggaaccaatactcgtttggcaagctgctggcaggaaccgacaccagcgaaagccgggagcggagaacccgccacctcttctatgtttgttgctcgcgcgccaaagacaagctgattgtggctgacctcggggttggggcccaggccaaaatcgaggcgcttttcggggccagcgcggtagccatgtga

SEQ ID NO: 78482 - DNA, 1998 bp, Citromicrobium sp. RCC1885; identical to SEQ ID NO: 78480

SEQ ID NO: 78483 - DNA, 1701 bp, Citromicrobium sp. RCC1885; identical to SEQ ID NO: 78481

SEQ ID NO: 78484 - DNA, 1953 bp, Pseudomonas putida
atgttcattgaacgattaacgttaaccaaattccgcagtttcggggtcgaaacggacattgacctgaccccaggtctcactgcattcattggcgctaatggctctggtaagacggcagtgatgcaggcgcttcagcggctattcggtatcaccggagatcagcgccgtattcgccgccaagactttcatgtgcctgcggccgaggatgttgcaccactgcagcggcactttagtcttgaagccatcctcgcttttcctgagctggacacggaagaggctgaagcagcagccatcccagagttctttcagcaaatggctgccgatgaggccgggcggttgaagtgccggcttcggctagacgcgacatggacagacgatggttcgatcgatggggcaatcgagcagaaatactgggccatacgtgcctttggcgaattcactgatgaggattgcgttgagctgaaagctgtcgatcgggcacgtatccagatgatctacgtacctgcttcgcgtgatggttcttcgcaggtaacttcatttttgagggggcgcctgtggcgcgcgattaattggtcccagggtgtacgcgacacgtttgatgaggctggcacgacactcaatggggcatttgctggtgaagcggctgtcgatgtagttgctgacgcagtacggcggcgctggcaagaggtccatacggccggcaccgataccacgccattgtttcgccccatggatttgcgtttccaggagtttattaggaaggtcgaagtggtttttcggcctgacgaggctggccgtgaacgtgcccttgacgatctcagcgacggccagcgctcgttgtttcatctcgcaatgacggcagcaacattggatgtcgaaaacagcatcgccggagatcccgtcgcagccggatttcaacctggcggtgtccccctgccggcgttgacccttattgcgatcgaagagccggagaacaatctcgcccccttctacctttcgcgcatcgtccgtcaagtcgaagaccttacgggcgggaaccgtgcccaggcagttgtctcaagtcactcggcaagcatcctttcgcgagttgatccctctcaagtcaggcacttccgcctcgactccgctaatcggacgtccttggttcgagcgatctgcttgcctgaggggctggaggaggaatcaaaatttgttcgtgaagctgtgcgcgcctatccagagctctacttcgctcgattcgtcgttcttggcgaaggcgcttctgaagaggttgttatcccgcatctggcagaggccatgggcttcgatattgatcgttcgtttgtcgctgtcgtgccgctcggtggacgccacgtcaatcatctgtggcgccttctcaaggatttagaaatcccttacgcaacgttgcttgacctcgattgggggcgcgatggcggcggttgggggcgaataaagagcgcctgtactcagttgcttgagattggtatcacccctcaagcgctgtttggccagcacttggatccaaacggccctgaagtcaacctcgctcgctttgatggactaccagcagagaatacggcagggatgcaggagtggaccaattggctgcgccggttcgaagtattcttctgcgctcctcttgatctcgactattcaatgctttgcgcttttcctgctgcatatcaagtcattgagccaggccggcaaggcccctctaatcaaggcgaccctcgcattgtggtgctgggcgagacggggcgccgggagctttacggactagaccaagaagcctcgttacgctggtatcgatacctgtttctcgggagaggcaaacccagcacgcatgtgcgtgtgctcagtagccaagcatccgaaaccttggccgcgggagcacctgaggagctccgggcgctcctcatggctataaatgctcgattggaaccggcgaactga

SEQ ID NO: 78485 - DNA, 1881 bp, Pseudomonas putida
atggcacaaattcgtccagaggattggcaaccacgcggtattgaggatttagagcctgctgcatggcgagcgttgcgtcatgaggggtcggcctgtgtagttgcaggtccaggagccggcaaaaccgagtttcttgcccagcgcgcagcctacctgcttgaaacaggaatttgtcctgctccttaccgtgtgctggcgatttctttcaagggtgatgctgctgacaatttagcggcgagggttcgaaaacggtgcccacctgatctcgctaaccgctttacctcgctcaccttcgattcctttacaaagggcttggtagatcgcttccaggcggcgattccggtaccgtggcggccaacacgtccctatgacgtggcatttccgacgcgccgccaggtcgagcaatccattgcgcgtgcgaggcaaaattctgcagctcaatggcaagccacaattggtagctttagcgctgggacatttgagtcgcacaaggtgggggcatacaggctccctatcgctcggaatgcaccgcagtcggctgaagaatttgccatccaccattggtggagagaacagcttgagcgccaaccgagctcaggtctcacctttataagcctgaaccgattagcagagctgttgctacgctcgaatccgcatattcgacgtgcactgcagcacacctatccgtttgtgttcgtcgatgaatttcaagacacaacttacgctcaatacgacttcctactgtcagcattcggcggtgctgacattgcggtaaccggtgtcggtgatgacaagcagcgcatcatgacgtgggcaggtgcgcgcctggattcatttgaccgcttctctgaggatttcggcgcagttcgtattccgttgctgttcaatttcaggtcgtctccaaaccttgttcgaatacagcaggttgttgcgcgagcgcttgatccaaatgctcctcaagcggaggcgcaagcgcagcgccaggttgacggtgatgtggctcaagtctggaacagtcgcactaggaatcaagaaacaacacacctcgcacgctggattgtgagcgacatggccaatcgtggcctttcgcctcgacattacgcaattcttgtaaaacagcgctccgatgatttcgaggctgatctggcacctgcctttgcccaggttgggctacggattcgcaatgaaagtcacgctctcgggcgaacgactttgcaagacctgctttctgataactttgcaaaaatcgccatagggctcctcaggctcggagcaagtcgcagagcccctgctgcctggcagcttgtttcctccgcgctgtgggccatacgtgctattgccccagatgatgaattaggagcgatgcgcatggagacggaactctctaggttcatcgcaacgcttcgcgctgatatgaccaattgtccgccttcgctagccaatgccaatgtctttgcaaatcgcgtggtggaatttctcgatctcgcagcccttcggcgaacctacatcgaatacgcatccagtgacgtgctagccatcatggaagaggcgttccacttgcaccttgcagcgtcttctgatgccgctgactggaacggttgtctcgataccttcgaggggctagcccaaatccccatgatgaccgtgcacaaaagcaaaggcctcgagtacgacactatcgtctttgtgggccttgatgatcaggcttggtgggcacatacgccgggcaatcttgagggtcttgcgacgttcttcgttgctctctctcgtgcaaaacagcgtgcgatttttgccttctgccaggagcgtggtcagcggcagcgggtagctgagctcttccagcttttgaccgcggccggcgtgccggagatcgcaatctga

SEQ ID NO: 78486 - DNA, 2295 bp, Pseudomonas sp. In5
atgcgcatccagcacgtagagatatccaacttccgaaaactgctttctgtgcgaattgactttgctaatgagaccacgctgcttgtaggtgcaaacaacagcggcaaatcctcagccatgctcgcactccggagatttttggtttcgaaggcttctgcttttcggctccaggacttgactctttgtcatctcgccaagctgtacgaaattggtaaagagtgggagaacccaccagcaaactttgaaattcctacagccaaggactggacagactggctccctagtctggatatctgggtgtcggcagaccaaggagagttccacttcattcgcgatcttatacccagctttgcgtggcgcggggggcttgtgggaatgcgtttcctgcttgaaccagatgatatgaatacgctgtacacggactatcgcaaggagcgcgctagggttgcagagcttgaggatgctatagggaaggaagacccgcctggtagcccgctgacactatggccgcagagccttcatgattacttgaaccgtcgccttggagataaattcaagattcgttggtaccgcctagatccgcaacaacttaagaagcctgacaagtcgactcgaatggctcaaatgcagcaactgagtcctactaccctgcccctagaaagcaatcccctcagtggattaattcgagtacatgagatcaatgcacagcggggattcggcgaccattcggacgacaatcaaggcgacaacgctagacccagcggcgctcgaaaactctcggaacaacttagatcctattactcccgacaccttgatccaggtgacagcccagatatctcagatctcgaagcgttgcgggcgatagaagcagcacagtcggcattcgataccaggctaagtagcagcttcgacactgctattagagaggtcgagggattgggctaccccggccgaaatgacccacgcatcaaagtcaaaagtcgcctggcaacaactgacggcatgaatcatgaagcggccgtcctttttgagttggattcaattcagggcgccccaggagcccctccacttcatctaccagagaccgctaacgggttgggatatcaaaacctgatatctatgattttccggctgatgggtttcagggatgagtggctaagaaaaaccagagccgccagcacggaagttatagaccgggtcgagcccatccacctcgtgctcattgaggagcctgaggcccaccttcatgttcaagtgcaacaggtgttcgtgcgacacgcctaccaagttctatgccgagacgctttgcttgaacgctacccaaatctgaagacccagcttttggtgagcacgcactctagccatgtaactcatgaagtggagtaccagaaccttaggtacttcaggcgactcccagctggaatgtatggcatcggcgtaccggtgtcgacggtctctaatctctctaacgttttcggcgaagaaacaaagacgaaagagttcgtaactaggtatctgcgggcacagcacgcagacatattcttcgccgacgccgttatcttggtagagggctcagcagagcgaatgatgctgccgcattttttgcggaataagtttccatttcttgaccgctgctacatcacaaccctcgatatcggtggcagtcacgcacaccgactaagacctttagttgacgcccttggcatactcacccttgttattacagacctcgatgcagggcttaataaagccgcaaaaccggtgcaaagaaacgcaaatcagattacgaacaacccgacattgcggagctggatgaagctgatgcatctgggcagcacagtggatgagttgcttgagctgcctgcgaaccaaaaagagcacgagatcgacgaactgtactcggtacgcatcgcctatcaaactcctattcccacccacctgccggcttctggtgaagcaatacaagctcttccaaatacctttgaagacagctttgtgcttagcaacgctggtcactttgcggaaaagacagggacaaccggtttaatgaaggctttcgttaaagttttgaatgaatcgcaaacatcggaagctgtcggggaaggttttttcaacgaattacgcgaaggaaagaaagcagagtttgtgttactcgttttagctgacaaaaactttcccagcctaaaaatccctgaatacatcagtgaaggcctcaactggcttgattccaaattgcgaagcaagcaaagagagctgctggtaattccgcccgaggccgcggaggtaacgccatga

SEQ ID NO: 78487 - DNA, 1848 bp, Pseudomonas sp. In5
atgagcgaggcagcggtcgcggatgccgacaccactatgcaggcctgcctgaacttgacaaatccgaagagtttttttctttacgcaggtgccggctcaggaaaaactcactcactagtagaggctatccgcgaactcaaaaatcgcgagcgagaacgcctgacgttcgagggccggcgcattgcggtgatcacctatacaaatgcggcctgcgacgaaattcttcggaggctagagttcgattcactcgtggaagtctcgaccattcacgcgttcgcatggcgtctaatccaaggattcgacaacgagatcagagagtggctaaggatcaaacttgcccaggacattgagaagatcgagggcgagctagcccgctcgagaggtgacaataaaacctctcgaggaaacagacggaagctacaaagcaaaacccgcagacttgagactctcgacgagattacgaagttcgtctacagccccacgggtgacaatagagagcggcaagcacttaatcacgatgaggtaatcaaattaactgcagcattcgttcctgaacgccctttgttggatgttctggtagaccgctacccagttgtattgatcgacgaaagccaggacacccacgctccagtaatgcaggcttttctgaaggtccagcaattggcgcagacacgcttctgcctagggctaatgggcgacaccatgcaacagatttacggccatggagtaacgcgccttgataaagcgataccgggtgactggctgaaacctgaaaaagtcgttaatcgccgctgccctcgtagagtggtcgacctgatcaacgtaattcgaagcactgcagacactcatcagcagacctcaaagcctgatgccattgaaggtgtagtgcgcatgtactgcattagtcaaagccaagaacaggcaccaaatcttgaggaaggcatcgctcattcgatggctgcaataaccaacgacggcgaatgggccaccggccctgatggccgaaagaccttgatcctcgaacataagatggctggacggcggatgggcttcgagaaactgttcacgcccctatacgcggttgagcaccttcaaacaggcttgctggatggaaccctgcccgcacttcgcgttttcagcgaaggcgttcttcccatccttaccgcaaaggatgatcacttccttctgcttgaagccgtacgctctcgctcacccttgctcagcaaggacgcgatgcaatcaacaggggatcaatcggctcacatgcagcatgtagaggacgcgacgcatgccctgctcgcccttttcgaatcaaacgatccaacactgatcgaggtcgcaacgcttctgctgcaaacccaactgcttgatgtccctgacaatctggttggggcaatggtgttgggagctcctggtgaggctccagatcctgaagatacgaacgcgatgaccaactacgcctatcagcaattccttgagcgtccattttcggagctggcagcctttgcgagttatgcggatggcctttcaccctatggcacacatcaaggtgtaaagggactagagtttccacgggtcatggttgtcatcaacgatgaggaggcaggcggcttcttattcagctacgacaaattgctgggtgtaaaagaaccaacgaagactgatcgggacaacgagcgtgacggcaaggacaatgcactagcacgtactcgtaggctactttacgtgacgtgtagtcgggctgaaaaaagcctggcgattgtcgtatacacaccccagccgaccctggccaagcgaaacgtagttgctgctggctggcttcaggagagcgaggtcgaaatcctgtga

SEQ ID NO: 78488 - DNA, 1779 bp, Pseudomonas sp. In5
gtgcgcttagcaaatttgagtattcgaaactttcgcaattttgaaatggtaaatattccgctagccggcaatgtcgtgctgctaggtgaaaaccgggtcggcaaaagcaatctactcttcgccatccggctagtttttgacccaaccctttcggattctgcgcggcagttgaagctttcagatttctgggatggttgcgacctgacgcagaacccacaaattgaagtgcatctcgattttgccgactttgaaagtgacgatgggttgctcgctttgctaaccgactttcgcaccgctggcaatccgaaggtcgcgagactgagctatgtattccgtaagaagccagaggtcggcggagcgccacaatcgggcgaggattgcgagtttatcacctacggcggcggcgacgagtcccgcccgatatcgagccgggtgcgccgtaggattgccctcgatatgctcgatgccttgcgtgatgccgaaggacaactcgcgtcttggcgctactctccacttaggccgctgctcgaagatgcagtcgcttcggtgagtcggagcgatctggaaggcgtcgctgctgacctcgaggctgcaaataagaagatggaagatttcccctcggtaaaactactcgaggagtcgttgcgctctggcattttaaatctagctggcagtacgcatgacattggcgcgaggttacgatttgggccgaccgatccgctccgactgtttcgctcgatcgcgatgtatatagacgaaggaaagcgtggcatcgcagaagcaagtttgggctctgcaaacgtagcgctaatcgcgttaaagctggccgagtttgcctggcggcgggcaaagaacgagcgaaattattcgctgctttgcattgaggaaccagaggctcatcttcacccgcaactccagcgaacggtcttcgacaagctttttcaaaatacagaccccgcccaagcgctgattgtgactagccactccccgaccctcgctgcagttacaccgctgcgatcaatcgtgaccttacgatcggttagaggggcgtcccgagcctactcgcttgccgcgttgccagtgaatactgatgagatcgacgacatagaacgatatttgaccgcctcgcgatccgaattacttttcgcccggggagtcatctttgtagagggcgatgccgaggaagcgctgctacctggcttcgccgacgcactgggcaaaaaccttgaccgactcggaatcactatctgcaatgtcgcgggcaccaactttgccccatacgtaaagctcgctggcagccttggcttgccgtttgcggttgtcaccgactgggacccactcgatggtaccaagccaccgcttggcaaggctcggacgctcgggatctgggatgccttttgcgctgtttccggaactactcctttgacacctgaaaatcgcgcaacgtgggaggcaaccgactttaccgaattcagcaagggttgggagcctgcaggcatcttcctgaacaaccagaccttcgaggtcgccgtggcgaacacgcctagcctaatcggggcgctgctcgacatcctcgccgaacaaggttttggctccgtacgcaccgcgcgcataacagcttggcgcgccggcacacccgtcgatccggaccagttactcgccatgatctctgatattggaaaaggtcgtctcagcggaaaactagcgaggaggctgcccgggctaactccacccgcctatatcgcttcggctatccagtttgtggcgtctcgtgtctaa

SEQ ID NO: 78489 - DNA, 1782 bp, Pseudomonas sp. In5
gtgtctaaccatctcgcgcttatacgagcgctagcagatcttcaaggtaatccagagcaatacaatgccgcatgcgaacacggccattgtgtcgtccttgccggtcccggcagtggtaagactaaaaccctgaccactgcgatggcgcgcacactgatagaagatgtcatcgatccgcgcggcgttgcttgcatcacttacaacaacgaatgcgcgattgagcttgagatgcgactcgcgaagttgggcatcaagagtagtgatcggagttttattggcaccgtccacagctttgcgcttacgcaagtcattggtccctatgcccgttgcattgtaggcctacttcctgatgattttcgcgtcgcgacgcgcagtgaaagtcgcgacgcaatcgagatcgcctatgaaaaagtcttcaacgatgcggggaacccacacgaccgctggcgctttgctgaagagaagcgccgccgcgatgtcgatcgtaacttaccgtcctggagggggagcaaccacgagttagctgacttcatcgaagcttatgaggatgagctacgtcatagtgggctcattgacttcgacgatatgccgctaatcgctttccgcatgatcaaggatcatccctggatccgaaacgcgctgcgagcccgtttcccagttttgttcgttgacgagtaccaggatctgggtcaggcacttcacgagctggtcttgctgctctgctttgaaggcggcctccgtctgttcgcggtcggagacgcggatcagtccatctacggtttcacgggtgccaatcccgaactgctgcaaagactaaccaaacgagatgatgtcagaacaattcgtctgcgcttcaactaccgctccgggggaaagatcatccgagcatccttgggcgcacttggtgaggagcgcgactatcgcggtgtggaaggtgcttccgagggcgagctgactttctggccggtagagggtggccatgagctacaggcgcagcatatcgcgaagactgtgctgccagctctgctcagtcgaggcctacggtctgaacagattgccatcctctatcgcgcggcttggctcggcgataaggtggtcgattcgctagaacgttccaacattacttatatacgaacagacagcaatgcgctggttaaacgcagttcacgccttgctcgcttcattgaggcttgcgctggctgggtaactggcggatggcaagtcgcagatccaccctatgaacgcctggttggtcaagcaatcggccttgtctatggtgggcgagttacagagttcgaagaacaagcactgtctcaacagttgatggcattcctacgcggtagcattgactcaagcgagacaactcatgtttggttacagcgttttcagcaagaattgatcactccttggcaatcaatcagccgcaatgctcatcaagaatgggaggtttgcctcgagatgataaagcggactgacccaagggataacaatgacatgctgctcacgatactctctggccgaatagacggtactggtcgcgttaccttaagcaccctacacagtgctaaagggcgagagttcgatgctgtaattttgttcggtattaatagtgacgacatacctaactggagagacaaaaagagcccgctggcccttcgcgaggcgcgacgtcttttttacgttggggtgacgcggccacgaaaggagttatgtctcgtctaccaaaaaaatcatcattcgccctggatcgctgagttgtaccagcgtagccagcagccttag

SEQ ID NO: 78490 - DNA, 2136 bp, Sphingopyxis macrogoltabida
gtgcatatttcgagactacagctggtcaattaccggaatttcgagcgagcgaacgtcgtcttcaacaagggcgtcaacacgatcatcggcgagaacgggtcgggcaaaaccaacctgttccgagcaatccgcctcctgctcgacgacactttgctacggtcggcgtatcggctcgatgagaaggactttcatcgtggattgggagactggcgcggtcactgggtgatcatcagcctcgagttcgaggacgtatctcaagatgaggcgatccagtccctatttctgcacggcaccggcaacatcgcggacggcaccattggcagggcgacgtacaacctgatctttcggcccaaggtagcgatccggcggagttttggtgatctccccgttggcgatacctccggccttgccgccgtcagatccaagatcacgctcgacgattacgagaccatattcaccggcaagagcgtcgcggatttccgcgatcccgctacctataaggaactcgtcggagatttcgacgcggtggaattcccccaggagttgtcgaatcctgcgattgggggtgtgatcccagggatgctttcgatctcgcgcgaagtgtgcttcacgttcgtccaagcgctccgtgatgttgtcgctgattttcagaacaaccggaccaatccgctgctcaccctgctcaagggcaggagtggcgagattgatgcggcgagctttcaaccgatcagcgctctggtcaaagggctgaatgacgcgatcgagggtcttcccgatgtcgggaccattcgcgctgatatccgcgagaccatcaccgatgcggcgggcggaacctattcaccgcgctcgctctcgattcgctcggacctatccgatgaggcggaccgcctgttccagtcgctcaagctgtttgtgggcgaatccgatgagcaatatgaaggcgcgatccatgagctcagcctaggcggcgcgaacctcatctacctgacgttgaagctgctcgagttcaaatatcagaagcagaaggagtctttcgctaacttcctcgtcatcgaggagccggaggcgcacatccacacccatatccagaagacgcttttcgaccgcctgaactatgacgacactcaggtcatctattcgactcactcgacccacatttccgaggtaagcaacgtcgagaacattaatatccttggtcgacaaggcggacgatgtgatgtcttccagccgtccgcgggtctggattctggccagataggcaatattcagcgttacctcgacgcggttcgcagcaatctgctttttgcaaagagcgtggtgctcgtcgaaggcgatgccgaggaaattctcataccgattctggtgaagagagtcctcgggctgagcctggacgagctcggcatcagcctaatcaacatccgcagcaccggcttcgagaatgtggcggtcctgttccacgacgatcgcattcgcaagcgctgtgcgatcatcaccgatctcgatcgcgccttcatcgatacggacgatgacattctcgacagcgaagaagatgccgcagcgaagaagaaggcgttggggtcgcaggttgcaggccttcggcgcgaagcggcgctcaagctgctgtgcgacggcaatccatggctcacggctcatttcgctgacaatacgtttgaggtcgatttcgtggccgctggcaacgcggggacagtcgtatcggttctcagtgacatctataaagacgctggaacaatcgcggtatcaaaggaggagctggaatccggcgatatcgagcgcttcggaacgcgcgttctgacgatggcccgctacgctggcaaagggtggtttgcgatcatcctcggacgaatgatcacgccggagacggtcattcccgactatatccttgatgcgatcttccaggcgcatctgcctgtcacgacccagacatgggcaaacgtgctggagtatcgagttggcgttctcgctcagtcggacatccatgcgcccgaagcgatcaccgctatgcgcgagcagatccgccgttacagccgtggcgagatcgatttcgctggcgttcgatccgagatgctcactgcattccctgccgacggcatcaacgtcatactcgcgagcttttga

SEQ ID NO: 78491 - DNA, 1800 bp, Sphingopyxis macrogoltabida
gtgttcgtcttggacaagacggatctcaacgacgctcaggtggcggcaatcgagcagccgggcagcgtctttctcgttgcgtgtcctggaagcggcaaaacccgaaccctcaccttcaagatcgcacgccttctgtcggagctgaaatcggacaagaagcgcatcgtcgcgattacctatacccaccgggctgcggacgagatccacgaacggatcgaacaactcggggtcgatacgagtcagctctggatcggaaccatccattcattctgcctggaatggatcctcaagccctatgggatctactacccggcgctcgcaaacgggttccaggtcatcaatgggcatgacacggagcaaatgctcgatgatatttgcggcaaggtgcagggtacgaacctcaaccgctacgactgcgcttattatttcacgccgtccggctaccggctcacgagcaccgcgacagataaacacccggttatcaagggggtgcttaagacatattggggaacgcttcgcgacgagaggaagatagattttgagcttattcttttctgcgcctatcagctgatcaagaagaacccctcgatcagtgttttgctcgggtccattttcgagtgcgtcctcgttgatgagtttcaggacacgcgggagatccaatacgcgatccttgcctcgatcctgaaggcctcgcaaggtcgcgtacgcgctttcgtggtcggagatcctaatcaggcgatctacagctctctcggcggctacgcgatcacggcagccgacttcggagcccggtgcggcatccagttcaaggagatggagttggtagacaattaccgatcatcctcccgcatcgttggatatttcggcaattacaatgtcttcgcttcgaagatcgaggcggtcggtcacaacaaaaattatgcgagcgtcgtgtcgtttgaccagcagactcaccgcgacgaccttgaggccgagttggtgcggcttataaagtacaatgtcgagacgcagggaatagccgcgcacgaagtctgcatcgtagcaccacggtgggttcacctcgccagcatgacacggcggctagttgctgcgctccccggctactcgtttgatggcccgggaatggtgccctttgcgcgcgacgtggacaatttctggtacaagcttgctcgcataatcctgaccgaagcatccccgcagctttacgttcgccggatgcgatgggcgggcgatgtgatcgctggcctacacgacgctggcgtcgacactgcaggcctggatcgaaggagactgcttcggacttgcaatgcaatcgagatcggtgagaccgatggcttggcctttcttagggcgttcttcgatcaactatgcgctgcgctcggcatcgatcacggcgcatattcgttgctgaaggagcatcatgacgcctttttcggctgctcgcaaaggcgcgtcgatcttctggtcaaggaaggctccccggcgatcgcagaggtcgcgatgttcaagaaggtctttgcggacaggactggcatcaccatctcaacgattcacggggttaagggagccgaatttgacgcggtgattgcctacgggttgctggaggggatggttccgcatttcagcgatccagcgcagatcgagacggcaaagaagctcgtttacgtggtgtcatcgcgggcccgcaaaaacctgcatctgatttcggagcgtggccgcagtcgcggttggagtggagactatcaaccgacagacgtcattgttgggtgcgcgtttcaatataatcagcctccgttctga

SEQ ID NO: 78492 - DNA, 2340 bp, Azospirillum brasilense
atgcagagttttgccgaaacacttgtcgacgctgcaagcgccacgccgctgaatgaggcggtgactccattggccgtgcctgcagtgctctcacccatcaggctcgcatgtgcagaggtggggaatttccgccgcttggctcagacgcgcctggatttcgacgactgtacgaccgttctggtcggcgccaacaatagcggcaagacgtcactgctcattgcactgcgcaactttctgagtgagtctccgggctttcgtgccttcgatatcggcctcgctcaatggtccacactccggcagttgggcgaggtgtgggaagccattgatgaggatcccacgacagacacgaaagacgccgacgcctgggaacaccagcatcaacaactgctggcgtgcatgccgttcgtcgacctatggttcgacgcgaaggagggcgcatatcactacgtggcgcccttcatcaacacgcttaaatggtcaggaggcgccgtcggccttcgtcttcgactagaaccggtgagtgattcaagcgatctgcgcaagctggcttggcgttatcgcgaggctcgggttcctgtccgcaatttagcgaagaagggccacgcgtggccgacagacttactcgattactggctccggcacccggccgacctgcgccgaatccaagcgtatcgactggaccccgccaaaggtcccctacagtcgcctgaagcgagtgcgccgcagcccctcccgccaagttcgcagccagttgagttggctttgctgcggcaactcatccgcgtagacttcgtgccggcgcagcgcggcctgggggctgaggatgacgaggcacggtccgaacctgcaggagcgcgacccggcttattctcaaaccagcttgtgaagttcgcgcgccagcacttgaacgtcaacgcgtctgcacacggacacagcgaggccttggtcgaggccattgccaatgcacaggcgagtctggacgaacgcatcttcgaggcacttcaaccgagtatgcaggatgtgcggattcttggctatccaggtttgcatgacccgcaggggattcatttccgcacgcgcatcaagacggcggacctcctagcgcacagcacggccatccagtattgcaacgacgagacagcgctgaacgagttgctgccggaacactccatcgggcttggttaccaaaacctgcaatccctgagttttatgctcgtgtcgttccgcacagcaagattgaatccaacgcagggcacgcctgcggccgtccatcttgtcatggtggaagagcccgaagcgcacctgcatgtgcaagtgcaacgctgcttctccaccaacgcccacgcactgctgtgccccaaaggcgccgaacagagccacttgcacacgcaacttctcatcagtacacactcaagccacttagctcacggcaacaaatttacgcggttgcgctacgtgaagcgaacactggcatctgctgcgggggccaagccaagcacgcgcgtcatcaacttggctaccgtgtttggcagtgacgagcagaccagaacattcgcagagcgatacttcgaggttcagcacaccgacttgctgttcgccgacgcggcggtgttcgtggaaggcgcggcggagcggatgctcgtgccgcagttcatcgcgcgggactttcaagctctggatagaaagtatctgtcattccttgatattgggggaagccatgcccaccggcttcggcctctggtggaatgcttgggcattccaacagtggtcattaccgacgtcgacccggtggtaccgcagaaagtccgggggcggactgttaaggtcgccgtgtgcatcgcaggacagtcggatctcgaatgcgggaacgataccctgaccgtgtggcatccgaagctcaccaacttccaagagtacggcacgccaaaagcagaagaccttgaatggacctcgcccaacggaggcaaggtgcgcttcgcttggcaagtgcccattccaagtgcgggcggccagtggcccagttctttcgaagatgcgctggtgctttcaaacattgattggttcaaacaattggacgaggagaaggacccggttagcggcaagaaggtcaaacacagcggaaccttgggtaaagtcatcggactcgcggtagactatccgaatccgacggaactggcacagcagctccatgacatgatgcataggggtttcagcaaaggggactttgcggccactctattcgaacgattcaacaaaggaagcttcgcgtgtccgagctacatcgctgaggcgcttgattggctctcgaagcaattgcatggggcgggagcgtcagcgtga

SEQ ID NO: 78493 - DNA, 1959 bp, Azospirillum brasilense
gtgaacgcagcagttgaccaggtgggtaatgagcgagatgcgcacgtcgttgaggaaatctgcggctacgttactgggattcccccacggagcttttttctgttcgcgggtgctggatcaggaaagacgcgcacgctagtcgaggtcctccgccgcatcactggcgtggtcgagcacgccgcgggcggaatctacgcctcgaaactgcgcgtgcgaggccagtcggtacgggtgattacatacacgaaaaacgctgcgaaggtggtgacgagtcgactcggcgaaaatcgattgaccgaggtgtccactattcactcgttctgttgggacttggtgaaaggcttcgacgaagatatccgtgaggcattgatagcaaagaacatggaagagctcgctaaggctaaagcccacgcgcagtctaagaagagaggcgagagcgacactgaccgcagaaaatacgcggagttggaagccaaggcggaggaactacgggcgatccccacgttccgttatcaccccgaccaaaatacgtatggcgaaggcgcgctgtcgcaccaagaggtgctacgcgtggcggcgtggctactttgcgagcggcctaccttgcagcgcatcgtgcaggaccggcatccgctcctactcatcgacgaatcgcaggacacgatgaggggcgtgctggatgccctgtttgacctcacgacgattcgccctggccatttcacgcttggattgctcggcgaccaccgtcagcgcatctaccccgatggtcacgtggacttgccatcgcacatcccgccgacatgggcgcgaccggcgttgcagatgaaccatcgcagccgagagcgcattgtccggcttatcaatgccatttgggaggctgacattgaagggcgcacgcaatccaagatcggagtggcccagcatccgcgtagcgaaaagcaaggcggcaaggtacgaatattcgtcggcgatacggcaaacacaacatccgtaaagttaagttttgaggctgactgcgcgcgttccatggcgcagataacgggggcagaagcgtggagtgcgaaccaaaagagcttcaagacgttggcattagagcacaagttgggggcaaagcgaggcgatttctacaatatctactgcgggatggccttgctcgacaaagaagcggcgacgcccgaccccaatggtgagaggatgggaccagcgatggttcgcccccttcttggagggctgcttgaactcgccgaatgcgtccggccagatggcacgctggacgagtttgccgctgtcgcagtgctacgccgtcacaatgccctgacaaagttgccgagcgaacacgctgcccgtgctgtgcggcttgccgagctctacgaagcgatcagccgcttcgccgtgctgtgccaccgtactgaaggcgcacaggtcaagcaagttctggccccgattctggaggccaacgtgcttcctgctgattcccgcctagttggagcctattgggacgagcgcccgccgccgccagaacccgaacgagaagccagcgagagcaaggaagaccgtcagcgtcgcgggtggcatctcctgatgaatgctccatgggccgaactcgcgcgctaccggacatacctcggtggggaggcgccttttgccacacaccaagtggtgaagggctcagagttcaagcatgtcatggtcgtcatggatgacgaggaggccggaggaaacctgttctcctacgataagctgttcggtgccgaaatactgagcaaagatgataaggataacatcgctgcggggaaggaaaccaccatcgaccgcacgcttcgtttgctctatgttacgtgcagccgtgccgaagaaagcttggcgctggtgctttgggcaaaggacacgaattcggcactgaccgccatcaacgcgtgcggctggtttactgcggacgaagtcgtagtacttccgtaa

SEQ ID NO: 78494 - DNA, 1263 bp, Citrobacter freundii
gatttagagagatttatccgcaaagaaaaaagacaactcttaaaaattgcacaacaatcattgaactctgatgaaagagaagaagatgacgatttgttaggagagataagttcagatttacagttaattaatgataagatatctcaacttatatatatagaaagagctacaaaagaagtcaacgatgagttgaaaaaacttgcacatcattactcagaatattctgtgcaactagatactggggcaattggaataaatgactttattgatagcctacaactgggagcaaatacaaatggttctaacgtaatgcttggaggggacggacggaacaatcaaattttattagcgttatggaaagcaaaaagtattaaggaacatgatatcgataacgaagttatcttctatgttatcgaagaacctgaagcacacttacaccctcatcaacaaagaaaattagctgattatttgatagatgaacttccagggcaaacgatcatttcatcccattccccccaaatagcggcaaactttgagccaggctcaataataagattgcttgaccgggggggacacactgtagccgcaagtgaaggatgctcgaaaggtatttcagatggatgggaagatatgagctatcggatgagtatattaccagcagaatcatttttttcaaatggtgttttcttaatcgaagggccatccgaaattttattttaccattccttagctaaaagtttaaatattgatctagattatttaaacatttcattaatttcagtggatggaatatcatttaaaatatatgtagcaatactagatgctttagaaatcccatgggtaatgcgaactgataacgatatatcaaagctaaaagataaagaaaagtggaactatgcaggtataaaccgatgtttagatatagctggcatagaaaaatttgagcatagcgacaaaaaaataacttctctagatactcttaccaacggtgattggcaagcagtttctgaggaaataaatgaatcaggaatatatttatcaaaggttgacttagaaactgatcttgtagaggagttaggtgcttcaatattagatgcattggataaaaaaaataaccaaagcgcaatagaatacttacaaaagaaaaaagcaataagaatgcgcattcttctaaaaaaaataaaaaaagaccttcataaacttaatgcgggtgatttggttaaaccgttaaaacaccttgtaaaaatagttaaaggtgaatga

SEQ ID NO: 78495 - DNA, 1085 bp, Citrobacter freundii
atgaatgctttttcgccaatcactcagcaaaaactagccattgattaccctaaaagcatggtaataacagcatgtcctggaagcggtaaaactacagttataaaagaaaaaattagaaatattaccggctgtctccctgagcataaaggagtcattgctattacattcacaaggaaagcaagttcagaactggagcgtagatgtaaggctgaagggcataatacaaaaaatagtttttttggtaccattgatagtttttgcttaaaggaaataattattccatttcttccaagaatatggggaggcaaaccaacagaatgcaaggtactaaaaaaactagagtctccttataaatattacttagaggaagaatttttcggcacaccatcagtcgttaatataaatgaagattccggctataagaggctgtacgatgagggaattctgtggatgagttcatttgttgccttagcattaaaaatacttaatgaatctcctgcagcaaagcgatatatcaaagcgagatatagccatatatttatagatgaatatcaagactcatctttatctcagcatcaattgttcctaaaaatgaatgagcttggtttatgctctattgctgttggggatgtttggcaatcaatttatgagtttcgaggtggaaatgctgagttgttacttgacttagttagagataaacatgcttttgcacactttgagataaatttaaatcatagatgtcatccgtcaataattaattatgcttctcgattactagattcaaatttctcattattgccatgtaaaagtatcaatgtttacagaaaaagattgtcagggaatctaaaagatgtttcgatgacattatcatcatggatttcagaatggttaaatgaaggtcaatggagtgtagaacaagctaaccaaatagctattttcacaagaaaagaacaatcattactattgctatgctcaggattgacatcaaattttagagcttatattgatacgccattagataaattgggcacagaatgttcagatttatataaagatcttctagcgtatagatataagtctataga

SEQ ID NO: 78496 - DNA, 1785 bp, Serratia marcescens subsp. marcescens
atgtatttatcaaaactcggaatccgcaactttagaaattttgaggcggctgatattcccctggcaggtaatgttgtgttattgggggaaaatcgtgtcggtaaaagtaatctgcttttcgcaattcgactggttattgatcccactctgcctgattcagccaggcagcttaagctgtcagatttctgggatggctgcgaccttgaatcaaaccctcaaattgaggtgcaccttgaattcgccgatttcgacagtgacccttccctctcagctctgttgaccgattttcgcatcgcagaggatcctaccgtagcaaggttgagctacatttttcgtaaaaaggaagaagtcgatggggctccacgttcgggtgaggactgtgagtttattgtttttggcggaggtcaggaatcgcgagccatacctggacgcgtcaggcggcggatctccattgatatgctggacgcgttacgcgatgcagaagcacaacttgcttcttggcgaaactctccgctacgccccttattggaagatgcattctcttcactgagccgagccgatttggatcgcgtagcaactgagcttcaggcagcaacggaaaccatggagaagttcccatcaattaaggatctcgaagattctcttcgtggtggcattcttgacttggctggaactgctcacgatttagatgcccgcctccgttttgcgcctgctgacccgctcagattgatgcgttctatctctatgttcattgatgatggaaagagaggcattattgaagcgagcctaggttctgcgaacgtggctctgatatcactcaagctagcagagtttgcatggcgacgtgaaaagaatgaacgtaatttctccctgctttgtattgaagaacccgaagcacaccttcacccacagcttcagcgcgctgtttttgacaaactcttcaataatgccgacaaagatcagtctttgattgtaacgagccattctcccacgctggcaaccattgctcctcttcgttctgttgttcgcatttgcagggatcctgaagggcgatcccgagctttttccctagccgatctgccagtaaccagtgaagaactcgacgacattgaacgatatttaacagcaaccagatcggagctgctttttgctaacggggtaatatttgttgaaggcgatgctgaggaggttttacttccaggtttcgcacaggccatggggatcaatctcgaccagctagggatcacggtatgtaacgtagcgggagttaattttgaaccatacgtgaagctggcagccagcctcggactacctttttccgtcgtaaccgactgggacccactggatggtacgaaacaaccgatgggtaaaacccgttcaattggtatctggcaagcatatagtgatgtatcggaaaaactgggaaaactaaccccagaaaatattaattggttcaataacagttcttatgaagtctgtaagcctgtatttgaaaggattggcatttttttaaacgatcagacatttgaagtcgctgtagccaatacgacaggcctcaaagaagcgctgcttgatatcctcgatgaacagggatttggtgtgttacgttcatcaaggattgcttcatggcgtgccggtatagctccagacccgacgcaacttctcgcgatgatatctgacataggtaaaggacggttggctgccaagctgaagcaaaaagcacctgggcttgcgccgccggagtatattgcttcagctattcaatatgtggtgtcgaatgtctga

SEQ ID NO: 78497 - DNA, 1794 bp, Serratia marcescens subsp. marcescens
atgtggtgtcgaatgtctgaccgccgcgcactttcagaggctctgaatgagctattgccgaacagagagcagtacgctgcggccacataccccggccactgcgtagttattgctgggccaggcagcgggaaaaccaaaacacttacgactgccatggcacgtgccctgattgaagaggtcgctgacccccgaggcgtggcctgtattacttacaacaatgaatgcgcttctgaacttgaaggacgtctggcatgctttaaagtcattggcgatgagcggaactttattggcaccgtgcatagctttgcattaaatcaggttttaatcccctactcacgatgtataccgggtttgctgccggatgattttcgtgtggcgaccagagatgaaagtcgcgcggctgttgaagtggcttaccaggctagattcggatctgtcggagatcctcatgcacggtggaaatttgcagaagagaaacgacgccgggatgtgaaccgactcctaccggcttggcggaataacaatccggagctggcagattttattgaaggttatgaggcagaacttcggcgcttaggactgattgactttgatgatatgccactcatcgcttttcgtattattagcgagcatgaatgggtacgtaatgctatccggtcgcgctatcctgttttgtttgtagatgaatatcaggatcttgggcacgctcttcatgagctggttctgctgctgtgctttaacggtggaatacgattatttgcggtcggtgatgcagatcagtccatttacggatttaatggtgcaaatccagggctactggatagtcttgtttcacgggcagatgtaagaccgttccgtcttcgcttcaactatcgatctggcgcgaaaattatcagggcatcactaggggcgctgggagaagaccgcgattatgttggccccgatggtaatccagagggagagttaggattccatggaattaatggcgattatgacgcacaggcgcattttatcgctcatgatctaattccttcgttgtttgaaagagggtttcatcctgaacgcatcggggttctttaccgggcagcctggcttggcgataaagttgcggatgagttcaaggccagaaatattgccataatacgtgctgacagtaatgctctcattaagcgcaattctcgtcttgcccgtttcatcgaagcctgcagtcagtgggtaactgggggatggaaagaagcctctccactatttaacctcttactgggtcaggcgctctttcttgtttatggccgccgcgcaagccgtgctgaagaacaattactgaccgtacagctcatcacttttttacgaaacggaattgataaagcggaaagtgctcacgagtggctgagacgtttaaatgatgagctcatcaccggctggatggctgtctcacagaacactcagcaggaatgggatgtcatctctgagttactgaaacgaaccgatcccttcaggggactggatgtggctctggatatattcgctgggaaagtagaaggaactggacgcatcacccttagcactcttcatagtgcaaaaggccgagaatttgatgtagccataatgtttggggtaaataaatatgacttcccgagtaagcgagatctaacttcagataatgcccttcgcgaggcccgtcgcctcttttatgtaggcgttactcgtccccgaaaagagctgcatatggtttatgaaaagggtaaacattcaccttggattgccgaactgtatcatcgcagccagcagacatag

SEQ ID NO: 78498 - DNA, 2316 bp, Enterobacter cloacae subsp. cloacae
atgcatttgagaaagctggcagtccgtaatttcagaaggctgcacgatgttgttatcgatcttgcgtcagacatttcaattttcgtaggggcgaataacagtggtaagacttctgtcggtcatgcacttcaactattcaccggtaaaagccgattcaatattcatgacttcaatgctgaatgttggactgacattgtcacatttggagaaggggcggatgctgcgtcgctaccttcactggaacttgatatttggtttgaagtaacaccgaatgatgttcatcgtgtagtcgatcttctccccagcctatcgtggtcaggttctctggttggaatgcgcgttgctttttcccccatcaatcctgaagaaatccgttcgcgcttcctcgcagtacgtcagcttgctattgatgccacacctaaagatgaaaatggaactctcaaatacgatccttcacctcgtaacctttgggaatatcttcgcgatagactcaatgacgaatatgaactccgctattttgttcttgatcccgcacgtttcaatgcggaaatgatatccgaggaaggctatgagcctactccgctcacagggcgtgatcgaagtggtcgcgaaatactgaacagccttatccaaatcaactttttgaatgctcagcgtcatctttcagatggttccggaggttcccgttcggaggatctttctcgtgttctcagccgtttttacggacgaaatcttgaacaaaaaggtgaagattacgaagcattaattgctttagctgcgtctgaatcagctttcaatcagcatcttgaacgtgtttttgcacctacgctgaaaagtctggcgaaactcggataccctggactttcaaacccacgcatgatgattcgttcggccttagacccggcgcagatcatgaacaaccaaaatggggccgtaatacattacgcgctgggggaggatgacggtaatcctaccccaccaacactacccgatagttataacgggcttggatttaagaatctgatctttatggttgttgaattactcgacatccacaaccaatggttagcaatagaagagaatcgaccaccggttcacctgatttttattgaagagccagaagctcatctccacgcacagttacagcaggcttttatacgcaagataatggaccttcttgccatggagagtcaggagcttatgcactacaccactcaagtggtggtgacttctcattcaactcatattctttacgaacgtggttttcggccgatccgttactttcggcggaagcgttcatcaaatatgtcggcaacagatgtgctcaatctctctgttttttatgataatactgatcctgaaattcgagactttcttgagcgttacttgaagctgactcattgtgatttgttttttgccgacggggctgtacttgtagaaggcaatgttgagcggttactgctcccgcaaatgattgctaccgccgcacctagattaaaatcctcttacttaactgtccttgagattggtggtgcttttggttatcgattccaaaaactaattgaatatcttgggcttactacactcattattactgatctggatagtgtgtactgtccccctccggtacaagatgcaacagaagctcgagcagatgagttagatagtcttgcagaaaatccggctgcgaatgatgatggcgaggagcctgacgatgatgaggaagaacaggccaacacagaaacaccaggaaagtcttgtatcgccagtcaccctggagctatgacctctaatcaaacacttcggcaatggttgccgaaatgtgacactgttgccgctttatgggacgcaacggaggaaatgaaaatacaaagccgcacaactgagtgtgacgctttggttcgtgttgcttaccagtgccagacaaatgttacatggaaagaggaaacactggcacttgctggtcgtactttagaggaagcttttgcacttgaaaatctgtcctggtgtcaggatgtaagctgtaagctactcaagctacgcattgccagagctgtaagtatggatctactgcaactggcccagcgcattcacaagcgcgttcaatcaaaaagcttcagtaaaactgattttgctctgaatttacttcttaaaaaaccggatgaatggtctgtcccagcatacattgctgaaggattaaaatggctcgaagctgaaatagccccgccggaactagaagttgcagaaggtcaggaagaggatgttgaggatatgtccgtcgctctggctgaaacagatggtgggagggttgcatga

SEQ ID NO: 78499 - DNA, 1878 bp, Enterobacter cloacae subsp. cloacae
atgaccagtcgcattggtagccctgatacacaggcagatattgatgttcgtacttgtctggatagctcgccaccacgttcatttgtcatggtggctggtgctggttcaggtaaaacaacatctctcattaaagccctggcacatttggctgatacccgtggttctgctttacgtcgtgccgggcaaaaaatatcctgtataacgtatacagaagtagctgttggtgagattgccgctgacgttggtaactcacagctatttcatatttcaaccattcatagctttctttggtcggtcatccgaccttttcatttagatatcgcaaagtgggtcgtagcgcgaatacatgaaaaaatagctgaaaagcaagcccattatgataaacccagaacacaagctaaaacaaaatctcgtcttgaagatgaaattgcctatctctctgctcaacttgagtgcattgatgatgttgataaatttatctacgggacaggaagtaactatgcgaagggtattttagggcacgatgatattcttaaactcgtccctgcttgtgttgaggctcatccacttttgagaaggattgtagccaagcgttttccatttatttttgtcgatgaaagtcaggataccgatcctgatgtgatctctgcgcttcgaactattgctaatgacaatcctgacatttgcataggattttttggtgatccgatgcagaaaatctatatgagcggagctggtgctattccgttaagtgatgggtgggctgaaattacaaaaccagagaatttcagatgtccgacgtctgtacttggtgttatcaattcaattcgagcttctggggatggcctccaacaaattcgtggccgaacaactatcgtagatggtgttgaacagactgtattaggcacagtgaatcttttcatcttgccttcaaatgtggaacgaagtgcctatctcacatctgtcagacgttaccttgcaaatgaaactagcgatgaacaatggctaagtgatactcgcgaaggtgatgttcgtctgcttgttttggtacatcgtatggcagctaatcgactgggattccctaatttattttctgcccttactgataaagcaccgatgagcttgagtgaaggggtgaacgatgggtcagcttggccgcttcgcccatttgtccagcatatccttccaatttttgcggcggctcaggcaaacgatcaatttcagattatgtcgattatgcgtaacgagtgcccaaagctggaaccattacgactgcatggtcaagatatggtggcagttttaaatgaactacaacacggcatcaatagcctgcttgcactgctggaagaaggatcgcaagcaacagttcgggatatattgctacacgttagagactgtgaactgctacgtcttgacgatcgctttgataaccacttaagtgatgaacctgtgaatgatggtaatgatgacttcggaaatgttcagaattatctaagatgcaatgtccatgaactttgggcgtaccgacgctatctttcagaagaatcaccttttgccactcaccatggtgtaaaaggtgcacagtttgagcgcgtattggttgttatcgatgatgaagaggctcgcttcagccaatattcgtatgggaaatattttcaatacattcccctatccgacaatgatctagccaatcttgaagagggcaaagagtcagtactcgaccgtactcgtcgccttttttatgtctgttgctcccgtgcgctgaaagacttggccgttgtcatctttgttccagatgtcgccgtcgctcaagcggcaatcgttgagcaaaatttattccctgcatcggcaattctagggcagcatgatctaagttag

SEQ ID NO: 78500 - DNA, 1785 bp, Serratia marcescens subsp. marcescens; identical to SEQ ID NO: 78496

SEQ ID NO: 78501 - DNA, 1794 bp, Serratia marcescens subsp. marcescens; identical to SEQ ID NO: 78497

SEQ ID NO: 78502 - DNA, 2370 bp, Burkholderia pseudomallei
atggacattcccgaggtttctgctcattcctccgctacggacccggcgtcgagttccgccccaagtgcaccggcagtgccacccgccgaaacagtcgcgcttccgggcgattccccgatccgacttgcttgcgtcgaagtctgcaacttccgacgcttggcaaagacccgccttgagctcgatgatgccaccactatcttggtgggcgctaacaacagcggcaagacctctcttctcacggttcttcgcaacttcctcagcgactcgccaggctttcgcgctttcgacattagcctctcgcagtgggcgaaattgcggcaactgagcgaactctgggaggcgctggacgaggaccccacgaccgaatcaaaggatgcggaaaaatgggagcagcagtatcggcagcttctaggttgcatgccgttcattgatctttggttcgacgctaaggaaggcgcgtacaactatgttgctcccttcattacatcgctgaaatggcgtggcggtgcagttggcgtgcgggtacgactcgaacctgtggcagactcagatgagttgcggaagctggcttggcgctaccgagaagcgcgttctcccgtccggacgcttccgaaggatggccacgcgtggcctatggatctgcttgattactggttgaggtactccgcggacctgcgccgcattgctgtttaccgcctcgaccctgcgaaggggcccttggcaacggagcagtgcaatgaactacaagaactgccacctgattcgcagccggtcgaactgcaactcctgcgcaagctcgtacgtgtggattttgtgccggctcaacgggggcttggtgcggaagacgacgagacgagatccgagtcggcgggcacgcgtcccgggctgttctcaagccagcttctgaaatttgcccggcaacacctgaacgtcgctccatccggccatggcaatcgcgaggatctggttgcagctattgcaagggctcaagcggaacttgacgattcgatttacaaggcgctccaaccggcgatggaggacgtggaggttctagggtatccgggactgcatgatccgcaacagcttcacttccgtacccgcattcagactgccgaccttctcgcacacagcaccgcggtccagtatcgcctggacgagacggcggtcgacgagtcgttgccggagcattctattgggcttggctatcagaatttgcagtcgctgagcttcatgctcgtgtcattccgagccgcgcgcctcaatcccccgcagggctctccagcggcggttcaccttgtaatggtagaggaacctgaagcccatttgcacgttcaggttcaacgcaacttttcgtcgaatgctcacgaactcatccgcccaaaagagctcgtgcatagcaatcttcgcagccaattgctaatcagtacgcactcaagccatctagcccacggggacagtttcacgcgtctgcgatatgtaaaacggatagcaagtaccggtgcgggcgttaggcccagtagcgaggtcgtcaatctcggcgacgcctttggcgatgacattcaaaccaggacgttcgccgagcgctactttcaggtccaacacacagacctcctcttcgcggacgcagccatttttgtggagggaactgcggagcgcatgctggtgccgcttttcatcgagcgcgactttcccaagcttgccaaaaagtacgtgtcgttccttgatatcgggggcagtcacgcgcaccgcctcaggccgctggtagagcggctggggattccaacggctgttatcaccgacttggaccctgtggtaccgaccacgagcaaaggcgggcgggttgtgcgagcggcggtacatatcgcaggccaagcagacctcgagtgtgggaatgacacacttacgtcgtggcacccgaagctagcggatttccacgcttatgcgaagccaacgtccgcacacttggagtgggtctccgactcgggcgtaaaagtccgcttcgcatggcagcttcccgtcgcggccgcaagcgatcaatggccaagctcgttcgaggatgcactcgtcctgacgaacatcgattggtttaaagcgttggacgaagagaaggattcggtgtccggcaagaagaaggatcaccgaggcactctcgggaaggtgataggtctcgtactcgaccactctgaccataccgagcttcttaaggaactccacgcgatgctgcatgggaacttcagcaagggcgatttcgcggcaacactgtttgaacggttgaacgctgggcaagccttggcatgtcctacatacatcgccgacgcactcgcctggctgagtggtcaacttgaagccacagccggagagaccgagtga

SEQ ID NO: 78503 - DNA, 1731 bp, Burkholderia pseudomallei; identical to SEQ ID NO: 73953

SEQ ID NO: 78504 - DNA, 2064 bp, Yersinia enterocolitica
atgctggttaaaaatgttgagatccaaaatttccggcttttgagagatgtatcccttagattggaagaaaacatcacactagttgttggcaggaataacagtggtaaaacttcaattgctgaattatttcggagacttttatctgataaaggcccttctttcaggcttgaagatttttcgcttggatgccatgagggtttttgggctgcatttgaggcattgcaagcaggaaaattaagtgaggatatttatcatcatttgccgtcaattataattaaacttgacgtggagtatgacgttgactccccggacctagggccaataagtgactgtataatcgatcttaaccctgactgtaactttgtacgaatggttctcacttttgggcctagctccgtagccactgaatcactttttgctgacgttactgtacctcctgagggaatgaatattgagcgcacagctctattccgcgcagttgagatgcgtttaacccagtcgtatgaatgtaagcttgaggctgttgacccaaacgatccaaccaaccgaaaaaaccttgacctaaagacaattaaaattttgattaatggtggatttattaatgctcagcgtggtctggatgatgatactcaccgtgaacgcgatgtactaggaaagattattgaagttctttttcaatcagctttaactgatccgatagatagtaataaacgtacaatcgcggcacagctcaaaatggctgtagagcaaattcagacagagcttcatgttggcttcaatgaaaaactgacctccctattgcccacatttgatttattcggatatcctggcttagctgaccctgggcttgtaactgagaccagctttgatgtcgataaattgctaaataatcacacgaaagtccgctatgtcggtgttaatgggattactctgcctgagacttataatgggctcggaatgcgtaacctcgtttatattttgctccaactcctgcgttttttccgcgaatatcaggcaacaccaaccgctgcgggcgtacatctcatctttattgaggagcctgaagcccatatgcatccacagatgcaagaagtctttattcgccagctgagcaaaataacaaaatctttcgaaacacagctcaatgagaacagaccctggccggttcagtttgtcattagcacccattcgccacatatggcgaatgaagcacgttttgagtcaatgcgatattttcttactcgtgaaggcaatgatggtttccgacagtcggtagtcaaagatctgcgtaaggggatgggggatgcacctgttcctgaacgtgattttttatatcaatatttgactctgactagatgcgacttgttctttgcagataaagccgtcttgattgagggcacttctgaacgactgctattacctgcgatgattcgtaaaactgatgctgcagctccagatgaaccacagcttggtagccagtatctgacagtgatggaagttggaggggcttacgcacaccgattttttgacctcttgtcctttctcgaattacgcacactgataattaccgatattgattcggtgaagcgtaatgcaaacaataaacgcgttgcaacacctgttgcaaatggtgaatttacgagtaacggctgcatcaaagcttggttctccaataatgatattacaccgacacaattattaactcagtctcatgtggataagattgttgatagccgtcgcctcgcatatcaggtacctgaaattgatggtgggccatgtgcgcgcagtttcgaagatgcttttatcttagctaatttcgaaagcttcgcacttggtgacggtgatcgcgcaacacttgcttacgaccatgctgctgaccaaaaaaaatcaacttttgctttgaactatgcaattgaaaataccacctggaatgtgccgcgctatatttcagaaggtttaagatggcttgctgaaggcaatccagtcgtagtgataccacaagttacgccatcagatattgtcgctgctgtagctgggattgaaatgagtggcgagggggcttaa

SEQ ID NO: 78505 - DNA, 1764 bp, Yersinia enterocolitica
atgactactgaaattcatgaaagcccggcagatgcggcgggacgattggcgttagaacgcatgtttgattgccttgaacaagatcgaagttttcgtcttgaagcaggtgcaggtgcaggcaagacattctctttggaaaaagccctccgttggctaattgataaacgtggtagcgagttgatacgtaagcgtcaacaagttggctgtattacctacactaatgttgctaaagacgaaattatctcgcgaattaaatcgcacccagcagtatgcccagagaccgtacatgggttttgctggtcaatcttgaaagattttcaagcaatgttacgtgagtttgttcctcttctccctagctgggctgagcgccttgaacaagtaaatggcatcggtgttcggcgagttcattatgaattgggatatccgagtgttgctgatcatcaagtctcgatccgccatgaagatgtgttagctttgatgattaaagcaatgaatttaccaaaatttcgtactgttttttgtgctcgttacccaattttattaatcgatgaataccaagatactgattctgcgtttattactgcattgaaaaattggtttctggatcgccgtgaagggcctgtcattggcctttttggtgatcattggcagaaaatttatggcgaaggttgtggtttagtcgaacatgcttctcttgtaatcattgataaaaatgccaattttcgatcggttgatcccattgtgcgtgtgttaaatcggatgcgtccggctttacttcagatggttagtgatcctgacgcgcctggcgaggcccgtgtattccatactaaccagtggataggccagcggcgtactgggagaggtggtggtcactggacaggcgatacgactcccgaagcagccaaagcgtactttagctaccttaaatctcatctcatttctgatggttgggacttttcgatcgagaatactaaaattctcatgcttagccacagtgtgctggcccgcgaacaaggttatgcctccattccaactatttacggtcaatacaatgatccatggctcaagaaggaagatccgcatattaagtttttgaccgatcagctcgagcctgcctgctcggcttttaatgatcgccgctatagtgatatgtttgagtcttttgggaccagcatgccccatattcgcaggcatcaagacaaaatcgcgtggactgaatccatgaattctttaattgagctcaggttaagaggatcaattggtgaggttgtggattttatcgcggcacagccacacatgcggctacctcgagcagttgaggaacgtgagcttaagctggaggagatcggtgacgaaccggtagatgaagaatcccgccgcgtaacgcaattgcgcaaattgcgcaatgtttcctataccgaaattattgcactggactgctttattgatggcaacactccattcgcaactaagcatggtgtaaagggcgcggagtttgaaaacgtgctcgtcattgttgggcgtggctggaataaatacaacttcatacaaatgttagaatggattgatgcggggccaccggcagataaggtcgagttttttgagaacaaccgtaatcttttctacgttgcttgctcgcgccccaaaagacgacttgcggttctattcacccaagagctaagtgccaacgctacgcttaagctgacagaatggtttggtagagaaaacattgtggcgcttcccgctaatccagagttgtattag

SEQ ID NO: 78506 - DNA, 2295 bp, Yersinia mollaretii; identical to SEQ ID NO: 77896

SEQ ID NO: 78507 - DNA, 1848 bp, Yersinia mollaretii; identical to SEQ ID NO: 77897

SEQ ID NO: 78508 - DNA, 2400 bp, Yersinia pseudotuberculosis; identical to SEQ ID NO: 76456

SEQ ID NO: 78509 - DNA, 1869 bp, Yersinia pseudotuberculosis; identical to SEQ ID NO: 76457

SEQ ID NO: 78510 - DNA, 2133 bp, Yersinia pseudotuberculosis
atgtatatatccaagctcagcctgctcaactatagaaacttcgccaatacaaagctgttgttcaataaaggcaccaacacgattattggtgaaaacggcgcaggaaaaacaaatctcttcagagccatcaggctcttgcttgatgacaacatgattcgttcggcttaccggctggataaaactgactttcatcgtggcttggggcaatggcagggacactggatcatcatcagcctagagttcgaagagatttctgcagatgaagcagtccaggctttatttctacacggtacggggcttgctgaaaatgttggcaaggccacctataaccttatttttaggccgaagaaggaaatccggctgcgcctttcccaactggatgaaggtgatcatgctggtctggacgctattctcggcctggtaactattgacgactacgaaacaattttcacggggcgcagcgaagcggacttcaatgatgaaaccttctacaggcaagtggtcggtgacttcacgaacgtgagatttaacaaggaaacggagtttcggtgcattggtgccaaaatcccaagtgtgctttctgtttccaaagaaatttcgtttaccttcgttcaggcgttacgggacgttgtagcggagtttcacaacaatagaaccaaccctctgctgatcctgctgaagagcaagagtggtgatattgaccccgtgttgtttaccgctatcaccgataaggtaaaagagctcaacgattcaatcgaggcacttcctgatgtgcagaatgtgcgcaccgatatcagcagcaccatcaaggatgctgcgggcgaggcgtactctccctcctctctgtcgattaaatctgatcttcccgaagaggccgatgagttatttcagtctctcaagctgttcgtcggcgagtccggcgaagatcatgaaggtcccattcaggatttaagcttgggtggcgctaatctgatcttccttactctcaagttgctggagttcaagtaccggaaagccagacagtcaatcgccaactttctgttgatcgaggaaccggaagctcacatccacacacatattcagaaaacgctattcgacaggctcaattacgacgacacacagatcatcttttcgacgcattcgacccacatctctgaaatcagcaatgttcagaatgtaaacattctcggaagggacggggggcggtgtgaagcttatcaacctgcctctgggctacagcctgaagagatcggtaatattcagcgctaccttgatgccgtgcgcagcaacctgctgtttgccaagagtgtcattctagtggaaggcgatgcagaagaaattctgatcccaattttggtcaagaaagtgttaggcatcagcctggatgagcttggcatcagtctcatcaacatccgcagcaccggttttcagaacgtagccgtcctgtttcatgatgaccgtattcgcaagcggtgcagcatcgtcaccgatctggacaaatctattattgacactgaagctgtggaaggtgagagcgaggctagagcgaagcgcaaggcaaaatatcaggcatccgagaaaaaaggcctggcgcgaaaagtgcaactggaagctttttgcaatgataatgactggatagcgccgttcttcgctccccacacttttgaagttgatttcgtaactgccgggaactcccgtaacgtcatagcagtacttcccgacgtttacaccgacgttccaactaccgcaagggctaaggcaagccttaaatccggagatatcacccgctatggccaacgggtactgactatggcggaaaaccaagggaaaggctggtttgccatcttactgggaaagaaaattgatccgcaaacggctattcctcgatacatactcgatgcgattgcttttgcacacccggtcgtaaagaaagaagtctggttcaacgttcttagctatagactgagcttcatcgaaaagaacgatttctttgtagaagcagaggccgtggataacttcaaagcaatgttgcagctgtttaaaaatggctacatcgattttgctggaattaaaaatgagatgttcgcatattttcctgatgatcgtatcaacgatgtacttgaggtcttctag

SEQ ID NO: 78511 - DNA, 1797 bp, Yersinia pseudotuberculosis
atgttcacatgggatgacggggatctgaatcctgagcaagaagcagctatccgcgaacctggcagcgtgtttctcattgcctgccccggtagcggaaaaacgcgtacgctcacctacaagattgcccatgaattgtcgcagttggagtcgaaaaagcagttcatcgtcgcgatcacttatacccatcgcgccgcagacgagatccatgaacgtatcgaaaacctcggcgtcgatacatccagactctggataggcaccatccattcattttgtctcgaatggatattgaagccctatggcatctaccatgaggcgctggatcgcggctttcgtgtcattgacctgcatgagcgagaaaaggtgttggagagcctgtgccaaccctatcagaaacccaaaatcaccttctgggactgcgagtattactttaccgatgagggctatgtaatttcgtgcccacatgactggaaacacgcagggctcgctgaaattctggagcaatacttcgactatctacgggaagctcggcagatcgattttgaactgatcctctactacgcctatcagctgatcgctgcgcagcctcagatcagtgccattctcgggcagctattttccttcatactggtcgatgagtatcaggatacgaagcgcattcaatactccatcatcgcgtccattctaaaagcgggtcagggaacaaaagccttcattgtcggcgacccaaaccaggccatctatgaatcactcggtgggtacccaatcgccttcgaggagtttcagtcgatggctggcatcaagctggaagagctagaactttcccagaactatcgttcttccgaacgtattatcgactacttcgcaaactacaacgtatacgacacgcgtatcgaggtagcatccaacgacaaggcttactccagtctgatttcgttcaatgactcggtaaccaaagacggcctagaagatgagttgatccgactcatccgtttcaatatcgagactattggcattccccctcatgaggtttgcatcctcgcgcctcagtggatgcacctggcaagcatgactcgccgcttggtcgcgagcatgcccgagtatgcgtttgacggtcccggcatggtaccgttcgcgcgagatctggataatttttggtacaagctctcaaggatcgcacttacacaggtgtctccaagcatgtacgtgcgcagactgcgttgggctggcgaggttctcagtgatcttgagggagtaggcgcgaacgtatcgatgctcacgaggcagagcttgttgagagagtgtaatgccatcaccattgatgctacggatgggctggtttatctcaggttcttcttcgataagctattttcgaatctcgcttttgacattcaagcattcacgcagcttcacgagcattacgaggcattcttcgaaagctcgcaggcaaggatcgacagactgaagaaggaaggcacagaaatgatcggagacattgccaccttcaggaaggttttccagagtcgaaccggcatcacgatatcaacgattcacggcatcaaaggggcggagttcgatgctgtcattgcctatgcacttctggagaacatgctgccaaacagaaatgaccagaatgggcaagatagcgcgatgaaacttctgtatgtcattggttctcgtgcacggaaaaacctgcatcttatctctgagcgtgggcgcatcgacaaattcactcgtgcggaataccaagcgactaaaaagctcaatgcatgctgctttgaatacgaccaaataccataa

SEQ ID NO: 78512 - DNA, 2310 bp, Yersinia pseudotuberculosis
atgtcagcagcagacgccactacatcattatctgggcagatatcccttcggtttgttgagctttgccagttccgccgacttggtaaggtccagcttgagattgatcctaagactactattctcgtcggtgctaataatagcggcaaaacatcaattctggcagcgctacgccacttcctcgcagatggctcgtcatttggtgctttcgacatcagtgtttctcaatggccaaaattgcgggaacttggaagagcttgggacgcattagaagaagacccatctacgtctggcgcatccgaaggtgaatgggaagagcaactcggaaccttactttcggcgatgccaacgctagatctatggttcgatgctaaggccggtatgttccactatgtctccccgttcttgtcaaaattcagttggaaggggggtggggtaggtgtccgattgcgtctggaacctgctacgaacattgaggagctgaagcagttggcttggaagtatcacctgacgagaatacctgtgaaggatatgggaaaggattcgcttgcgtggccgattgatcttcttgatttttggctgcgagaaccttctcaactaggccaggttcgggcctataagttagatgccgataataatcctttggacggaataaagacctacgttagccaggtactggatgctgactctagcccaattgatcgtaagcacctgcagaaacttataaaaatagactttgtggctgcacagcgtggccttggtagtgaggaagctgattcccgatctgcttctggcccccatcgcataggtttattctccaaccagcttctcaaatttgctcgacagcacctaaatgtggctgcaacaggtcatgggcaccgagctgacctcataaaagctgttgctgaggcgcagcaggaactagataaaaagatccatgaggctatcggaccttcggtagaagaggttaaagagcttgggtacccaggcttgcatgatccccaagagattcgtttccgaacgcgcatacagacagctgatttactcgaccatggaaccgctgttcaatacagcatgcagaaggattcgttagaagagcttctcccggaatattccattggtctcggttatcagaatttacaatcgcttagttaccaacttgtttctttcaaagctgctcgtctaaatcctgaaaagggcgctccagtacctgttcacctggttatgattgaggagcccgaggctcatttgcacgtccaggtacaacgtatatttcctggtaaggcacataagttaataagccctaacggtagcgatgagttaggacttaaaagccaattgattatcagtactcattctagccatctagcacatgctgagaattttgaccggctacgatatgttcgccgcattgctaagagtgatgaacaaaccatgcctaccactgaggtggtcaatcttgggcaagtttttggtgatgataaaacgactcgtcaattcgctgagcgttattttcgcgttcagcacacagatcttttattcgccaatgctgcaatctttgtcgagggggttgctgagcgtatgctgttgcctcttttcattgaaagagattttgcaatactcaacagccgctatctgtccttccttgatattggtggtagccatgctcatcggctaaggtctctcgttgaaagactccgtattccaactgtaattattactgatatcgatccagtcgaagaaagacctggtaagcctaaaaaaaatggggaaccgactacaaccttggttgcggtagctaatacaggacaatccggcctgcaatgtgggaacccgactctgcgcggatggcaccctaagctgcaacagcttgaggatttcaagaacccaaaagatgagcatcttgtctggaacgaaattgccgaatgttttgtacgtttcgcatggcagttgcctgtagccgaagctgatagccagtggcccagcacttttgaggattcgcttatcctaaggaatattccctggtttaaggagttgatgaatgaaaaggtcgatgaagaaggcaagcaaatcacgccgccgaaaggcgcgctgggctcagtagcaagacaggttgctgaaaatgataatattccagaactgctcgcggctctgcacaaattaatgcatggatcatttaataaaggagactttgcagcaagcatctttgaaatggtcgctgcggaagagccgattgtctgtcctaaatatatcgaggatgcattggaatggctccagacacagcttgagccaagcaaggaggtgatgccatga

SEQ ID NO: 78513 - DNA, 1950 bp, Yersinia pseudotuberculosis
atgactaattcaccaacccttgacggcaatgatcgcgatgcaggggtagtagaagagatttgcggctaccttacagacattccacctcgtaactacttcctttttgcgggggctggttctggtaaaacacgaacattggtggaagttttacgtcgccttactggtctgaccgagcatgagaaggggggacaattggcacggtccctgaagatgtatgggcgttcgattagagttgtgacctacaccaagaatgctgtctctgtaatcaacggacgtcttggagacaataatttagtcagtgtgtctaccatccattcgttttgctgggaattgattaacgggtttaacgatgacatccgtgaggctcttattgcattaaaagaagcgcaacttgctagagacactgcagaggcggaagcaaaaccgagaggtataactccagctaaacaacgcgctctcgacgaaattatagatgaaatcgaaattctgcgagcgacagaagtattcatataccatcccgaccgaaatacatatggtcctggtgctctaccacacaattacgtactggacgcgactgcgtggttgcttcggaataaaccgacacttcaaagcattctcaaagatcgacatccaatcatacttattgatgagtcgcaggacacgatgaaaggtgtactggactccttgatgttacttgccgaaaagcgggagcgagatttgactcttggtttgctgggagatcatcgacaacgaatttatacagatggtcatgcggatcttccaagcattgttcctgaaaactgggcaacgcctgagttacaaatgaatcatcgtagtcagcgacggatagtcacactgattaataaaatctgggaaactgaactggaaggtaggacgcaaccaactaagggttcagcacaacatccccgaacggaaaaagctggtggaacggttcggctcttcttgggggatacatcacgaagtccagaagataaagtgcttagtgaacgctggtgcgctgagcgcatgtttgaaattagtggtttagcagattggaatcaagggcaatatcagttgcttgcgcttgagcataagcttgttgccactcgtggctcgtttcttcatgtttatgaggcaatggttctgttagatcctcatgcagcagcgccatctggcagtggtgataataaggggccttcatctgtacaaacattgcttaatgaacttgcacacttggaagcctgtataagcaatgacgggattgtgaatgagttcatggcaactgaggtttttagacgatatggcaggttagacaatattcctgaagactatgaagcaagagccgcacgtactgacgaaatactcaaggcggtaaatatttttgcggcggcttgcgctaaaccagagtcaacggttgctgatgtgttagcgccagtcttgtgtgcaagcttgttcgaggtagatcatcgccttcaggaggcttatgccgataagtcaccaactcccccagctcctgaacgaggtgaggatgagtcaaaacaaacaagaatgcgccgtggatggtgtgcactgtttgctgctccatggaaacaacttaagtgctatcggaattaccttgctgggatttcagagcttgcaacacatcaggtagttaaaggctctgagttcaagcacgtcatggttgtaatggatgatgagcttgccggagggttcctcattaaatacgacaagatttttggcggtatggagttaagtaaacgggacaaagataatgctgaagctggcaaagagacaaccatcgaccggactttacgtctactgtacgtaacttgcagccgtgcgcaagaatcgctcgccttagtgctttggtcgtccgatccaactgcagcaatggctcgaatcgaggaaagtcagtggtttgaagaaggcgaggtacagatcatcacatag

SEQ ID NO: 78514 - DNA, 2037 bp, Yersinia aleksiciae; identical to SEQ ID NO: 76000

SEQ ID NO: 78515 - DNA, 1680 bp, Yersinia aleksiciae; identical to SEQ ID NO: 76001

SEQ ID NO: 78516 - DNA, 2037 bp, Yersinia rohdei
atgcaacttaaaaaaatttttatttccggttttaaaagcatttcgaatcaacatcctcagaccattaaccttgaacatgaattgaccacatttattggtcataacggaactggaaaaagtacagccatggaggcgcttaataaactgttctctgtggatcaatcactgcgtagtttatcaataaatgacttctataatgcggatgtcgaaaaagatgaaaagaacaaaagtttaattatagaagcttggtttagcttccccaagccaaatgaaggaaaaatttccattccctctttaattgaacatctcactattgataaatctgatggggtcattctttttagggtgcggttagaaggtaaactttcctttgatgcaaacccaattggagatattgacgaagatatctgggtaatcagttcgagtgacgacgtggttgaggagagtagtaaacagaagctatccgccgcagtaagaaatgctatccaagtgagttatgttccagccaaccgagatccttctttgcaattaaagtattcatcgaaagcggttcttgggcgcttactaaaggccattgaatgggctggaggaagtcagaaagtaatagaagagcaagcagctaaactaaacgcattaacaaagagtaatactgcattaaatgagattgctgcggctattaacgctagttgggggctaatctataaagggcgttatttgtcccaagcgtcgcttaacttcccactagctaatatcgatgaaatattgaaactgattcaactccagtttaatcctgatgaagtaggtaatacagttaatgttgaccgcttaagcgatggacaaaaatcattggtttatttttcccttattaaggctatgtttgacatagacaaaaaaactagggatttgatttcttcaggggaatcttctaattttaatcctgagaaaatgagattgccaatttttagcatgatctccttggaggaacctgaaaatcatctttctcctcattatttaggtagaataattaaactggttaaagattatggtcgtaatgaattgtgccaagttattatctcttctcattcatcctccattttaagtcgaatagatcctgagcaaatacgtcatttcagattagatcaagactcaaaaagtacggtggttagcgcattgacgctaccggataaagctgatgagctttctaaattcataaaagaagctgttaaagcatatccagaaatctatttttctaaactggtgatatttggtgagggagatagcgaggagattataatacctaaggtgcttgagttgcattcaacggaaattgacagccattctatctcggttgttcctttagggggacgtcatgtgaatcatttttggcgtttgttgaagtcattgaaagtgccctttattactgtgctagattttgatatcgatagaaatggcggcgggtttggtcgacttaaatatgctattgaccaattagctgagattggtgaaagtagaagtatctatatacataaagatatttctaaaataataccattatgggatagcgaacaagatccaaggaagttcactattaaatgtgatgacggtgcaaaaattaatattgttgatgaattagagaattgtaatgtttacttttcctctcctttagatattgattattcaatgattgaagcttttcctgatatattttgtgtgaaagatgaagcttatggtgaaaggggccctctaaatatcaagaaaaaagaaggtgctgaagaggatcagaaagaactaataaaagctgtattgaaaaagggtaactccggtgttcgttatgagttttctgctgattatctgaaatatttccagtggtatcgctatcgttttttatccaataaaagcaaaccggcatcccatgttagaatgttttctaaaattgaagagatgtataaaccagatgaaataaatgcaaagttgccttcagtgctaattagaatagctgaaaaaacagtaaccatattagaagaggttattgaatga

SEQ ID NO: 78517 - DNA, 1671 bp, Yersinia rohdei
atgatgatgcaatggcaaccttctgagggtattactccgacgccggagctaatggatattatcctgtgtgatcagtctgtttctgtacttgccggtgcgggagcaggtaaaacggaacttctagctcagaaatcgaattacttgttgcaaaccggaaagtgcatgtggcctaaacgcatattatgcctttcttataaaaaagaagcgcaagagaatatcaaagagcgcgtcatgaaaagatgtgggaaaaaaggtgatcgctttgactcatatactttcgacgctttttgtaagagcattgttgaccgttttaaagatattttatctagggataaaagaccactaaatagttatgatttggtatttagcccaaaagagagtaacggcaaggacaagttgtcatttgatctaataaggcagctggctttagagatcttaaaaattagagctgatattgttgatctattttctttaacttattcacatgtttttatcgacgagtttcaagatacacgctctgaccagtacgagttgattaaacttctttttaaagatagaggaactcaattactggccgtaggcgatataaaccagagtatcatgctgtgggccggtgctagaaaaacagtatttgaagactgtgaaaaagagtttaatactaccaaaaaattattggtacaaaattttagggccagtgatgaaatccaggaagtattgagatgttttattcactttgtacaaaatgatgttaatttttcaccaataactcgaagtgtagatagttgcactattcatcattatgacaatgagttttctgaggctgatgatcttgctaataaaatagaaaattttatcgcatctggcattgaagaaaaggagatttgtgtactggctaaacaacagtcagagcaatatacagaaaaacttcgagataaacttacgacaaaaggaattagaaatctcgatatgtcggaattgcaagatgtactaaaagagccattagggagaatattttcctcactttttaaagtttgtacatcacgatcatcttcaggctacaccgaactttgtgatttataccttgccttacatagagttaaccacggcgatgacaaagaagatggtctgattaaatcattgtcggataaaatagcggaaaatagagagaaattaattaactcagccagtccagacttattgatcttatgtattaaagatattataaagttttttggtgtgaacaaaatcatggggcgatggaatcagtataagtccactaattattgggataaactctggaatagccttgagcaacatttacgctacacgataggtgcaacgcagtcttttaacgaagccgcattaatgtttcaagctgaaaactcagtgcaggttatgaatatacataagtgcaaggggttggaatataaggtggttatttttctaggtttagaggatcaggcattctggaactataaaaaggcaaagtttgagaatgactgtgctttctacgtagcattatcaagagcgaaggagaaaatattagtaacaacagcagaaaatagagaacacagaattaataatggatatgataacagaaattctaaatatcaattggttgagcagatttattcatttttgacttcgcattgtaagtttaaatctatatga

SEQ ID NO: 78518 - DNA, 1686 bp, Burkholderia pseudomallei; identical to SEQ ID NO: 72318

SEQ ID NO: 78519 - DNA, 1896 bp, Burkholderia pseudomallei; identical to SEQ ID NO: 71759

SEQ ID NO: 78520 - DNA, 1686 bp, Burkholderia pseudomallei; identical to SEQ ID NO: 72318

SEQ ID NO: 78521 - DNA, 1896 bp, Burkholderia pseudomallei; identical to SEQ ID NO: 71759

SEQ ID NO: 78522 - DNA, 1926 bp, Salmonella enterica; identical to SEQ ID NO: 72180
  subsp. enterica serovar Typhimurium str. DT104

SEQ ID NO: 78523 - DNA, 1662 bp, Salmonella enterica; identical to SEQ ID NO: 72181
  subsp. enterica serovar Typhimurium str. DT104

SEQ ID NO: 78524 - DNA, 1926 bp, Salmonella enterica; identical to SEQ ID NO: 72180
  subsp. enterica serovar Typhimurium str. DT104

SEQ ID NO: 78525 - DNA, 1662 bp, Salmonella enterica; identical to SEQ ID NO: 72181
  subsp. enterica serovar Typhimurium str. DT104

SEQ ID NO: 78526 - DNA, 1926 bp, Salmonella enterica; identical to SEQ ID NO: 72180
  subsp. enterica serovar Typhimurium str. DT104

SEQ ID NO: 78527 - DNA, 1662 bp, Salmonella enterica; identical to SEQ ID NO: 72181
  subsp. enterica serovar Typhimurium str. DT104

SEQ ID NO: 78528 - DNA, 1926 bp, Salmonella enterica; identical to SEQ ID NO: 72180
  subsp. enterica serovar Typhimurium str. DT104

SEQ ID NO: 78529 - DNA, 1662 bp, Salmonella enterica; identical to SEQ ID NO: 72181
  subsp. enterica serovar Typhimurium str. DT104

SEQ ID NO: 78530 - DNA, 1926 bp, Salmonella enterica; identical to SEQ ID NO: 72180
  subsp. enterica serovar Typhimurium str. DT104

SEQ ID NO: 78531 - DNA, 1662 bp, Salmonella enterica; identical to SEQ ID NO: 72181
  subsp. enterica serovar Typhimurium str. DT104

SEQ ID NO: 78532 - DNA, 1926 bp, Salmonella enterica; identical to SEQ ID NO: 72180
  subsp. enterica serovar Typhimurium str. DT104

SEQ ID NO: 78533 - DNA, 1662 bp, Salmonella enterica; identical to SEQ ID NO: 72181
  subsp. enterica serovar Typhimurium str. DT104

SEQ ID NO: 78534 - DNA, 1926 bp, Salmonella enterica; identical to SEQ ID NO: 72180
  subsp. enterica serovar Typhimurium str. DT104

SEQ ID NO: 78535 - DNA, 1662 bp, Salmonella enterica; identical to SEQ ID NO: 72181
  subsp. enterica serovar Typhimurium str. DT104

SEQ ID NO: 78536 - DNA, 1926 bp, Salmonella enterica; identical to SEQ ID NO: 72180
  subsp. enterica serovar Typhimurium str. DT104

SEQ ID NO: 78537 - DNA, 1662 bp, Salmonella enterica; identical to SEQ ID NO: 72181
  subsp. enterica serovar Typhimurium str. DT104

SEQ ID NO: 78538 - DNA, 1686 bp, Burkholderia pseudomallei; identical to SEQ ID NO: 72318

SEQ ID NO: 78539 - DNA, 1896 bp, Burkholderia pseudomallei; identical to SEQ ID NO: 71759

SEQ ID NO: 78540 - DNA, 1824 bp, Burkholderia pseudomallei
atgcgtgtcgcacgactttcaattgaaaacttccgcggcatccaccaggcggaattacatttcacaggccatacgctcctggtcgggggcaacaatattggaaagagcaccgtctgtgaagcgctcgatctcgtgcttggcccggaccgattgaatcgaaacccgcctgttgaagagttcgacttccggaatgcaggatacttggccgcagacggagagaccgtcgctccaatccgcattgaggccattctggtcgacctcaccaacgacattaagacgatgtgcgccaacaatctggagttctggcacaaagcggaaaatcgtctactcggtgaaggtgaaatcggtgcggctgacaatccgaatgtggagttctgccttcgcctcattaccctggcccgttacgacgtcgaagaagatcaatttgtcgctaggacgatctacggtcggagcgacgaggagagcgaagatgagcgcaaagccatcccagtccgtgtaaaacgtgcgattggtttcttgtacttgcgcacggtccgcaccggctctcgcgcccttagcctggagcgcggcacgttgctggacaacattttgcgcatgaaagaggcgcgcaagggaatgtgggagcgaattcgtcgacgcttgtctaccctcgccccgccagtcgatgcagacgcgaccgagttggggcctattctcgatgagatcgaggctcgacttgcggaatatatcgccccgggcggcgaagggcgttcgacacgattgtttgtatcgcaactgacccgggaacatctccgaaaaacgatcgcgttcttcctgacgatgggacaaggcgaagaagcggtccctttccaacaagcaggtagtggaacgttgaacacgttggtactcgctctcctgacgttcatcgctgacatcaaaaaagacaacgtgatcttcgccatggaagagcccgaaatcgcgttgccgccatatacgcagcgccggattgcaaactacttgcttgaagagacctcgcagtgctttgttacctcacactcgccctacgtcattgagcgcttcgagccagacgggatattgaagctcaatcgagacgaacacggcgtactgagcggcacggccatcaagctgcccgacaacatgaagaccaaaaactaccggcagaattttcgtcgggcaatcgctgaagccatgctgggtaaaggtgtgatcgttggcgaggggatcaccgagcaggacgcgctgctcgtggtcgcccaaaagatggaagacagcaacaacgagctattcccactcgacgttgccggcattagcgtcatcaacgccgacggagacggcaatctcgagaagctcggctcattcttcagggagattggcattccagcctttgcattctttgaccgcaagaatcggacggatgctcaagtttcggctctacagggagcctacgtcattgccaaggaaatcgctcaaaagggcgcagaagccctgatggctgccgaaacgccgctggatcgtcaatggcaataccttgaggcgttacgcgagaacgacagggaaggtcactttggcattcccgctcaacgctccgccgatgacgatgacgatgttcgcaaattgaccgtttcgaccctgaagggacttaaaggcgaaggcggcgcagcgaaactattggagctgtgtactgttgcggagctgccgccaaccatcacggcttttctcagcgacatataccaacgctatcctaaaccgaagcggaagaagatcgaagcacaagagccggcggctgctctcggtgacggccctcaagaggttggcggagtgtaa

SEQ ID NO: 78541 - DNA, 1734 bp, Burkholderia pseudomallei
atgccactggtcatctgtccgcaacgacagagcatccttgacgagggcggccctatcctcgtcacaggcggccccgggagtggcaaaacaacgatcgcattggtcaaggcccagctcgtcattgagcgcggcctttccgctggccagtccgtattgtttctgagcttctcgcgtgcggcggtcgcgcgcgtcatcgaggcgagtaaggtgcagttacccaagccgctgcaaagcaagctgtcggtgcaaaccttccactcgtatttttggcgcatcttgcaggcctatggttatctactaggcgcccctcgatcgctgaagcttctcatgccgcacgacgaagcggcattgcgccacgaatttgagaacaacggcggcaggtgggaggatgagcgtgagcgactcttccgtgacgaaggcaaggtcgccttcgatctctttgcacccaaagcactcgaattgctatcacgcggcgcacgcctacgcgacctgttctccgcctgtcatccgctgatcgtggttgacgaagctcaggacaccgctgaggatcagtggcaatgcattcgattattttctgctggcacgcagctgatgtgtctcgctgacctcgaccagcagatatatgactttcgacccggcgtcagcgcagagcgtgtaacacacatcatggcgactctgcgcccgctacgcgtggatctcgcgggacaaaatcaccgcagtgcaaactcggaaatagtcgctttcggcaacgacatcttgctgaatacgccacgaggaggtatgtaccgtggtgtctcgcgcatgaactaccgtgccaatcgggatctccgagatcgcgcgattcgtcaagctattggcatcgttattcaacgtgctcgggccgcgacaaacgagaacatcgaaagtattgctgtactggcgacgtggaaccgcggcgtcagcgtcatttcccgtgcgctgaccggcaacggcgcgaacaccatcccgcaccgggtcatgatcgacgaagcgtctgtactgcaatccagtcgcctgatagcttttctcctggaaccacgacgcccggcaaatgacgagctatccgatttggccgacgggctggaactagccgccacggtttttcgggcacgtggcggaaatggcaatcttgaaacagctcaacgactggcagcgagtgcgcagcaatgtcgtgcgggacgtgcgccgcgtgccaatggcgtcgcttcgaggctcctgggcgtactgcgtacgctacgcggccaccttttttcaggtgccccaaagcgtgactggattgacgcacgccgatttctacatgactctggcgctaatcctttgcgcgctattgcggaagatgcggaacagctcgtgaccttccagcgcggccgtcgaatcgaggacagcctcgctgagctttggcaatcgcaaggaacctaccggaatgcacgcgccgcactcgatgcggctttggccgaagaccagcttctgtcaggcggtaacgatttgcgcggcatccatgtgatgactatccataaatctaaaggcaaggagttcgacgccgtgatcgtttttgacgatcccaacagcagtcctctcctgttctgcgccgagagcccgccataccctcgttgtcggaaattactgcgtgtcggaataacacgagcccgtcatcatgtacttatgctttgcgatcttttcacgccgtccggtctgctacagggccatcaactctga

SEQ ID NO: 78542 - DNA, 1686 bp, Burkholderia pseudomallei; identical to SEQ ID NO: 72318

SEQ ID NO: 78543 - DNA, 1896 bp, Burkholderia pseudomallei; identical to SEQ ID NO: 71759

SEQ ID NO: 78544 - DNA, 1764 bp, Burkholderia pseudomallei
ttgacaggacatctcaatacgctcctggtcgggggcaacaatattggaaagagcaccgtctgtgaagcgctcgatctcgtgcttggcccggaccgattgaatcgaaacccgcctgttgaagagttcgacttccggaatgcaggatacttggccgcagacggagagaccgtcgctccaatccgcattgaggccattctggtcgacctcaccaacgacattaagacgatgtgcgccaacaatctggagttctggcacaaagcggaaaatcgtctactcggtgaaggtgaaatcggtgcggctgacaatccgaatgtggagttctgccttcgcctcattaccctggcccgttacgacgtcgaagaagatcaatttgtcgctaggacgatctacggtcggagcgacgaggagagcgaagatgagcgcaaagccatcccagtccgtgtaaaacgtgcgatcggtttcttgtacttgcgcacggtccgcaccggctctcgcgcccttagcctggagcgcggcacgttgctggacaacattttgcgcatgaaagaggcgcgcaagggaatgtgggagcgaattcgtcgacgcttgtctaccctcgccccgccagtcgatgcagacgcgaccgagttggggcctattctcgatgagatcgaggctcgacttgcggaatatatcgccccgggcggcgaagggcgttcgacacgattgtttgtatcgcaactgacccgggaacatctccgaaaaacgatcgcgttcttcctgacgatgggacaaggcgaagaagcggtccctttccaacaagcaggtagtggaacgttgaacacgttggtactcgctctcctgacgttcatcgctgacatcaaaaaagacaacgtgatcttcgccatggaagagcccgaaatcgcgttgccgccatatacgcagcgccggattgcaaactacttgcttgaagagacctcgcagtgctttgttacctcacactcgccctacgtcattgagcgcttcgagccagacgggatattgaagctcaatcgagacgaacacggcgtactgagcggcacggccatcaagctgcccgacaacatgaagaccaaaaactaccggcagaattttcgtcgggcaatcgctgaagccatgctgggtaaaggtgtgatcgttggcgaggggatcaccgagcaggacgcgctgctcgtggtcgcccaaaagatggaagacagcaacaacgagctattcccactcgacgttgccggcattagcgtcatcaacgccgacggagacggcaatctcgagaagctcggctcattcttcagggagattggcattccagcctttgcattctttgaccgcaagaatcggacggatgctcaagtttcggctctacagggagcctacgtcattgccaaggaaatcgctcaaaagggcgcagaagccctgatggctgccgaaacgccgctggatcgtcaatggcaataccttgaggcgttacgcgagaacgacagggaaggtcactttggcattcccgctcaacgctctgccgatgacgatgttcgcaaattgaccgtttcaaccctgaagggacttaaaggcgaaggcggcgcagcgaaactattggagctgtgtactgttgcggagctgccgccaaccatcacggcttttctcagcgacatataccaacgctatcctaaaccgaagcggaagaagatcgaagcacaagagccggcggctgctctcggtgacggccctcaagaggttggcggagcgtaa

SEQ ID NO: 78545 - DNA, 1734 bp, Burkholderia pseudomallei
atgccactggtcatctgtccgcaacgacagagcatccttgacgagggcggccctatcctcgtcacaggcggccccgggagtggcaaaacaacgatcgcattggtcaaggcccagctcgtcattgagcgcggcctttccgctggccagtccgtattgtttctgagcttctcgcgtgcggcggtcgcgcgcgtcatcgaggcgagtaaggtgcagttacccaagccactgcaaagcaagctgtcggtgcaaaccttccactcgtatttttggcgcatcttgcaggcctatggttatctactaggcgcccctcgatcgctgaagcttctcatgccgcacgacgaagcggcattgcgccacgaatttgagaacaacggcggcaggtgggaggatgagcgtgggcgactcttccgtgacgaaggcaaggtcgccttcgatctctttgcacccaaagcactcgaattgctatcacgcggcgcacgcctacgcgacctgttctccgcctgtcatccgctgatcgtggttgacgaagctcaggacaccgctgaggatcagtggcaatgcattcgattattttctgctggcacgcagctgatgtgtctcgctgacctcgaccagcagatatatgactttcgacccggcgtcagcgcagagcgtgtaacacacatcatggcgactctgcgcccgctacgcgtggatctcgcgggacaaaatcaccgcagtgcaaactcggaaatagtcgctttcggcaacgacatcttgctgaatacgccacgaggaggtatgtaccgtggtgtctcgcgcatgaactaccgtgccaatcgggatctccgagatcgcgcgattcgtcaagctattggcatcgttattcaacgtgctcgggccgcgacaaacgagaacatcgaaagtattgctgtactggcgacgtggaaccgcggcgtcaacgtcatttcccgtgcgctgaccggcaacggcgcgaacaccatcccgcaccgagtcatgatcgacgaagcgtctgtactgcaatccagtcgcctgatagcttttctcctggaaccacgacgcccggcaaatgacgagctatccgatttggccgacgggctggaactagccgccacggtttttcgggcacgtggcggaaatggcaatcttgaaacagctcaacgactggcagcgagtgcgcagcaatgtcgtgcgggacgtgcgccgcgtgccaatggcgtcgcttcgaggctcctgggcgtactgcgtacgctacgcggccacctcttttcaggtgccccaaagcgtgactggattgacgcacgccgatttctacatgactctggcgctaatcctttgcgcgctattgcggaagatgcggaacagctcgtgaccttccagcgcggccgtcgaatcgaggacagcctcgctgagctttggcaatcgcaaggaacctaccggaatgcacgcgccgcactcgatgcggctttggccgaagaccagcttctgtcaggcggtaacgatttgcgcggcatccatgtgatgactatccataaatctaaaggcaaggagttcgacgccgtgatcgtttttgacgatcccaacagcagtcctctcctgttctgcgccgagagcccgccataccctcgttgtcggaaattactgcgtgtcggaataacacgagcccgtcatcatgtacttatgctttgcgatcttttcacgccgtccggtctgctacagggccatcaactctga

SEQ ID NO: 78546 - DNA, 1686 bp, Burkholderia pseudomallei; identical to SEQ ID NO: 72318

SEQ ID NO: 78547 - DNA, 1896 bp, Burkholderia pseudomallei; identical to SEQ ID NO: 71759

SEQ ID NO: 78548 - DNA, 1896 bp, Burkholderia pseudomallei
atgcacgtcgttcgcgttcgcattcgaaacttcaggggcatcgctgcgggcgacgtccacctgcacggtcatactgtcttcgttggcgacaataataccggcaagtcgacgctgctggaggccatcgacttagtgcttgggccggagcgcctcaatcggcgtcccgtcgtggacgagcatgacttctacgctggagtgtacgtgagtctcccgaagagggaggtgatcccgatccaggtggaagtggttgtcgcggggctttccgaagagcagcagcgccattttcgcgaccacgtggaatggtggaacacggcgaccaaggcaatgttggccggcccaccgactgccggcacggacgccgagcaggtcgtcacggctttgcgggtcttctttaatggttggtacgacgtcgacgaggacgacttcaccggtgacacgtactacgccatccctgaggcgcccggcggtgacttcgtgcgcttcacgactggagacaagcgcaaatgcggcttcctctatctgcgtaccctacggaccggcgcacgtgcgttaagtcttgagcgtggctccctactcgacgtgatcctgcgcctgagggaaacccgtctgaagatgtgggaggaccttctcagtcagttgcgggcattgccagtcggcgaggccgaggagattggagagctcttggcctccgtgcaggaggccgtgcgccactatgtgccttccgattgggccgaagaaccgcacatgcgggtgtcggacctgacccgcgacatgctgcgacggacgttgactgtgttcatggggaccggggcaaagcgacctgacggctcgacctacgctgcgccatatcagcatcaaggcacaggaactattaacaccctcgtattggccctgctgtcgattattgctgaactgaagcagagcgtgatctttgcgatggaggagccggagatcgcgctgcctccgcacacgcaaaagcgcatcatcaactcgttgcggcagagatccgcccaggcgatcttcacctctcactcgccatacgtgctggaggaattcgaaccagatcagatcctcgtcctaaagcgcgtaatgggcgtcatgacggggacgccggcgacctacccgccatcggtcaagccgaaagcctatcgcaccgagtttcgcacgcgcttttgcgaggcgttgttggcaaggtatgtgctggtcgtcgaggggcgcacggagtttgacgcattacctgcggcggcccggcggctgagcactcttgatgctatgcgattcaagtccttggagaatcttggtgttgccatcgtcgacgctcaaggagagtcgaatgtcgctccgctgggtgcgttctttcgctcgctgggtaagaccgtcttcgcggtcttcgacaagcagacccctgatgcgctgaaggccatcatcgactcggtcgatcatgcgtttgaatcggcgaccacgggctttgagaatcttgtactgaccggcacctcggaagcggcgctgcgggcctacgccgcggctgcagtcgcatccggtggttggccgcagcatctggcggccaagacgccgacacctgagagttcaatgggggatctgcaaagtgccttgagttcgttcttcggatgggcaaagggtggcggggatgccggcgatctcttggcatcctgtgctgatcctggcgacgtgccggcgtacgtcaggaatacgctggagagcatcaagaacgtcattgagccaccactgtccgttgccactgcggctgatagggacggtgacgccgctggtgacagtgcgggagatgaagcctcggcggatttgtcggcggccgaagaacccacattaggagcctatgcaaaatttctgccgcacccgccgaagcctctagcatga

SEQ ID NO: 78549 - DNA, 1713 bp, Burkholderia pseudomallei
atgaatgccgagtggagcgaccaaaagaagcgctttctcgcatgccgtgaacatgcgctggcgctcggcggaccgggggcaggaaaaacacatatcgcgttgatcaaggcgcgcgacgagatcagatcagggagcctcaagccaggtcagaaggttctgttccttagcttcgcaaggccgacagtggcgcggatcatcgaaaaggcttcggagctcatctccagggaagacttggcatggcttgaggtgagcacgtaccacgggttcgcatggtccattctgcgaagccatgcctatttgctcaatggcaggccagcggtgcatctgctaccgcctccggaagcggcagcgcaccttaccgatatcgacaaaagcggtcacgaagcggagaagcaacggctgtttgcgcaagagggaagactgcactttgatctcttcgctcggctcgtggcggagctgttcgagaagagtggtcgcttggccgcaatctacatggacagctaccctgtcgtgatccttgacgagttccaggacacgaacagcgatgagtgggcgctgattcagcaactggggcggcgcagccggctgatcgcgctggcagaccctgaccagcggatctacgagttccgcggcgcggacccaaggcgcttgcaagagttcctcaaggctttcaaggcggaaagctttgactttgtcggtgagaaccatcgcagcaatggcgcggacataacgacatttggcaacgacctcttgcagggcacgaaccgggggaagacctaccagcaagtgaagatcacacggtatggattcatcaggggcaagagcttgcacttcagcgccaaggctgcggtgtatgcggccctcgagcgcctgaagaacgtgcccaacaagtccatcgcgatcctcgtgccgtctaagcggctgatgctcgatctgtccgactacctctcgtcgaatgcggacaatcttccagcgttgcatcacgacgttgcgatggatgccgagccccccgcattggctgctggtgtgatcgctgctctgctcgaaggcggttcggcaggcgcaatcgcctgccgcgcactgagcgcattgcatacgcatatccgggggcgccggggaagtcggcccacaccgcaagccgatctcgacctcgcctccgccctgaccaatttcctaacaacagggagggtgcgcggtgacaagcgtaagctcattatcagcgagatccagcgcattgccgatgaacgggaaaagctcgtgatgaccggcgaccctgctcgtgactggcttcatctgcgtgacctgctcgaatcgtcgtctgcggccgccctcaaacaggtcgcggccgacgcgcgattcctgcgccttctccagcgtggctctgcgttacggaacaaacttggagccctttggcgcgcgcaaggcagctaccaaggcgcggaggaagcagtgcgcaatgccctcttgcaggagcatttctccgcagcgcagaaggactggcgcggcgtccatctcatgaccatccacaagtcgaagggcaaggagttcgacgaggtgatcatttacgacggcctctatcagcgaatcgccaggaagccagatgacgagaaggtgcgcgcgcaagacatcctcgcgctaagggttggggtcactcgtgccatcaggcgcgcggtcatcttgactccgaagagcgatccttgtccgtttctctga

SEQ ID NO: 78550 - DNA, 1896 bp, Burkholderia pseudomallei; identical to SEQ ID NO: 78548

SEQ ID NO: 78551 - DNA, 1713 bp, Burkholderia pseudomallei; identical to SEQ ID NO: 78549

SEQ ID NO: 78552 - DNA, 2070 bp, Streptococcus pneumoniae; identical to SEQ ID NO: 71978

SEQ ID NO: 78553 - DNA, 1818 bp, Streptococcus pneumoniae; identical to SEQ ID NO: 71979

SEQ ID NO: 78554 - DNA, 2070 bp, Streptococcus pneumoniae; identical to SEQ ID NO: 71978

SEQ ID NO: 78555 - DNA, 1818 bp, Streptococcus pneumoniae
atggtaaagagtgaggagtggtttcctaaaggagatatcattttagaagagactgcattaggagccgtcaaagatgtgactaactgtttagtcattgctggaccaggtgctgggaaaactgaattactagctcaaaagttagactatctattctctacaaataaatgcgtttctccgaaaaaaattctagcattaagtttcaaaacggatgctgcatcaaatttgaaagaaagagttaagaaacgttatggtgatgaatatgcttctcgttttacctcattaacctattcggcttttgaaaagagaattttagaccaatttagagatgttctacctgaggatatacgaccatcaagagattatttgattgaagattggtatactataaaagaactactctctatgaatggaattaatgttaatggatggagaatgtcagatataagaagatatgtcgaaaacatcatacttaacaatggggataatcacaagtttaaaactgacttactaaaaggaacacaagataataagccggtcctcttgtataggcaaataacaaagttgagtactcaaataatagatactaacgaatacatccgtaaagcacttcaaatgacatacgattttgtatttctagatgaatttcaggatactacatatgcccagtatgatttattaaaaacttgttttttaggttcgtcttgtaaattaacagcagttggagatgataagcaagccattatgagatgggcaggtgcaaagcctgatatttttccagactatattcgagactttaatccaaatgaatatcaattgttgatgaatcaccgctctgtacctaagcttgtagaatttcaaaaagaggttcatcagatattaaatagtaatcacagttctattcagacaaataattatccagaatttcaagagggtgaaataacattatttgaatttgaaaatgaaagtttagaagctaagttaattgcaaatgatatagaattaaaaattcaaggaggtatacgaccatcagaaatttgtatcctagcaaaacaaaaggttggtatttatagtttcgaattgatatctatattaaatagcaaagggattaaagcaagaattgaaaatgaatatcaggatattttaaaagctcctacgtgtaacctattattagatttaatatcatgcagtcaaggaaaacgagatcctttaatttgggaaaatattagtaatttttatggaaatatcaatggaatagatgagttaactgatgaattaattttagcaaaatcctataaggagattgacaatatagttagtgatattacttacctaatttcaaattttattcccaatgaagaaagtatgctaaaattaattgattgtattattgaaaaaatagatgaaaaaagaattatttccaatttttcaacatacaatggaaaaagtgacctagatatcattgtcaagaacttttcaaagttattatacatagaatattctcaaacacaaggtgaatggctagatacagtctctagtttcaagggtgaaaactcaattccaattatgactatccataagagtaaaggattagaatatgaggtagtctattttctaggcttggaggattctgcattctggagttttaataatcagccggaagaagataaaagtgcattctttgtcgcactttcaagagcaaaaagtcacttaatattcacatattgtaaattgagaaataatagtccgcaaaataatagaaatattaatgagatatattcattgctgactcaatccaatttagttgatgttattaattaa

SEQ ID NO: 78556 - DNA, 2070 bp, Streptococcus pneumoniae; identical to SEQ ID NO: 76246

SEQ ID NO: 78557 - DNA, 1818 bp, Streptococcus pneumoniae; identical to SEQ ID NO: 71809

SEQ ID NO: 78558 - DNA, 2070 bp, Streptococcus pneumoniae; identical to SEQ ID NO: 71978

SEQ ID NO: 78559 - DNA, 1818 bp, Streptococcus pneumoniae; identical to SEQ ID NO: 71979

SEQ ID NO: 78560 - DNA, 2070 bp, Streptococcus pneumoniae; identical to SEQ ID NO: 71978

SEQ ID NO: 78561 - DNA, 1818 bp, Streptococcus pneumoniae; identical to SEQ ID NO: 71979

SEQ ID NO: 78562 - DNA, 1938 bp, Streptococcus pneumoniae; identical to SEQ ID NO: 72598

SEQ ID NO: 78563 - DNA, 1818 bp, Streptococcus pneumoniae; identical to SEQ ID NO: 72387

SEQ ID NO: 78564 - DNA, 2070 bp, Streptococcus pneumoniae; identical to SEQ ID NO: 71808

SEQ ID NO: 78565 - DNA, 1818 bp, Streptococcus pneumoniae; identical to SEQ ID NO: 71809

SEQ ID NO: 78566 - DNA, 2070 bp, Streptococcus pneumoniae; identical to SEQ ID NO: 71978

SEQ ID NO: 78567 - DNA, 1818 bp, Streptococcus pneumoniae; identical to SEQ ID NO: 71979

SEQ ID NO: 78568 - DNA, 2070 bp, Streptococcus pneumoniae; identical to SEQ ID NO: 71978

SEQ ID NO: 78569 - DNA, 1818 bp, Streptococcus pneumoniae; identical to SEQ ID NO: 71979

SEQ ID NO: 78570 - DNA, 2070 bp, Streptococcus pneumoniae; identical to SEQ ID NO: 71978

SEQ ID NO: 78571 - DNA, 1818 bp, Streptococcus pneumoniae; identical to SEQ ID NO: 71979

SEQ ID NO: 78572 - DNA, 2070 bp, Streptococcus pneumoniae; identical to SEQ ID NO: 71808

SEQ ID NO: 78573 - DNA, 1818 bp, Streptococcus pneumoniae; identical to SEQ ID NO: 71809

SEQ ID NO: 78574 - DNA, 1596 bp, Streptococcus pneumoniae; identical to SEQ ID NO: 76840

SEQ ID NO: 78575 - DNA, 1818 bp, Streptococcus pneumoniae; identical to SEQ ID NO: 71979

SEQ ID NO: 78576 - DNA, 2070 bp, Streptococcus pneumoniae; identical to SEQ ID NO: 71978

SEQ ID NO: 78577 - DNA, 1818 bp, Streptococcus pneumoniae; identical to SEQ ID NO: 71979

SEQ ID NO: 78578 - DNA, 2070 bp, Streptococcus pneumoniae; identical to SEQ ID NO: 71978

SEQ ID NO: 78579 - DNA, 1818 bp, Streptococcus pneumoniae; identical to SEQ ID NO: 71979

SEQ ID NO: 78580 - DNA, 1938 bp, Streptococcus pneumoniae; identical to SEQ ID NO: 72598

SEQ ID NO: 78581 - DNA, 1818 bp, Streptococcus pneumoniae; identical to SEQ ID NO: 72387

SEQ ID NO: 78582 - DNA, 2070 bp, Streptococcus pneumoniae; identical to SEQ ID NO: 71978

SEQ ID NO: 78583 - DNA, 1818 bp, Streptococcus pneumoniae; identical to SEQ ID NO: 71979

SEQ ID NO: 78584 - DNA, 2070 bp, Streptococcus pneumoniae; identical to SEQ ID NO: 71978

SEQ ID NO: 78585 - DNA, 1818 bp, Streptococcus pneumoniae; identical to SEQ ID NO: 71979

SEQ ID NO: 78586 - DNA, 2070 bp, Streptococcus pneumoniae; identical to SEQ ID NO: 76330

SEQ ID NO: 78587 - DNA, 1818 bp, Streptococcus pneumoniae; identical to SEQ ID NO: 71979

SEQ ID NO: 78588 - DNA, 2070 bp, Streptococcus pneumoniae; identical to SEQ ID NO: 71808

SEQ ID NO: 78589 - DNA, 1818 bp, Streptococcus pneumoniae; identical to SEQ ID NO: 71809

SEQ ID NO: 78590 - DNA, 2070 bp, Streptococcus pneumoniae; identical to SEQ ID NO: 71978

SEQ ID NO: 78591 - DNA, 1818 bp, Streptococcus pneumoniae; identical to SEQ ID NO: 71979

SEQ ID NO: 78592 - DNA, 2070 bp, Streptococcus pneumoniae; identical to SEQ ID NO: 71978

SEQ ID NO: 78593 - DNA, 1818 bp, Streptococcus pneumoniae; identical to SEQ ID NO: 71979

SEQ ID NO: 78594 - DNA, 1521 bp, Streptococcus pneumoniae
atgttaagtaggttggtaaatagtataaattggaccgaagatgagataaatgaaattacagataaaattgatgagttgaataacacctttttatctgaaaatggagcattgactcagatcaacaatgagattcagaagtcatgggaattatatcatgaagataaccgtttttctcaagcagagttgattattaattcttctgagatggcggcagcacttagacagattgccttaaaattttcaccaacaaccactgaagaagcatttacagtttcagatctaggagatggactgagatctattttttatttttcacttgttgattcgatacttgatattgagttagaaattaccaaagaccgtgaagaaaatcctgataatccaagatttaagttgattccaccagtactaactatcctagcaatagaagaaccagaaaatcatattgctccacatcacattggaaaactgataaaaaggtttaagcaattaggcaataatgacaactctcaagtaattttaacgtcacattctccagctattgtaaaaagaattgacccagaagatttgaagtatttaagaatagaaaataatgacagagttcttcaaaccattgtttctgatatacagctacctccagctatagatgaatcttataaatatattaaaggagcaattcaagcttatcctgaactatattttgcgaagttagtagttctaggtgaaggcgacagtgaggaactgctattaccaaagttttttgatttacttgggaaagaggtagatagctctcagatttcaattgtccctttagggggcagacatgtcaactatttttggaaattattgaatgctctcagaattcctcatattaccttgttggattttgataatgagagatacggaggtggttggggaagaataaaatacatttctcaacatctgtatgagctgaacacagagtttcaagaatggttccatactcagagacttgattttaatgaaattgggtcacgaggttgtgaatcgataggagctcaacgtctgattaattggtttaataaactcgaagaatttaatgtctacttttcatcgcctttagatattgatttcttgatgctacaacattataaagacaattatctgaatactttatccccaatagaaggaccagttgtttcatataatgattcggatggaagtagtaaaaaagtgaaattgagtgatttagactgtcttgatagattgcagttagaaggtttcaacaaacgtaaagaggaagcaataagagctactttaaaagataagagtggacatggcgatagtttcaatgaagaagaaaaagaattaatgatttggtatcaatatttctttttaggtagaggaaaaccaacaactcatatgcaatttttatcatctattagtgatgatgaattaacaagaaatctaccccctgtatttgaaaaaatagttaacagtgctgaagaattacttggagatattcaacatggtaaagagtga

SEQ ID NO: 78595 - DNA, 1818 bp, Streptococcus pneumoniae; identical to SEQ ID NO: 71979

SEQ ID NO: 78596 - DNA, 2070 bp, Streptococcus pneumoniae; identical to SEQ ID NO: 71978

SEQ ID NO: 78597 - DNA, 1818 bp, Streptococcus pneumoniae; identical to SEQ ID NO: 71979

SEQ ID NO: 78598 - DNA, 2070 bp, Streptococcus pneumoniae; identical to SEQ ID NO: 71978

SEQ ID NO: 78599 - DNA, 1818 bp, Streptococcus pneumoniae; identical to SEQ ID NO: 71979

SEQ ID NO: 78600 - DNA, 2070 bp, Streptococcus pneumoniae; identical to SEQ ID NO: 71978

SEQ ID NO: 78601 - DNA, 1818 bp, Streptococcus pneumoniae; identical to SEQ ID NO: 71979

SEQ ID NO: 78602 - DNA, 2070 bp, Streptococcus pneumoniae; identical to SEQ ID NO: 71978

SEQ ID NO: 78603 - DNA, 1818 bp, Streptococcus pneumoniae; identical to SEQ ID NO: 71979

SEQ ID NO: 78604 - DNA, 2070 bp, Streptococcus pneumoniae; identical to SEQ ID NO: 71978

SEQ ID NO: 78605 - DNA, 1818 bp, Streptococcus pneumoniae; identical to SEQ ID NO: 71979

SEQ ID NO: 78606 - DNA, 2070 bp, Streptococcus pneumoniae; identical to SEQ ID NO: 71978

SEQ ID NO: 78607 - DNA, 1818 bp, Streptococcus pneumoniae; identical to SEQ ID NO: 71979

SEQ ID NO: 78608 - DNA, 2070 bp, Streptococcus pneumoniae; identical to SEQ ID NO: 71978

SEQ ID NO: 78609 - DNA, 1818 bp, Streptococcus pneumoniae; identical to SEQ ID NO: 71979

SEQ ID NO: 78610 - DNA, 2070 bp, Streptococcus pneumoniae; identical to SEQ ID NO: 71978

SEQ ID NO: 78611 - DNA, 1818 bp, Streptococcus pneumoniae; identical to SEQ ID NO: 71979

SEQ ID NO: 78612 - DNA, 2070 bp, Streptococcus pneumoniae; identical to SEQ ID NO: 71978

SEQ ID NO: 78613 - DNA, 1818 bp, Streptococcus pneumoniae; identical to SEQ ID NO: 71979

SEQ ID NO: 78614 - DNA, 2070 bp, Streptococcus pneumoniae; identical to SEQ ID NO: 71978

SEQ ID NO: 78615 - DNA, 1818 bp, Streptococcus pneumoniae; identical to SEQ ID NO: 71979

SEQ ID NO: 78616 - DNA, 2070 bp, Streptococcus pneumoniae; identical to SEQ ID NO: 71978

SEQ ID NO: 78617 - DNA, 1818 bp, Streptococcus pneumoniae; identical to SEQ ID NO: 71979

SEQ ID NO: 78618 - DNA, 2070 bp, Streptococcus pneumoniae; identical to SEQ ID NO: 71978

SEQ ID NO: 78619 - DNA, 1818 bp, Streptococcus pneumoniae; identical to SEQ ID NO: 71979

SEQ ID NO: 78620 - DNA, 2070 bp, Streptococcus pneumoniae; identical to SEQ ID NO: 71978

SEQ ID NO: 78621 - DNA, 1818 bp, Streptococcus pneumoniae; identical to SEQ ID NO: 71979

SEQ ID NO: 78622 - DNA, 2070 bp, Streptococcus pneumoniae; identical to SEQ ID NO: 71978

SEQ ID NO: 78623 - DNA, 1818 bp, Streptococcus pneumoniae; identical to SEQ ID NO: 71979

SEQ ID NO: 78624 - DNA, 2070 bp, Streptococcus pneumoniae; identical to SEQ ID NO: 71978

SEQ ID NO: 78625 - DNA, 1818 bp, Streptococcus pneumoniae; identical to SEQ ID NO: 71979

SEQ ID NO: 78626 - DNA, 2070 bp, Streptococcus pneumoniae
atgaagttaacaaaagtaattattaataattttagatcattcggtgaaagtcaaattattgaattaaacaatcaaactgtactgattgggaataatagttcgggaaaaacaactgtattacaagcattgagtaagctgttttcggacaaacaaaatgatagaataataaaaaaaagtgattttcaccttccaaaaggttcaaggcccggagaaaatactagaaacctctttatagaaactatttttgagtttgatgaacttgatggaactccctatagtcaagcaattccatcgtttttcgaacactttacagtttctaaagatggtgccaaaccatttctacgaatcaggttagaatcttcttgggaagatgatggaacagttgaaggaagtattgatactcaattctattatatttcatctgatgaagatactattagagatgaagacaaacatcgtgctcctagaaaggatttggataaaattagggtactttatgtacctgcttcaagaacgcctgagaaggagttgggtaatgcttcaggtagtatgttaagtaggttggtaaatagtataaattggaccgaagatgagataaatgaaattacagataaaattgatgagttgaataacacctttttatctgaaaatggagcattgactcagatcaacaatgagattcagaagtcatgggaattatatcatgaagataaccgtttttctcaagcagagttgattattaattcttctgagatggcggcagcacttagacagattgccttaaaattttcaccaacaaccactgaagaagcatttacagtttcagatctaggagatggactgagatctattttttatttttcacttgttgattcgatacttgatattgagttagaaattaccaaagaccgtgaagaaaatcctgataatccaagatttaagttgattccaccagtactaactatcctagcaatagaagaaccagcaaatcatattgctccacatcacattggaaaactgataaaaaggtttaagcaattaggcaataatgacaactctcaagtaattttaacgtcacattctccagctattgtaaaaagaattgacccagaagatttgaagtatttaagaatagaaaataatgacagagttcttcaaaccattgtttctgatatacagctacctccagctatagatgaatcttataaatatattaaaggagcaattcaagcttatcctgaactatattttgcgaagttagtagttctaggtgaaggcgacagtgaggaactgctattaccaaagttttttgatttacttgggaaagaggtagatagctctcagatttcaattgtccctttagggggcagacatgtcaactatttttggaaattattgaatgctctcagaattcctcatattaccttgttggattttgataatgagagatacggaggtggttggggaagaataaaatacatttctcaacatctgtatgagctgaacacagagtttcaagaatggttccatactcagagacttgattttaatgaaattgggtcacgaggttgtgaatcgataggagctcaacgtctgattaattggtttaataaactcgaagaatttaatgtctacttttcatcgcctttagatattgatttcttgatgctacaacattataaagacaattatctgaatactttatccccaatagaaggaccagttgtttcatataatgattcggatggaagtagtaaaaaagtgaaattgagtgatttagactgtcttgatagattgcagttagaaggtttcaacaaacgtaaagaggaagcaataagagctactttaaaagataagagtggacatggcgatagtttcaatgaagaagaaaaagaattaatgatttggtatcaatatttctttttaggtagaggaaaaccaacaactcatatgcaatttttatcatctattagtgatgatgaattaacaagaaatctaccccctgtatttgaaaaaatagttaacagtgctgaagaattacttggagatattcaacatggtaaagagtga

SEQ ID NO: 78627 - DNA, 1818 bp, Streptococcus pneumoniae
atggtaaagagtgaggagtggtttcctaaaggagatatcattttagaagagactgcattaggagccgtcaaagatgtgactaactgtttagtcattgctggaccaggtgctgggaaaactgaattactagctcaaaagttagactatctattctctacaaataaatgcgtttctccgaaaaaaattctagcattaagtttcaaaacggatgctgcatcaaatttgaaagaaagagttaagaaacgttatggtgatgaatatgcttctcgttttacctcattaacctattcggcttttgaaaagagaattttagaccaatttagagatgttctacctgaggatatacgaccatcaagagattatttgattgaagattggtatactataaaagaactactctctatgaatggaattaatgttaatggatggagaatgtcagatataagaagatatgtcgaaaacatcatacttaacaatggggataatcacaagtttaaaactgacttactaaaaggaacacaagataataagccggtcctcttgtataggcaaataacaaagttgagtactcaaataatagatactaacgaatacatccgtaaagcacttcaaatgacatacgattttgtatttctagatgaatttcaggatactacatatgcccagtatgatttattaaaaacttgttttttaggttcgtcttgtaaattaacagcagttggagatgataagcaagccattatgagatgggcaggtgcaaagcctgatatttttccagactatattcgagactttaatccaaatgaatatcaattgttgatgaatcaccgctctgtacctaagcttgtagaatttcaaaaagaggttcatcagatattaaatagtaatcacagttctattcagacaaataattatccagaatttcaagagggtgaaataacattatttgaatttgaaaatgaaagtttagaagctaagttaattgcaaatgatatagaattaaaaattcaaggaggtatacgaccatcagaaatttgtatcctagcaaaacaaaaggttggtatttatagtttcgaattgatatctatattaaatagcaaagggattaaagcaagaattgaaaatgaatatcaggatattttaaaagatcctacgtgtaacctattattagatttaatatcatgcagtcaaggaaaacgagatcctttaatttgggaaaatattagtaatttttatggaaatatcaatggaatagatgagttaactgatgaattaattttagcaaaatcctataaggagattgacaatatagttagtgatattacttacctaatttcaaattttattcccaatgaagaaagtatgctaaaattaattgattgtattattgaaaaaatagatgaaaaaagaattatttccaatttttcaacatacaatggaaaaagtgacctagatatcattgtcaagaacttttcaaagttattatacatagaatattctcaaacacaaggtgcatggatagatataatatctaatttcaaaggtgaaaactcaatttcaatcatgactatacacaaaagtaaaggattagaatatgaggtagtctattttctaggcttggaggattctgcattctggagttttaataatcagccggaagaagataaaagtgcattctttgtcgcactttcaagagcaaaaagtcacttaatattcacatattgtaaattgagaaataatagtccgcaaaataatagaaatattaatgagatatattcattgctgactcaatccaatttagttgatgttattaattaa

SEQ ID NO: 78628 - DNA, 2070 bp, Streptococcus pneumoniae; identical to SEQ ID NO: 71978

SEQ ID NO: 78629 - DNA, 1818 bp, Streptococcus pneumoniae; identical to SEQ ID NO: 78627

SEQ ID NO: 78630 - DNA, 2070 bp, Streptococcus pneumoniae; identical to SEQ ID NO: 71978

SEQ ID NO: 78631 - DNA, 1818 bp, Streptococcus pneumoniae; identical to SEQ ID NO: 71979

SEQ ID NO: 78632 - DNA, 2070 bp, Streptococcus pneumoniae; identical to SEQ ID NO: 71978

SEQ ID NO: 78633 - DNA, 1818 bp, Streptococcus pneumoniae; identical to SEQ ID NO: 78627

SEQ ID NO: 78634 - DNA, 2070 bp, Streptococcus pneumoniae; identical to SEQ ID NO: 71978

SEQ ID NO: 78635 - DNA, 1818 bp, Streptococcus pneumoniae; identical to SEQ ID NO: 78627

SEQ ID NO: 78636 - DNA, 2070 bp, Streptococcus pneumoniae; identical to SEQ ID NO: 71978

SEQ ID NO: 78637 - DNA, 1818 bp, Streptococcus pneumoniae; identical to SEQ ID NO: 71979

SEQ ID NO: 78638 - DNA, 2070 bp, Streptococcus pneumoniae; identical to SEQ ID NO: 71978

SEQ ID NO: 78639 - DNA, 1818 bp, Streptococcus pneumoniae; identical to SEQ ID NO: 71979

SEQ ID NO: 78640 - DNA, 2070 bp, Streptococcus pneumoniae; identical to SEQ ID NO: 71978

SEQ ID NO: 78641 - DNA, 1818 bp, Streptococcus pneumoniae; identical to SEQ ID NO: 71979

SEQ ID NO: 78642 - DNA, 2070 bp, Streptococcus pneumoniae; identical to SEQ ID NO: 71978

SEQ ID NO: 78643 - DNA, 1818 bp, Streptococcus pneumoniae; identical to SEQ ID NO: 71979

SEQ ID NO: 78644 - DNA, 2070 bp, Streptococcus pneumoniae; identical to SEQ ID NO: 71978

SEQ ID NO: 78645 - DNA, 1818 bp, Streptococcus pneumoniae; identical to SEQ ID NO: 71979

SEQ ID NO: 78646 - DNA, 2070 bp, Streptococcus pneumoniae; identical to SEQ ID NO: 71978

SEQ ID NO: 78647 - DNA, 1818 bp, Streptococcus pneumoniae; identical to SEQ ID NO: 71979

SEQ ID NO: 78648 - DNA, 2070 bp, Streptococcus pneumoniae; identical to SEQ ID NO: 71978

SEQ ID NO: 78649 - DNA, 1818 bp, Streptococcus pneumoniae; identical to SEQ ID NO: 78627

SEQ ID NO: 78650 - DNA, 2070 bp, Streptococcus pneumoniae; identical to SEQ ID NO: 71978

SEQ ID NO: 78651 - DNA, 1818 bp, Streptococcus pneumoniae; identical to SEQ ID NO: 78627

SEQ ID NO: 78652 - DNA, 2070 bp, Streptococcus pneumoniae; identical to SEQ ID NO: 71978

SEQ ID NO: 78653 - DNA, 1818 bp, Streptococcus pneumoniae; identical to SEQ ID NO: 71979

SEQ ID NO: 78654 - DNA, 2070 bp, Streptococcus pneumoniae; identical to SEQ ID NO: 71978

SEQ ID NO: 78655 - DNA, 1818 bp, Streptococcus pneumoniae; identical to SEQ ID NO: 71979

SEQ ID NO: 78656 - DNA, 2070 bp, Streptococcus pneumoniae; identical to SEQ ID NO: 71808

SEQ ID NO: 78657 - DNA, 1818 bp, Streptococcus pneumoniae; identical to SEQ ID NO: 71809

SEQ ID NO: 78658 - DNA, 2070 bp, Streptococcus pneumoniae; identical to SEQ ID NO: 71808

SEQ ID NO: 78659 - DNA, 1818 bp, Streptococcus pneumoniae; identical to SEQ ID NO: 71809

SEQ ID NO: 78660 - DNA, 2088 bp, Streptococcus pneumoniae; identical to SEQ ID NO: 73976

SEQ ID NO: 78661 - DNA, 1818 bp, Streptococcus pneumoniae; identical to SEQ ID NO: 76075

SEQ ID NO: 78662 - DNA, 2100 bp, Streptococcus pneumoniae; identical to SEQ ID NO: 76158

SEQ ID NO: 78663 - DNA, 1818 bp, Streptococcus pneumoniae; identical to SEQ ID NO: 76159

SEQ ID NO: 78664 - DNA, 2088 bp, Streptococcus pneumoniae; identical to SEQ ID NO: 73976

SEQ ID NO: 78665 - DNA, 1818 bp, Streptococcus pneumoniae; identical to SEQ ID NO: 73977

SEQ ID NO: 78666 - DNA, 2070 bp, Streptococcus pneumoniae; identical to SEQ ID NO: 71808

SEQ ID NO: 78667 - DNA, 1818 bp, Streptococcus pneumoniae; identical to SEQ ID NO: 71809

SEQ ID NO: 78668 - DNA, 2100 bp, Streptococcus pneumoniae; identical to SEQ ID NO: 73328

SEQ ID NO: 78669 - DNA, 1818 bp, Streptococcus pneumoniae; identical to SEQ ID NO: 73329

SEQ ID NO: 78670 - DNA, 2100 bp, Streptococcus pneumoniae; identical to SEQ ID NO: 73328

SEQ ID NO: 78671 - DNA, 1818 bp, Streptococcus pneumoniae; identical to SEQ ID NO: 73329

SEQ ID NO: 78672 - DNA, 2100 bp, Streptococcus pneumoniae; identical to SEQ ID NO: 73328

SEQ ID NO: 78673 - DNA, 1818 bp, Streptococcus pneumoniae; identical to SEQ ID NO: 73329

SEQ ID NO: 78674 - DNA, 1758 bp, Streptococcus pneumoniae
atggaatttaaaaaactagtaattgaaaattttcgtaattttagttctattgaggttgctttatcaaataaaaatgttatatttggaatgaatgattcagggaaaacaaaccttctatttgcaataagatacctcttggacagaactatacgaaataaaggttttattaaatcggattatcatagacatgatactagtagacctataaaaatacaacttgagcttgatttgtctgatagaaaaatggagggggatgaagaatcactaaaatcttcacattctcgtcttctaatttcaacggtagctggagcaagaaataactctagcttagatacattctttatctcattagaagcagtttataatgagaaagagttatttggaaatccggtattaagctggggctcaacactagataatttagtggaagttcctcaatatggtacaagaagtgacattgataaaatattccaaatagtttatgtaaatcccgctatagagttagattccttttttaagcgaaatagaaggatattgttctctgatgattctaaaactgatgaggatgtaaagcttgaggaagagattgagaataacattgaaaaattaaatgaaaatatttctaacttacatttgattactagtgttcaatcacagttgactgaagcctataaaagttatcgtaaagaaaatttagaaattaaaattcaatcagagatatctatttcaggatatttagacaatctcacaccatacattaactggaatgatgatactcacaattatccgacgtcaggagacggtcgtaaaaagcttttatcatatgctattaaccatttaatttcagagaaacaatacaacaagaaggtaattatttatttaattgaggagccagagaatagcttacatcgttccgttcaaatctctctttcaaagcaactttttgttcagaatatttatgaatacttttttctaacgactcattcagcagaagttctttatgaaatggataatactcagctcattaagataaccaatcaacaagatgcaacagggcaatcagtctattacacagttcctaatgaattttcaaacttaaagaaaaaattaaataaatcgttggctcagtcaatcttttatgataggattcttttggtcgaaggtccatcagaatattatctattttctgctatttttgaatatgtaagtcccaatttcgagactgatggaaaatacttattacaagttgatggaataaattttaaaccttattcagagctatataaggcattagggattgatttttggattaaaactgataatgatttaaaagctagtcgtggagataaacatgtattttctcctattggcttaaataggtgtattgacttgcttgatcatagtgcgactcctatattagataattatcgtatagatttctcttcaaaagatgagagaaaacagaatataaagtctaaaaaagaagaattatatttgactaatcataatctagtattacaattaaatgcagatggaatctttatatcggaaattgatttagaaaatgatttagctcaggttttatccgatagcgagagaaatgaaatgagtaaattagattttgtgaattggttacaaagcagtaaacaatacaatatgctagaatatataagtaatcatcttactaaagagattgcgcttaagattgtggaatcaggatattttaaagttttggcggagtttttagactatgagtga

SEQ ID NO: 78675 - DNA, 1539 bp, Streptococcus pneumoniae; identical to SEQ ID NO: 72173

SEQ ID NO: 78676 - DNA, 2088 bp, Streptococcus pneumoniae; identical to SEQ ID NO: 73976

SEQ ID NO: 78677 - DNA, 1818 bp, Streptococcus pneumoniae; identical to SEQ ID NO: 73977

SEQ ID NO: 78678 - DNA, 2088 bp, Streptococcus pneumoniae; identical to SEQ ID NO: 73976

SEQ ID NO: 78679 - DNA, 1818 bp, Streptococcus pneumoniae; identical to SEQ ID NO: 73977

SEQ ID NO: 78680 - DNA, 2070 bp, Streptococcus pneumoniae; identical to SEQ ID NO: 71808

SEQ ID NO: 78681 - DNA, 1818 bp, Streptococcus pneumoniae; identical to SEQ ID NO: 71809

SEQ ID NO: 78682 - DNA, 2088 bp, Streptococcus pneumoniae; identical to SEQ ID NO: 73976

SEQ ID NO: 78683 - DNA, 1818 bp, Streptococcus pneumoniae; identical to SEQ ID NO: 73977

SEQ ID NO: 78684 - DNA, 2088 bp, Streptococcus pneumoniae; identical to SEQ ID NO: 73976

SEQ ID NO: 78685 - DNA, 1818 bp, Streptococcus pneumoniae; identical to SEQ ID NO: 76075

SEQ ID NO: 78686 - DNA, 2088 bp, Streptococcus pneumoniae; identical to SEQ ID NO: 73976

SEQ ID NO: 78687 - DNA, 1818 bp, Streptococcus pneumoniae; identical to SEQ ID NO: 73977

SEQ ID NO: 78688 - DNA, 2100 bp, Streptococcus pneumoniae; identical to SEQ ID NO: 73328

SEQ ID NO: 78689 - DNA, 1818 bp, Streptococcus pneumoniae
atggtaaagagtgaggagtggtttcctaaaggagatatcattttagaagagactgcattaggagccgtcaaagatgtgactaactgtttagtcattgctggaccaggtgcggggaaaactgaattactagctcaaaagttagactatctattctctacaaataaatgcgtttctccgaaaaaaattctagcattaagtttcaaaacggatgctgcatcaaatttgaaagaaagagttaagaaacgttatggtgatgaatatgcttcccgttttacctcattaacctattcggcttttgaaaagagaattctagaccaatttagagatgttctacctgaggatatacgaccatcaagagattatttgattgaagattgggatactataaaagaactactctctatgaatggaattaatgttaatggacggagaatgtcagatataagaaattttgtcgaaaatattatacttaatgacgggaatactcacaaatttaaaaagaatctactaaaaggaacacaagataataagccggtcctcttgtatagtcaaataacaaagttgagtactcaaataatagctactaacgaatacatccgtaaagcacttcaactgacatacgattttgtatttctagatgaatttcaggatactacatatgcccagtatagtttattaaaaacttgttttttaggttcgtcttgtaaattaacagcagttggagatgataagaaagccattatgagatgggcaggtgcaaagcctgatatttttccagactatattcgagactttaattcaaatgaatatcaattgttgatgaatcaccgctctgtacctaaacttgtagaatttcaaaaagaggttcatcagatattaaatagtaatcacagttctattcagacaaataattatccagaatttcaagagggtgaaataacattatttgaatttgaaaatgaaagtttagaagctaagttaattgcaaatgatatagaatcaaaaattcaaggaggtatacgaccatcagaaatttgtatcctagcaaaacaaaaggttggtatttatagtttcgaattgatatctatattaaatggcaaagggattaaagcaagaattgaaaatgaatatcaggatattttaaaagatcctacgtgtaacctattattagatttaatatcatgcagtcaaggaaaacgagatcctttaatttgggaaaatattagtaatttttatggaaatatcaatggaatagatgagttaactgatgaattaattttagcaaaatcctataaggagattgacaatatagttagtgatattacttacctaatttcaaatcctattcccgataaagacaggatgctaaatttaattaattgtattatcgaaaaaataggtgacaaaagaattatttccaactttccaatgtacaatgggaaaaatgacttgcttatcaccatcaataagttttcaaaactattatatgaagagtattctcaatcacaaggtgcatggatagatataatatctaatttcaaaggtgaaaactcaatttcaatcatgactatacacaaaagtaaaggattagaatatgaggcagtttattttttagggctggaggattctgcattctggagttttaatgatcaaccagaagaagataaaagtgcgttctttgttgcactttcaagagcaaaaagtcacttaatattcacatactgtaaattaagaaataatagtccgcaaaataatagaaatattaatgagatatattcattgctgactcaatccaatttagttgatgttattaattaa

SEQ ID NO: 78690 - DNA, 2088 bp, Streptococcus pneumoniae; identical to SEQ ID NO: 73976

SEQ ID NO: 78691 - DNA, 1818 bp, Streptococcus pneumoniae; identical to SEQ ID NO: 73977

SEQ ID NO: 78692 - DNA, 2088 bp, Streptococcus pneumoniae; identical to SEQ ID NO: 73976

SEQ ID NO: 78693 - DNA, 1818 bp, Streptococcus pneumoniae; identical to SEQ ID NO: 73977

SEQ ID NO: 78694 - DNA, 2088 bp, Streptococcus pneumoniae; identical to SEQ ID NO: 73976

SEQ ID NO: 78695 - DNA, 1818 bp, Streptococcus pneumoniae; identical to SEQ ID NO: 76075

SEQ ID NO: 78696 - DNA, 2088 bp, Streptococcus pneumoniae; identical to SEQ ID NO: 73976

SEQ ID NO: 78697 - DNA, 1818 bp, Streptococcus pneumoniae; identical to SEQ ID NO: 76075

SEQ ID NO: 78698 - DNA, 2088 bp, Streptococcus pneumoniae; identical to SEQ ID NO: 73976

SEQ ID NO: 78699 - DNA, 1818 bp, Streptococcus pneumoniae; identical to SEQ ID NO: 76075

SEQ ID NO: 78700 - DNA, 2088 bp, Streptococcus pneumoniae; identical to SEQ ID NO: 73976

SEQ ID NO: 78701 - DNA, 1818 bp, Streptococcus pneumoniae; identical to SEQ ID NO: 73977

SEQ ID NO: 78702 - DNA, 2088 bp, Streptococcus pneumoniae; identical to SEQ ID NO: 73976

SEQ ID NO: 78703 - DNA, 1818 bp, Streptococcus pneumoniae; identical to SEQ ID NO: 73977

SEQ ID NO: 78704 - DNA, 2100 bp, Streptococcus pneumoniae; identical to SEQ ID NO: 73328

SEQ ID NO: 78705 - DNA, 1818 bp, Streptococcus pneumoniae; identical to SEQ ID NO: 73329

SEQ ID NO: 78706 - DNA, 2088 bp, Streptococcus pneumoniae; identical to SEQ ID NO: 73976

SEQ ID NO: 78707 - DNA, 1818 bp, Streptococcus pneumoniae; identical to SEQ ID NO: 76075

SEQ ID NO: 78708 - DNA, 2088 bp, Streptococcus pneumoniae; identical to SEQ ID NO: 73976

SEQ ID NO: 78709 - DNA, 1818 bp, Streptococcus pneumoniae; identical to SEQ ID NO: 76075

SEQ ID NO: 78710 - DNA, 2088 bp, Streptococcus pneumoniae; identical to SEQ ID NO: 73976

SEQ ID NO: 78711 - DNA, 1818 bp, Streptococcus pneumoniae; identical to SEQ ID NO: 76075

SEQ ID NO: 78712 - DNA, 2088 bp, Streptococcus pneumoniae; identical to SEQ ID NO: 73976

SEQ ID NO: 78713 - DNA, 1818 bp, Streptococcus pneumoniae; identical to SEQ ID NO: 73977

SEQ ID NO: 78714 - DNA, 2088 bp, Streptococcus pneumoniae; identical to SEQ ID NO: 73976

SEQ ID NO: 78715 - DNA, 1818 bp, Streptococcus pneumoniae; identical to SEQ ID NO: 73977

SEQ ID NO: 78716 - DNA, 2100 bp, Streptococcus pneumoniae; identical to SEQ ID NO: 73328

SEQ ID NO: 78717 - DNA, 1818 bp, Streptococcus pneumoniae; identical to SEQ ID NO: 73329

SEQ ID NO: 78718 - DNA, 2088 bp, Streptococcus pneumoniae; identical to SEQ ID NO: 73976

SEQ ID NO: 78719 - DNA, 1818 bp, Streptococcus pneumoniae; identical to SEQ ID NO: 73977

SEQ ID NO: 78720 - DNA, 2088 bp, Streptococcus pneumoniae; identical to SEQ ID NO: 73976

SEQ ID NO: 78721 - DNA, 1818 bp, Streptococcus pneumoniae; identical to SEQ ID NO: 73977

SEQ ID NO: 78722 - DNA, 2088 bp, Streptococcus pneumoniae; identical to SEQ ID NO: 73976

SEQ ID NO: 78723 - DNA, 1818 bp, Streptococcus pneumoniae; identical to SEQ ID NO: 76075

SEQ ID NO: 78724 - DNA, 2100 bp, Streptococcus pneumoniae; identical to SEQ ID NO: 73328

SEQ ID NO: 78725 - DNA, 1818 bp, Streptococcus pneumoniae; identical to SEQ ID NO: 73329

SEQ ID NO: 78726 - DNA, 2088 bp, Streptococcus pneumoniae; identical to SEQ ID NO: 73976

SEQ ID NO: 78727 - DNA, 1818 bp, Streptococcus pneumoniae; identical to SEQ ID NO: 76075

SEQ ID NO: 78728 - DNA, 2088 bp, Streptococcus pneumoniae; identical to SEQ ID NO: 73976

SEQ ID NO: 78729 - DNA, 1818 bp, Streptococcus pneumoniae; identical to SEQ ID NO: 76075

SEQ ID NO: 78730 - DNA, 2088 bp, Streptococcus pneumoniae; identical to SEQ ID NO: 73976

SEQ ID NO: 78731 - DNA, 1818 bp, Streptococcus pneumoniae; identical to SEQ ID NO: 73977

SEQ ID NO: 78732 - DNA, 2088 bp, Streptococcus pneumoniae; identical to SEQ ID NO: 73976

SEQ ID NO: 78733 - DNA, 1818 bp, Streptococcus pneumoniae; identical to SEQ ID NO: 73977

SEQ ID NO: 78734 - DNA, 2100 bp, Streptococcus pneumoniae; identical to SEQ ID NO: 73328

SEQ ID NO: 78735 - DNA, 1818 bp, Streptococcus pneumoniae; identical to SEQ ID NO: 73329

SEQ ID NO: 78736 - DNA, 2088 bp, Streptococcus pneumoniae; identical to SEQ ID NO: 73976

SEQ ID NO: 78737 - DNA, 1818 bp, Streptococcus pneumoniae; identical to SEQ ID NO: 76075

SEQ ID NO: 78738 - DNA, 2070 bp, Streptococcus pneumoniae; identical to SEQ ID NO: 76276

SEQ ID NO: 78739 - DNA, 1818 bp, Streptococcus pneumoniae; identical to SEQ ID NO: 76277

SEQ ID NO: 78740 - DNA, 2088 bp, Streptococcus pneumoniae; identical to SEQ ID NO: 73976

SEQ ID NO: 78741 - DNA, 1818 bp, Streptococcus pneumoniae; identical to SEQ ID NO: 76075

SEQ ID NO: 78742 - DNA, 2088 bp, Streptococcus pneumoniae; identical to SEQ ID NO: 73976

SEQ ID NO: 78743 - DNA, 1818 bp, Streptococcus pneumoniae; identical to SEQ ID NO: 76075

SEQ ID NO: 78744 - DNA, 2088 bp, Streptococcus pneumoniae; identical to SEQ ID NO: 73976

SEQ ID NO: 78745 - DNA, 1818 bp, Streptococcus pneumoniae; identical to SEQ ID NO: 73977

SEQ ID NO: 78746 - DNA, 2070 bp, Streptococcus pneumoniae; identical to SEQ ID NO: 76276

SEQ ID NO: 78747 - DNA, 1818 bp, Streptococcus pneumoniae; identical to SEQ ID NO: 76277

SEQ ID NO: 78748 - DNA, 2070 bp, Streptococcus pneumoniae; identical to SEQ ID NO: 71808

SEQ ID NO: 78749 - DNA, 1818 bp, Streptococcus pneumoniae; identical to SEQ ID NO: 71809

SEQ ID NO: 78750 - DNA, 2088 bp, Streptococcus pneumoniae; identical to SEQ ID NO: 73976

SEQ ID NO: 78751 - DNA, 1818 bp, Streptococcus pneumoniae; identical to SEQ ID NO: 76075

SEQ ID NO: 78752 - DNA, 2088 bp, Streptococcus pneumoniae; identical to SEQ ID NO: 73976

SEQ ID NO: 78753 - DNA, 1818 bp, Streptococcus pneumoniae; identical to SEQ ID NO: 73977

SEQ ID NO: 78754 - DNA, 2088 bp, Streptococcus pneumoniae; identical to SEQ ID NO: 73976

SEQ ID NO: 78755 - DNA, 1818 bp, Streptococcus pneumoniae; identical to SEQ ID NO: 73977

SEQ ID NO: 78756 - DNA, 2088 bp, Streptococcus pneumoniae; identical to SEQ ID NO: 73976

SEQ ID NO: 78757 - DNA, 1818 bp, Streptococcus pneumoniae; identical to SEQ ID NO: 73977

SEQ ID NO: 78758 - DNA, 2070 bp, Streptococcus pneumoniae; identical to SEQ ID NO: 71808

SEQ ID NO: 78759 - DNA, 1818 bp, Streptococcus pneumoniae; identical to SEQ ID NO: 71809

SEQ ID NO: 78760 - DNA, 2088 bp, Streptococcus pneumoniae; identical to SEQ ID NO: 73976

SEQ ID NO: 78761 - DNA, 1818 bp, Streptococcus pneumoniae; identical to SEQ ID NO: 76075

SEQ ID NO: 78762 - DNA, 2100 bp, Streptococcus pneumoniae; identical to SEQ ID NO: 73328

SEQ ID NO: 78763 - DNA, 1818 bp, Streptococcus pneumoniae; identical to SEQ ID NO: 73329

SEQ ID NO: 78764 - DNA, 2088 bp, Streptococcus pneumoniae; identical to SEQ ID NO: 73976

SEQ ID NO: 78765 - DNA, 1818 bp, Streptococcus pneumoniae; identical to SEQ ID NO: 76075

SEQ ID NO: 78766 - DNA, 2100 bp, Streptococcus pneumoniae; identical to SEQ ID NO: 73328

SEQ ID NO: 78767 - DNA, 1818 bp, Streptococcus pneumoniae; identical to SEQ ID NO: 73329

SEQ ID NO: 78768 - DNA, 2088 bp, Streptococcus pneumoniae; identical to SEQ ID NO: 73976

SEQ ID NO: 78769 - DNA, 1818 bp, Streptococcus pneumoniae; identical to SEQ ID NO: 73977

SEQ ID NO: 78770 - DNA, 2088 bp, Streptococcus pneumoniae; identical to SEQ ID NO: 73976

SEQ ID NO: 78771 - DNA, 1818 bp, Streptococcus pneumoniae; identical to SEQ ID NO: 73977

SEQ ID NO: 78772 - DNA, 2088 bp, Streptococcus pneumoniae; identical to SEQ ID NO: 73976

SEQ ID NO: 78773 - DNA, 1818 bp, Streptococcus pneumoniae; identical to SEQ ID NO: 76075

SEQ ID NO: 78774 - DNA, 1776 bp, Streptococcus pneumoniae; identical to SEQ ID NO: 76676

SEQ ID NO: 78775 - DNA, 1518 bp, Streptococcus pneumoniae; identical to SEQ ID NO: 76677

SEQ ID NO: 78776 - DNA, 2070 bp, Streptococcus pneumoniae; identical to SEQ ID NO: 71808

SEQ ID NO: 78777 - DNA, 1818 bp, Streptococcus pneumoniae; identical to SEQ ID NO: 71809

SEQ ID NO: 78778 - DNA, 2088 bp, Streptococcus pneumoniae; identical to SEQ ID NO: 73976

SEQ ID NO: 78779 - DNA, 1818 bp, Streptococcus pneumoniae; identical to SEQ ID NO: 73977

SEQ ID NO: 78780 - DNA, 2088 bp, Streptococcus pneumoniae; identical to SEQ ID NO: 73976

SEQ ID NO: 78781 - DNA, 1818 bp, Streptococcus pneumoniae; identical to SEQ ID NO: 73977

SEQ ID NO: 78782 - DNA, 2100 bp, Streptococcus pneumoniae; identical to SEQ ID NO: 73328

SEQ ID NO: 78783 - DNA, 1818 bp, Streptococcus pneumoniae; identical to SEQ ID NO: 73329

SEQ ID NO: 78784 - DNA, 2070 bp, Streptococcus pneumoniae; identical to SEQ ID NO: 71978

SEQ ID NO: 78785 - DNA, 1818 bp, Streptococcus pneumoniae; identical to SEQ ID NO: 71979

SEQ ID NO: 78786 - DNA, 2100 bp, Streptococcus pneumoniae; identical to SEQ ID NO: 73328

SEQ ID NO: 78787 - DNA, 1818 bp, Streptococcus pneumoniae; identical to SEQ ID NO: 73329

SEQ ID NO: 78788 - DNA, 2088 bp, Streptococcus pneumoniae; identical to SEQ ID NO: 73976

SEQ ID NO: 78789 - DNA, 1818 bp, Streptococcus pneumoniae; identical to SEQ ID NO: 76075

SEQ ID NO: 78790 - DNA, 2088 bp, Streptococcus pneumoniae; identical to SEQ ID NO: 73976

SEQ ID NO: 78791 - DNA, 1818 bp, Streptococcus pneumoniae; identical to SEQ ID NO: 76075

SEQ ID NO: 78792 - DNA, 2100 bp, Streptococcus pneumoniae; identical to SEQ ID NO: 73328

SEQ ID NO: 78793 - DNA, 1818 bp, Streptococcus pneumoniae; identical to SEQ ID NO: 73329

SEQ ID NO: 78794 - DNA, 2070 bp, Streptococcus pneumoniae; identical to SEQ ID NO: 71978

SEQ ID NO: 78795 - DNA, 1818 bp, Streptococcus pneumoniae; identical to SEQ ID NO: 71979

SEQ ID NO: 78796 - DNA, 2088 bp, Streptococcus pneumoniae; identical to SEQ ID NO: 73976

SEQ ID NO: 78797 - DNA, 1818 bp, Streptococcus pneumoniae; identical to SEQ ID NO: 73977

SEQ ID NO: 78798 - DNA, 2100 bp, Streptococcus pneumoniae; identical to SEQ ID NO: 76158

SEQ ID NO: 78799 - DNA, 1818 bp, Streptococcus pneumoniae; identical to SEQ ID NO: 76159

SEQ ID NO: 78800 - DNA, 2070 bp, Streptococcus pneumoniae; identical to SEQ ID NO: 71808

SEQ ID NO: 78801 - DNA, 1818 bp, Streptococcus pneumoniae; identical to SEQ ID NO: 71809

SEQ ID NO: 78802 - DNA, 2100 bp, Streptococcus pneumoniae; identical to SEQ ID NO: 73328

SEQ ID NO: 78803 - DNA, 1818 bp, Streptococcus pneumoniae; identical to SEQ ID NO: 73329

SEQ ID NO: 78804 - DNA, 2088 bp, Streptococcus pneumoniae; identical to SEQ ID NO: 73976

SEQ ID NO: 78805 - DNA, 1818 bp, Streptococcus pneumoniae; identical to SEQ ID NO: 76075

SEQ ID NO: 78806 - DNA, 2100 bp, Streptococcus pneumoniae; identical to SEQ ID NO: 73328

SEQ ID NO: 78807 - DNA, 1818 bp, Streptococcus pneumoniae; identical to SEQ ID NO: 73329

SEQ ID NO: 78808 - DNA, 2070 bp, Streptococcus pneumoniae; identical to SEQ ID NO: 71978

SEQ ID NO: 78809 - DNA, 1818 bp, Streptococcus pneumoniae; identical to SEQ ID NO: 71979

SEQ ID NO: 78810 - DNA, 2088 bp, Streptococcus pneumoniae; identical to SEQ ID NO: 73976

SEQ ID NO: 78811 - DNA, 1818 bp, Streptococcus pneumoniae; identical to SEQ ID NO: 73977

SEQ ID NO: 78812 - DNA, 2088 bp, Streptococcus pneumoniae; identical to SEQ ID NO: 73976

SEQ ID NO: 78813 - DNA, 1818 bp, Streptococcus pneumoniae; identical to SEQ ID NO: 73977

SEQ ID NO: 78814 - DNA, 2088 bp, Streptococcus pneumoniae; identical to SEQ ID NO: 73976

SEQ ID NO: 78815 - DNA, 1818 bp, Streptococcus pneumoniae; identical to SEQ ID NO: 76075

SEQ ID NO: 78816 - DNA, 2100 bp, Streptococcus pneumoniae; identical to SEQ ID NO: 73328

SEQ ID NO: 78817 - DNA, 1818 bp, Streptococcus pneumoniae; identical to SEQ ID NO: 73329

SEQ ID NO: 78818 - DNA, 2088 bp, Streptococcus pneumoniae; identical to SEQ ID NO: 73976

SEQ ID NO: 78819 - DNA, 1818 bp, Streptococcus pneumoniae; identical to SEQ ID NO: 76075

SEQ ID NO: 78820 - DNA, 2070 bp, Streptococcus pneumoniae; identical to SEQ ID NO: 71978

SEQ ID NO: 78821 - DNA, 1818 bp, Streptococcus pneumoniae; identical to SEQ ID NO: 71979

SEQ ID NO: 78822 - DNA, 2070 bp, Streptococcus pneumoniae; identical to SEQ ID NO: 71978

SEQ ID NO: 78823 - DNA, 1818 bp, Streptococcus pneumoniae; identical to SEQ ID NO: 71979

SEQ ID NO: 78824 - DNA, 2070 bp, Streptococcus pneumoniae; identical to SEQ ID NO: 76276

SEQ ID NO: 78825 - DNA, 1818 bp, Streptococcus pneumoniae; identical to SEQ ID NO: 76277

SEQ ID NO: 78826 - DNA, 2100 bp, Streptococcus pneumoniae; identical to SEQ ID NO: 73328

SEQ ID NO: 78827 - DNA, 1818 bp, Streptococcus pneumoniae; identical to SEQ ID NO: 73329

SEQ ID NO: 78828 - DNA, 2070 bp, Streptococcus pneumoniae; identical to SEQ ID NO: 76276

SEQ ID NO: 78829 - DNA, 1818 bp, Streptococcus pneumoniae; identical to SEQ ID NO: 76277

SEQ ID NO: 78830 - DNA, 2070 bp, Streptococcus pneumoniae; identical to SEQ ID NO: 71808

SEQ ID NO: 78831 - DNA, 1818 bp, Streptococcus pneumoniae; identical to SEQ ID NO: 71809

SEQ ID NO: 78832 - DNA, 2088 bp, Streptococcus pneumoniae; identical to SEQ ID NO: 73976

SEQ ID NO: 78833 - DNA, 1818 bp, Streptococcus pneumoniae; identical to SEQ ID NO: 76075

SEQ ID NO: 78834 - DNA, 2070 bp, Streptococcus pneumoniae; identical to SEQ ID NO: 71808

SEQ ID NO: 78835 - DNA, 1818 bp, Streptococcus pneumoniae; identical to SEQ ID NO: 71809

SEQ ID NO: 78836 - DNA, 2100 bp, Streptococcus pneumoniae; identical to SEQ ID NO: 73328

SEQ ID NO: 78837 - DNA, 1818 bp, Streptococcus pneumoniae; identical to SEQ ID NO: 73329

SEQ ID NO: 78838 - DNA, 2070 bp, Streptococcus pneumoniae; identical to SEQ ID NO: 71808

SEQ ID NO: 78839 - DNA, 1818 bp, Streptococcus pneumoniae; identical to SEQ ID NO: 71809

SEQ ID NO: 78840 - DNA, 2088 bp, Streptococcus pneumoniae; identical to SEQ ID NO: 73976

SEQ ID NO: 78841 - DNA, 1818 bp, Streptococcus pneumoniae; identical to SEQ ID NO: 76075

SEQ ID NO: 78842 - DNA, 2100 bp, Streptococcus pneumoniae; identical to SEQ ID NO: 73328

SEQ ID NO: 78843 - DNA, 1818 bp, Streptococcus pneumoniae; identical to SEQ ID NO: 73329

SEQ ID NO: 78844 - DNA, 2100 bp, Streptococcus pneumoniae; identical to SEQ ID NO: 73328

SEQ ID NO: 78845 - DNA, 1818 bp, Streptococcus pneumoniae; identical to SEQ ID NO: 73329

SEQ ID NO: 78846 - DNA, 2070 bp, Streptococcus pneumoniae; identical to SEQ ID NO: 71808

SEQ ID NO: 78847 - DNA, 1818 bp, Streptococcus pneumoniae; identical to SEQ ID NO: 71809

SEQ ID NO: 78848 - DNA, 2100 bp, Streptococcus pneumoniae; identical to SEQ ID NO: 73328

SEQ ID NO: 78849 - DNA, 1818 bp, Streptococcus pneumoniae; identical to SEQ ID NO: 73329

SEQ ID NO: 78850 - DNA, 2070 bp, Streptococcus pneumoniae; identical to SEQ ID NO: 71808

SEQ ID NO: 78851 - DNA, 1818 bp, Streptococcus pneumoniae; identical to SEQ ID NO: 71809

SEQ ID NO: 78852 - DNA, 2070 bp, Streptococcus pneumoniae; identical to SEQ ID NO: 71978

SEQ ID NO: 78853 - DNA, 1818 bp, Streptococcus pneumoniae; identical to SEQ ID NO: 71979

SEQ ID NO: 78854 - DNA, 2070 bp, Streptococcus pneumoniae; identical to SEQ ID NO: 71808

SEQ ID NO: 78855 - DNA, 1818 bp, Streptococcus pneumoniae; identical to SEQ ID NO: 71809

SEQ ID NO: 78856 - DNA, 2070 bp, Streptococcus pneumoniae; identical to SEQ ID NO: 71808

SEQ ID NO: 78857 - DNA, 1818 bp, Streptococcus pneumoniae; identical to SEQ ID NO: 71809

SEQ ID NO: 78858 - DNA, 2100 bp, Streptococcus pneumoniae; identical to SEQ ID NO: 73328

SEQ ID NO: 78859 - DNA, 1818 bp, Streptococcus pneumoniae; identical to SEQ ID NO: 73329

SEQ ID NO: 78860 - DNA, 2070 bp, Streptococcus pneumoniae; identical to SEQ ID NO: 71978

SEQ ID NO: 78861 - DNA, 1818 bp, Streptococcus pneumoniae; identical to SEQ ID NO: 71979

SEQ ID NO: 78862 - DNA, 2070 bp, Streptococcus pneumoniae; identical to SEQ ID NO: 71808

SEQ ID NO: 78863 - DNA, 1818 bp, Streptococcus pneumoniae; identical to SEQ ID NO: 71809

SEQ ID NO: 78864 - DNA, 2070 bp, Streptococcus pneumoniae; identical to SEQ ID NO: 76276

SEQ ID NO: 78865 - DNA, 1818 bp, Streptococcus pneumoniae; identical to SEQ ID NO: 76277

SEQ ID NO: 78866 - DNA, 2100 bp, Streptococcus pneumoniae; identical to SEQ ID NO: 73328

SEQ ID NO: 78867 - DNA, 1818 bp, Streptococcus pneumoniae; identical to SEQ ID NO: 73329

SEQ ID NO: 78868 - DNA, 2070 bp, Streptococcus pneumoniae; identical to SEQ ID NO: 71978

SEQ ID NO: 78869 - DNA, 1818 bp, Streptococcus pneumoniae; identical to SEQ ID NO: 71979

SEQ ID NO: 78870 - DNA, 2070 bp, Streptococcus pneumoniae; identical to SEQ ID NO: 71808

SEQ ID NO: 78871 - DNA, 1818 bp, Streptococcus pneumoniae; identical to SEQ ID NO: 71809

SEQ ID NO: 78872 - DNA, 2070 bp, Streptococcus pneumoniae; identical to SEQ ID NO: 71808

SEQ ID NO: 78873 - DNA, 1818 bp, Streptococcus pneumoniae; identical to SEQ ID NO: 71809

SEQ ID NO: 78874 - DNA, 2100 bp, Streptococcus pneumoniae
atgaagttaacaaaaatggttattaataattttaaatcttttggggagtgtcaagcaattaactttaataatcaaactgtactgatagggaataatagttcaggaaagacaactgtattacaggcattgagtaagttgttttcagataaacaaagtgatagaatcattcgaaaaagtgattttcatttaccaaaagggttaagacctggtgaaaacacaagaaatctttttatagaaactatttttgagtttgatgaacttgatggaactgtctatggaccagccattccaacatttttcgagcactttacagtttctcaagatgatccaaaaccttttttacgaatcagattagaatcttcctgggaagatgatggaacagttgaaggaagtattgatactcaaatttattatatttcatctgatgaagatactattagagatgaagacaaacatcgtgctcctagaaaggatttggataaaattagggtactttatgtaccagcttcaagaacgcctgagaaggagttgggtaatgcttcaggtagtatgttaagtaggttggtaaatagtataaattggactgaagatgagataaaagaaattaaagataaaattgatgagttgaataacacttttttatctgaaaatggagcattaactcagatcaacaatgagattcagaaatcatgggaattatatcatgaagataaccgtttttctcaagcagagttgattattaattcttctgagatggcggcagcacttagacagattgccttaaaattttcaccaacaaccactgaagaagcatttacagtttcagatctaggagatggactgagatctattttttatttttcacttgttgattcgatacttgatattgagttagaaattaccaaagatcgtgaagagaatcctgataatccaagatttaagttggtacctccaatactaactatcttagcaatagaggaaccagaaaatcatattgctccacatcacattggaaaactgataaaaaggtttaagcaattaggcaataatgacaactctcaattaattttaacttcacattctccagttattgtaaaaagaattgacccagaagatttgaggtatttaagaatagaaaataatgacagtgttcttcaaaccattgtttctgatatacagttacctcaatcgaatgatgagtcttataaatacattaagggagcaattcaagcctatcctgaactatattttgcaaagttagtagtactgggtgaaggtgatagtgaggaactgctattaccaaagttttttgatttacttggactggaaattgatagttctcagatttcagtagttcctttaggaggtaggcatgttaattatttttggaaattattgaacgctctcaggattcctcatattaccttattagatttcgataacgaaagatatggaggtggctggggaagaattcaatatgcaataaaacaattgatactaaatggggttgctaaagaaaaacttgttactgtaacagccgaatctcaaaaatcacgagttctagatgatgatgagattgataaaataaaggactggaagattgatagacctgataatcagttgcttgaggggtggattaaaatgttagaaaaattcaatgttttcttttctgcaccacttgatattgatttcttaatgttacagtattataaagaacattatctggaaactttatctaccaatgagggacctgttgtttcttatactgatgaaaatagtgacaataaaaaaataaaattaactaaaatggatagaacaaatgattatcaattaattggttttaaaaatcgcatcagtgaagctatacaagcaactttaaaagataagagcggacccggtgatagcttcactgaagaggaaaaggaactaatgatttggtatcaatatttctttttaggtagaggaaagccaacaactcatatgcaatttttatcatctattagtgatgatgaattaacaagaaatctaccccctgtatttaaaaaaatagttaaccgtgctgaagaattacttggagatattgaacatggtaaagagtga

SEQ ID NO: 78875 - DNA, 1818 bp, Streptococcus pneumoniae; identical to SEQ ID NO: 73329

SEQ ID NO: 78876 - DNA, 2088 bp, Streptococcus pneumoniae; identical to SEQ ID NO: 73976

SEQ ID NO: 78877 - DNA, 1818 bp, Streptococcus pneumoniae; identical to SEQ ID NO: 73977

SEQ ID NO: 78878 - DNA, 2070 bp, Streptococcus pneumoniae; identical to SEQ ID NO: 71978

SEQ ID NO: 78879 - DNA, 1818 bp, Streptococcus pneumoniae; identical to SEQ ID NO: 71979

SEQ ID NO: 78880 - DNA, 2100 bp, Streptococcus pneumoniae; identical to SEQ ID NO: 73328

SEQ ID NO: 78881 - DNA, 1818 bp, Streptococcus pneumoniae; identical to SEQ ID NO: 73329

SEQ ID NO: 78882 - DNA, 2070 bp, Streptococcus pneumoniae; identical to SEQ ID NO: 71808

SEQ ID NO: 78883 - DNA, 1818 bp, Streptococcus pneumoniae; identical to SEQ ID NO: 71809

SEQ ID NO: 78884 - DNA, 2070 bp, Streptococcus pneumoniae; identical to SEQ ID NO: 71808

SEQ ID NO: 78885 - DNA, 1818 bp, Streptococcus pneumoniae; identical to SEQ ID NO: 71809

SEQ ID NO: 78886 - DNA, 2088 bp, Streptococcus pneumoniae; identical to SEQ ID NO: 73976

SEQ ID NO: 78887 - DNA, 1818 bp, Streptococcus pneumoniae; identical to SEQ ID NO: 73977

SEQ ID NO: 78888 - DNA, 2088 bp, Streptococcus pneumoniae; identical to SEQ ID NO: 73976

SEQ ID NO: 78889 - DNA, 1818 bp, Streptococcus pneumoniae; identical to SEQ ID NO: 76075

SEQ ID NO: 78890 - DNA, 2088 bp, Streptococcus pneumoniae; identical to SEQ ID NO: 73976

SEQ ID NO: 78891 - DNA, 1818 bp, Streptococcus pneumoniae; identical to SEQ ID NO: 76075

SEQ ID NO: 78892 - DNA, 2100 bp, Streptococcus pneumoniae; identical to SEQ ID NO: 73328

SEQ ID NO: 78893 - DNA, 1818 bp, Streptococcus pneumoniae; identical to SEQ ID NO: 73329

SEQ ID NO: 78894 - DNA, 2088 bp, Streptococcus pneumoniae; identical to SEQ ID NO: 73976

SEQ ID NO: 78895 - DNA, 1818 bp, Streptococcus pneumoniae; identical to SEQ ID NO: 73977

SEQ ID NO: 78896 - DNA, 2088 bp, Streptococcus pneumoniae; identical to SEQ ID NO: 73976

SEQ ID NO: 78897 - DNA, 1818 bp, Streptococcus pneumoniae; identical to SEQ ID NO: 73977

SEQ ID NO: 78898 - DNA, 2241 bp, Streptococcus agalactiae; identical to SEQ ID NO: 72338

SEQ ID NO: 78899 - DNA, 2019 bp, Streptococcus agalactiae; identical to SEQ ID NO: 72339

SEQ ID NO: 78900 - DNA, 2091 bp, Streptococcus agalactiae
atgattttaaaaaagatgaaagttaaaaattttaggttgttaaaagattttgaattagattttaaagatgaattgtcgttagttataggtaaaaataattgtgggaaaacatcagcccttgttattttagataagatgttaaattcatctaaagtgatgtgggaagatataaatttggaatgtcagaaagaactttataaaaaaataattgattttgatatatctgagcaagcgagagttgcatcattagaaactgttaatctgcaattatttattgagtatgatgataatgattcatatgcaaatattcaaaaattcatgatggatttaaacccagaaaataacattatagtgttagaatttatttcgttaatagctgcaaaaaaaatcatagaattaaaaaacattattagtgaaaaaaatattaaagattttaaatcattttctaaatttatgagtaagaattttgcaaacttctttgaaacgaaaaaatattcaagagggtttgatgttgaagcaaacaaaataacgcaagacagatcagaagaaattgacaataaagatattcaaaaagtcattaaagtggcaggaataagagctgatcgagcggtttctaatgatgatcgtaatcatgttttatcaggtttaactggtaaatatttcagttcttataaagctgcaaaagatgaaagcgagtcggtatttacaagacttgaagaaaaattggaggaagccgataaagaattatataagatttacaatggagaagaaaacgaaggtgaagaacccattgatggcatttttagtgatgttatagatgttataaaaacttatggtggtgcagaaaatggaattgatatagaaatagagtcatctatttcagagaaaaatttattgtcagataatacaaacttaagttatagacaagggggagattgttcgcttccggaaacatataatgggttggggtatttgaatttaattggtattttatttgaaattgaaaccaagatacaggaattatttgaacaaccagcagatataaatctcttatatattgaagagcctgaagcacatacacaccctcagttacagtatatatttattagaaatattaaatctcatatcaaagcacatagaaaaaagttgttggaagacaagaataaacagttgcagattttaatcacttcgcattcatcacatatagtttctgaatgtaactttgatgacattatatatttaaagaaaaacgggaatacggttatagctaagagttttaattctttaaaagaagagtatggtggagatgaacagaaaggatttaagtttgtaaaacaatatcttacaatgaatagaagtgaactgttctttgctgataaagctatttgtatagaaggagataccgaacgaattttaatgccaatgatgatgcataaaattgataataaagaaaagccagaaggagatattattccactattatcacagaatatttctataatagaagttggagcgcattctcatatatttatgcctttattttcctttttaggaacaaaagttttgtttgttacagatattgattctgtaaaagctgaaaagaaaatagataaaaatggaaaagaaagaactgtatatacgagctgtcaccctgatgagggaacacatacaagtaacgcatcaataaaagaattttttaaagataccggaattgatacatcgaataatcaatttaaggaacttgttgggaaaaatgctgaggataaaattaaagataatatgagaatagcctatcaaataccagaatctgatggtgagtatcaagcgagtagctttgaagacgcatttatagcattaaataaagactttatattaaaaaacaaagaagggttttatcaatatggagctttaaaagactttgcagctgatgaaatagaaagtggcgattattataaatttgcattagataatgttaaaaagaagtcagcatttgcatcaagtttactatatttcaataaagaagatggtaatgaggatgaaaaatggaaggttccacattatattgaggagggcttattatggatacagtaa

SEQ ID NO: 78901 - DNA, 1908 bp, Streptococcus agalactiae
atggatacagtaactttagaaaaggaagttttagaagctcttcaatgtataaaaaatggtgaaaattttattttagaaggtggagcgggaagtggaaaaacatactccttaatttccttaataaatgcacttacagaagaattaccagatattaagatagtatgcattacatatacaaataatgctgttgcagaaattttatcaagaatagaaaatgagaacctttgggtttcaacaatacatgagtttatatgggctcttatcagaaaatatcagaatgaaataaaagatattttagttgagcttattaacgatgataatgaaaagaactttaaaaagccaaaagatttttctgaggatttaatttctaaagaatatttcgaaaatctttatgtggattatgacgagtattattctgtaacgccaaatgatgaaaatagagtgaaaatcagccatgatcacattttgattgttgcagagaaaatgtttgagaaatataaaaaaatagcggacattttaaaggatattgcagattgtatttttgttgatgaatatcaggatacaagtcctttagttgctgatattttactaaagcatcttgaacaaagcgataagaaaaatgtaattggtttttttggagattcaatgcagtccatatatgacgacggagttggtaatttaaatcaatataatttaactaaaatagtaaagacgcaaaaccgaagaaatccaagagttgtaatcgaagtagccaataagtttagagatgatgatattgagcaaagaccttcagaagatacaaatgcacctaatatggagaatggtactattagagaaggtagtattaaatttttatatggaaatgaaacagatgattttataagcataaaggaaaagaatatttttgaatcttggaatttctcggatggaaaacaaacaaaagagttaaggttgacacataaatataatgctgaaatggctggatttaaagacttatatgatctatataatgctgatttgataattacgcttataagcaagataaaggaaaaaattgataagggaaatttagacagtgataagactttgggagaattggcgttaaaggtaaaaccgacatataagaaagtagagttgctggatcaaattaacggaaacgaaatttataagtcaatatacagtgttttagaaggtatgtcatgggaagaagcttgcaaaaaatgtagagttactaaggaatcacttatgtcgtataaattaaatgggataagtggtagatatgaagctaattcttatagagataggattttacgcagattagatatattagaggaaattattgaattatatgaggctaataaatttaatgattttctacgaataacaaaattttccattcgtaataggaatgataagatctgccttaaggaagcaattgattaccttgtaagtgaagataatccaacgatagaagatattttaaaatttgcggaggtaaaagggttactcaaagaagatgaattattcagtgattatattttaaataaaggattctatttatgggagagaataaaaaatataacatttaatcagtatagaaaaagtatcttatatttaaaagaattttcgccaatttgtactcaacatagtgttaagggtagtgaatatgataatgtacttcttgtattagagtctgattggaataaatacgattttaatacattatttggaaaggggtcttcaaattctaatgttcaactaagaacgaaaaaattattttatgtatgtataacgagagcaaaaaagaatttaataatatatatgcctacgaatgattctgacatattaaggaaagcaaaagatttttttggggaagaaaatgttatggatatttcttcgattgaatag

SEQ ID NO: 78902 - DNA, 1926 bp, Salmonella enterica; identical to SEQ ID NO: 72180
  subsp. enterica serovar Typhimurium str. DT104

SEQ ID NO: 78903 - DNA, 1662 bp, Salmonella enterica; identical to SEQ ID NO: 72181
  subsp. enterica serovar Typhimurium str. DT104

SEQ ID NO: 78904 - DNA, 1926 bp, Salmonella enterica; identical to SEQ ID NO: 72180
  subsp. enterica serovar Typhimurium str. DT104

SEQ ID NO: 78905 - DNA, 1662 bp, Salmonella enterica; identical to SEQ ID NO: 72181
  subsp. enterica serovar Typhimurium str. DT104

SEQ ID NO: 78906 - DNA, 1926 bp, Salmonella enterica; identical to SEQ ID NO: 72180
  subsp. enterica serovar Typhimurium str. DT104

SEQ ID NO: 78907 - DNA, 1662 bp, Salmonella enterica; identical to SEQ ID NO: 72181
  subsp. enterica serovar Typhimurium str. DT104

SEQ ID NO: 78908 - DNA, 1926 bp, Salmonella enterica; identical to SEQ ID NO: 72180
  subsp. enterica serovar Typhimurium str. DT104

SEQ ID NO: 78909 - DNA, 1662 bp, Salmonella enterica; identical to SEQ ID NO: 72181
  subsp. enterica serovar Typhimurium str. DT104

SEQ ID NO: 78910 - DNA, 1926 bp, Salmonella enterica; identical to SEQ ID NO: 72180
  subsp. enterica serovar Typhimurium str. DT104

SEQ ID NO: 78911 - DNA, 1662 bp, Salmonella enterica; identical to SEQ ID NO: 72181
  subsp. enterica serovar Typhimurium str. DT104

SEQ ID NO: 78912 - DNA, 1926 bp, Salmonella enterica; identical to SEQ ID NO: 72180
  subsp. enterica serovar Typhimurium str. DT104

SEQ ID NO: 78913 - DNA, 1662 bp, Salmonella enterica; identical to SEQ ID NO: 72181
  subsp. enterica serovar Typhimurium str. DT104

SEQ ID NO: 78914 - DNA, 1926 bp, Salmonella enterica; identical to SEQ ID NO: 72180
  subsp. enterica serovar Typhimurium str. DT104

SEQ ID NO: 78915 - DNA, 1662 bp, Salmonella enterica; identical to SEQ ID NO: 72181
  subsp. enterica serovar Typhimurium str. DT104

SEQ ID NO: 78916 - DNA, 1926 bp, Salmonella enterica; identical to SEQ ID NO: 72180
  subsp. enterica serovar Typhimurium str. DT104

SEQ ID NO: 78917 - DNA, 1662 bp, Salmonella enterica; identical to SEQ ID NO: 72181
  subsp. enterica serovar Typhimurium str. DT104

SEQ ID NO: 78918 - DNA, 2190 bp, Staphylococcus aureus; identical to SEQ ID NO: 71982

SEQ ID NO: 78919 - DNA, 1794 bp, Staphylococcus aureus; identical to SEQ ID NO: 75835

SEQ ID NO: 78920 - DNA, 2190 bp, Staphylococcus aureus; identical to SEQ ID NO: 71982

SEQ ID NO: 78921 - DNA, 1794 bp, Staphylococcus aureus; identical to SEQ ID NO: 75835

SEQ ID NO: 78922 - DNA, 2190 bp, Staphylococcus aureus; identical to SEQ ID NO: 71982

SEQ ID NO: 78923 - DNA, 1794 bp, Staphylococcus aureus; identical to SEQ ID NO: 75835

SEQ ID NO: 78924 - DNA, 2190 bp, Staphylococcus aureus; identical to SEQ ID NO: 71982

SEQ ID NO: 78925 - DNA, 1794 bp, Staphylococcus aureus; identical to SEQ ID NO: 75835

SEQ ID NO: 78926 - DNA, 2190 bp, Staphylococcus aureus; identical to SEQ ID NO: 71982

SEQ ID NO: 78927 - DNA, 1794 bp, Staphylococcus aureus; identical to SEQ ID NO: 75835

SEQ ID NO: 78928 - DNA, 2190 bp, Staphylococcus aureus; identical to SEQ ID NO: 71982

SEQ ID NO: 78929 - DNA, 1794 bp, Staphylococcus aureus; identical to SEQ ID NO: 75835

SEQ ID NO: 78930 - DNA, 2190 bp, Staphylococcus aureus; identical to SEQ ID NO: 71982

SEQ ID NO: 78931 - DNA, 1794 bp, Staphylococcus aureus; identical to SEQ ID NO: 75835

SEQ ID NO: 78932 - DNA, 2190 bp, Staphylococcus aureus; identical to SEQ ID NO: 71982

SEQ ID NO: 78933 - DNA, 1794 bp, Staphylococcus aureus; identical to SEQ ID NO: 75835

SEQ ID NO: 78934 - DNA, 2190 bp, Staphylococcus aureus; identical to SEQ ID NO: 71982

SEQ ID NO: 78935 - DNA, 1794 bp, Staphylococcus aureus; identical to SEQ ID NO: 75835

SEQ ID NO: 78936 - DNA, 1824 bp, Salmonella enterica subsp. enterica serovar Typhi; identical to SEQ ID NO: 76062

SEQ ID NO: 78937 - DNA, 1893 bp, Salmonella enterica subsp. enterica serovar Typhi; identical to SEQ ID NO: 71787

SEQ ID NO: 78938 - DNA, 1824 bp, Salmonella enterica subsp. enterica serovar Typhi; identical to SEQ ID NO: 76128

SEQ ID NO: 78939 - DNA, 1893 bp, Salmonella enterica subsp. enterica serovar Typhi; identical to SEQ ID NO: 76129

SEQ ID NO: 78940 - DNA, 2226 bp, Vibrio crassostreae; identical to SEQ ID NO: 76004

SEQ ID NO: 78941 - DNA, 1860 bp, Vibrio crassostreae; identical to SEQ ID NO: 76005

SEQ ID NO: 78942 - DNA, 2121 bp, Novosphingobium sp. KN65.2
atgcttatcgaaaagatccaggtacagggatttcggctcttggaagacgtcgagctgctgctcgagccgactgcgaccgtcatcgtcggccgaaacaatagcggcaaaacctctctcacggagatctttgatcgtctcgctggggagcatgggcccaagttcaggctggaggatttctcggccggtacccgaggcaagtttctcgaagcgaaggcgaaacgtgacgccggcggcaacccggaggaggttctcgctctcctgccggcgatcgcggtcacgctaacgttcaaatatgatccctcggtcggcgagctcggccctctcgcaccattcgtgatcgaccttgatcttagctgctccaccgccgtcgcgcggatcgaatatggggcttcgtccgcctcgcttgcgaccttgttcgatgtgcaggaggcagaggccggcagcgacgccgtcgcgcatttctaccgccaactgcgtgaaaccttgcctagagcctatcgcataagcgtcacggcgatcgaccccacggacccgaccaacttccgcgtactcgacgggaccggcgccctgtccgccctcgttcagtgcggcttcgtgcgcgcgcagcgaacgctcgacagcagcaaggcgagcgataccgccgtgattgggcggctcctcggaacgctattccagaccgcgagctcgatgacggccgcggagagcgaccaagccctagcggccgcgctgaagacctctgtcagtcagatcgaacagtcgattcagaacgacttcgatacgatggtgaaagacctgctgccggcattgagcgcgttcggcttcccgggtctcaacgacgccgagctcaggcctgaaacgtccctcaacgtcgagacgcttctctcggatcacacgaagatcttctacaccggccagcacggtgtccatctacccgagggctataacggcctcggcacccgtaatctgatctacatgttgttgcagctcgagacgtttcataaagcataccgcgctcgctcaatccggcccggtacccatctcgtcttcatcgaagagccggaggcgcacctgcatccccagatgcaagaggtgctgatcgcacagttgaacgccgccgtagcggcactgtccgccaaatatgtaggcgagccggtctggcaggttcagttcgtcatctcgacacactcgccacacgtcgcgaacgcggcttcgttcgaagcggtgcgctattttctgagctcgacccaggatgcgacaggagtgcggcgtaccaaggtcaaggatttccgcaaaggcagcgttgctatcccgccgcaggatcgcgagttcctccatcagtacatgaccctgacccaatgcgatttgtatttcgcggacaaggcgatcctggtcgaggggaccaccgagcgcatcctgatgccccgcatcgtccggctcgtggacgagtggctcgcgcccgaacggaagctcggccgccaatatatcacgacgatcgaggtcggcggcgcctacgcgcacatcttctacccgctcctcgacttcctggaactgaagagcctgatcatcaccgacatcgatgcggttcgcatcgacaagaccaaagataagccgcgcgcggtcaaatgtccttgcgccgaaggcgagcacagctctaacgcggcgatccgaaactggttctcggtcccgaagggccagcagatcagcatcgaggcgctctgcgccaagacgccggcagataagctctctcgctatcgctcaatcgcttaccaggttccggaagatggctcgagctggtgcgggcgaagctatgaggatgcgctgatcctcgcaaatcctgagcggtttggcctgcctgaagaaggcgatcgcggattgctcgcgtgggaaatggcgcaggacctcagcaaatcggagaccgccttgcggttcgccatccaggaagcggactgggccgttccaaaatacatcaagcaaggcctgacctggttatccgagccgcccccgcctccggaatctccgccatcgcttgctggtgtcggcgcaggcgcgccgacgatcgcggcaggctcgaacgatagtccggctgagcccgagagctccgcgccgcagtacgatctatga

SEQ ID NO: 78943 - DNA, 1716 bp, Novosphingobium sp. KN65.2
atgacgaaccctgcggtcgaggctgccaaggaagcacagaaacgggtcgacgcgtgcctggacgaaggtcgcaacttccggctggaagccggcgccggcgccggcaagacctattcgctcgtcgaggtgctcaagaagctcatcaacgagcgcggccgcgacctgcagcgagcaggccagaaagtcgcgtgcataacttacaccgaggtggcgcgggaggagatcgcccaagagatcgagcagcaccccgcgatcctggtcgagaccatccatgctttctgttgggggttcatgtccaagttccagaaggatttgcgggcgctcgtcgctggcatggaggacaaacaggacaagatcgcggaagcaggcgggatcgctgaccaggtcgtggaatatcagctgggctttttcggcatcgacgagaagcgcatcacgctccatcacgacgacgtccctcgcttcatggcgcaacttcttggaaagccgaaatttcggtccctctttgccgcgacatatcccgttatcttcgtggacgagtatcaggacaccgaccctcacttcatggcggcgctggcagagcattttctagccaccggcaccggtcccaggatcggcttcttcggcgatcactggcagacaatctaccgaagcgactatggtctggcgaactatccctcccttgaaccgatcgacaagggttcgaactttcggtcagtgcccgcggtggtgaacgtgctgaacgcgttgcgaccggagctgaagcaggccgtcaaggatcccgacgctaaaggcgaggcgcggttctttcacgccaattcctacaccggtgagcggaccagcagctcgtcatccaagaacgacacgccgcccgaggtcagccgggattttatggcgaagctgacggaaaggctgaaggaggacgggtgggatttgtcatccgagaagacgaagatccttatgctgacgcataacgcgattgccgctgagcgcggctatcccacgatcgccaaagcttatcgttacaatgactctttcgcgaagaaggaggatccgttgatcgcgttccttgtcgacaccgtggagccgatgtgtcgcgctttcaccgagaagcgcttcggcgacatgttcaaaatcctcgggtcacgaccaaagctcagcgcgcatgaagataaggttgcgtgggcgactgacatggccgcgttagcggacgcgcgcgccaacggaagcataggcgacgtcgtcgacctcctgaaggggacaggtcgacctcggctaccggaccggattgttaggcgtgagcaggaactcgccgcggccgaaaacggtgcggagttgccgcgcttgctccaggagcatggtctcgttcgcgaggcgccgtaccaggagctggtgcggctcgccgaatttatcgagggccagacaccatttgcgacacagcacagcgttaagggcgcggagttcgacaacgtcatcgtcgtgcttggcggcgggtggaaccattataattggccgcagctgctcgagctgctgtccaccggcgccatcacagcaaagaacgagaagggctactatcgcgcccggaacctattttacgttgcggtttcgcggccgaaaaggaagctggccgtccttgccactcaaactctgtcgcctacggcgcttcaatcagctgagaaactattcggggccggtaatgtcgtcgccctcaccctctag

SEQ ID NO: 78944 - DNA, 2058 bp, Clostridium sordellii
atgtttttatcacaattaaaaatatggaactttagaaaatatggtaccaaagaaaatggagatgcaggaatggaggtatcatttaataatcgattaaatctaattgttggtgaaaatgatagtggaaaaacagccattatagatgcaataaaattagttctaggtactcaaagctatgacaatattagattagaagaaaatgatttttatagaaaaaaagatggaattagaactgattcattaaaaattgaatgtacgtttgaaaatctatctgatttagaagcagggagatttttagaatggatttatatagatgatgaaggcagagctaaattggaagttagattaatagcaagaatgaaagataataaaataacaataagaaaaactggaggtaaagaaggagtagatatcaactttgaagcgtcagaaaatttaagagttacatatttaaagcctttaagagatgcagaacatgaattaaatccaggatatagatcaagatttgcgcaagtattaaagagtcatcctatatttaaaaataatggggatacccataaaatagaagaaattatgaaaggtgcaaatgaaaatattgaagaatattttaaaggaagtagacctaaagagaataataaagatgcagagagtgatttgtcagaagaaaataatgtagatattaattataaagaggatccatcaagtattataaattcaatttcatacacattaagtaaatttttaggaaataataaagggcaatatgatgtaaatattaatatatctgaaatggaattaaacaagatattatctagacttatgttaaaaatagatgaggataaggtaggactaggaacgctaaatcaattatatatggcaatggaattattattattagatataaaggaaaaaaataatgaatttgggctagctttaattgaagaaattgaagcacatatacatccacaagcccagttaagagtaataaaacatttagaggaaaatattaaatctcaaactatacttacaactcacagtataacgttagcatcaatagctaatttaaatagtttaattctttgtagaaataatagttcgtattcattgaataataaatatacccgtttatcttcaggtgattatgaatttttagaaagatttttagattcaacaaaagcaaatttattttttgcaaaaggtgtaattatggttgaaggtgatgcagagaatatattaatacctactattgcgaaaattataggaaaaccattatatatgcatggagtttcaattgttaatgtaggaaatgtggcctttttaagatattcaaatatatttatttcaaaagaagaagagaaaacaataggaatacctacatcaatagttacggatttagatgtaagacctattcagtattatcaagatgaggataataaaagttcattgaaaaaatatacagtatatagaataaaaagtagcaatgaacattttataaaagaagatgattcaagaaaaagagtaagagaaattttagataaaaaacaattaagaaatgacgattttgaagaaaatgttgaaattattgaagatgattatgataaatataaagaagttgtaaaggaagagaaagaagaaaaatacaatctagatgatataaaagtatttacaaataactggactatggagttcgatttagcattaagctgtataagggaatatgtatatgcagcagttttaatagcaaaagatataaaatcgaatgaaggtattattgatagtattgatatagagaagtatattaatgattctaaagaagaaataaatcaatttattgcagatgataaaaatgatatggatatagcatatcaaatatataagccattattaaaaggaaatgcatctaaagctgtgtgcgcgcaatatttatctaaagttttattaaataaatctgaggaagataaggaattagatattaagattaagagtgataaatatataaaatatatattagatgcaatatatcatgttactaatagcaaaagagaggttatagaataa

SEQ ID NO: 78945 - DNA, 1938 bp, Clostridium sordellii
atgagcaatattgaaataacagacaatgatattagatatgcagaggaaatactttttggtaaaacaaatatttttgatgaagaaagaataccaataatcgaagattttaacaaatcatttgatgtaaatgcatgtcctggaagtggaaaatctacagtattgttagcaaaacttattatattatctagaaaaatgccgttaaataatggacaagggatatgtgtgttaactcatacaaatgtagcaatagatgaaataaaaagtaagttaggagataaaagcgatatattatttaaatatcctaattattttggaactattcaaaattttgtggataaatatttagcgatgccgtattttaaaagaaaatataatgaaaatattaaaagcatagataatgatatatattatgatcatttaagaaaattatcaaaaaataaatattcagacatagattcttcaatacaaaaaagtattgagagaggatattatgctgatgagtcacatgaaaaaaattttgttacatttatagatagtaaacactttgatgtagatagtgaagaaataaaaggaaataataataggttattgagtgattgggatttttataaagatttaaaaaaggtaatgatgcatgagagtttggaaaaaggtattttaagatatgaagatgcatattttttagctggggtgtatttaaaaagatttccaggtttagaaaactatttttcaaagcgatttagatatgtttttatagacgaaatgcaagatgtaaatgaaatacaaataaaaattttagagaaaatttttaatgatgatgttattattcaaagatttggagatataaatcaagttataaataattttagtagtactaatacatggatatttaataaagacattagagctataaattctagtaaaagatatggtaatgaaataattaaatttttagaaccattaagagttaaaaaattgggtaatatgaaaggtaatgatgaaatcaatactttaaatccacatataataatatttaatagttctacaatacatactgttgtacctaaatatatggaaattttaagtaagtatgatattaaggaagatgaaaataaaaaaataaaaataattggtaaagtaggaactaaagttagtgataaatatatatcaatatcatcttatataaaagggtataatacaaaaggcaataaacatgtggctttaaataaaaaaattattaagaagttaaatgaaataagtaatccaaaagaattttacgagtatttaatgtctgtaattttattggcaataaatgataataataaaaaagttagtaaagaagcattaataagattgatggaagataaatatatgagtgagtttataacatatcgcgctaatatactagattggattaaaaattttaatgaggatacaaatagtgtgttagaagatatattaataaaaaccgaggaattatttgactgtgttaaagaattaaattataatagcgatattttaaaaactaagattagtataagtgatggaacagaatcaacaatccatgaagaaataaaggataataaagaaattataaatattgataatgtcaatactattagcggaactaaaggagagacacataaagcaacattatacttagaaagtaaactaatattcaatagtggaaaagatattagcgatattagcagaattttagattatatggtgaataaaaaagaggaagtggatgatagcgataaagaagcattaatgaatgcgtatgttgccatgagtagagctgaaagattaacttgtattgctattcaatatgatacaataaaggggaaaataaaagattttaaagaatatggatatgaaataattggatgtaatactgacatggatgtattaatagataaggaacttaaaaaataa

SEQ ID NO: 78946 - DNA, 1764 bp, Clostridium sordellii
atgaaacttaaaagtttagcgattgaaaatttccgaaattttgacaacattaaaataaacttaactaaccaaaatgttgtatttggaatgaatgatgtaggtaaaactaatttgttatttgctattagatttttactcgatagagatattcgtaaaaatggattcaaagaaactgattattttaaaaataatacgaatagagttataagaataacattaggcatagatttatcagatcgtttagaaagtgaagattcacaacatataatagctaaagttggtggagcaagatcaagtaaatcattagatgatttctttttacaggtagaagggatatatgacaaaagtgaggaaatcggaatacccaaaatttattggggaagtaatttagagaatttatatgaaatcaatcaaaatggaatatatagcaatctagataatttatttaaaattgtatatgtagacccaactatagatttagaaaaaacgttctctaaaaatcgaaataaattatttaatcaaaataaactggatgagaatgatatccaaatttcaaatgatattaaaacactaggtatagaaatgaataaaaaaattagcaacatgggagtaatccagtcttttcagaaaactattacagatgaatataaaaagttaaaaaaagaaaaaattaatattgaaatgaaatcggagattactattaatggttactttggtaatttaattccctatattaaaaaggaaaatgatgataatatttatccaactgcaggagacggtagaaagaagatactagcatattcattaataaatcatttaatacaagagcaagaaggaaataaaataattatttatttagttgaagaaccagaaaatagcttgcatagatcaatgcaaattgctttatcaaaacaattatttagttctgaagtatataaatacttttttttatcaacacattcatctgaattattatatgagatggataatgcttcgttaattagaatatattcggatagcaaaataaattgtaactcatatatttataatgtgagtgaagaatataaaaatgtaaaaaaagaacttaatagttcattggcaacagctctttttgcagaaaaagttttactggttgaagggccttcagaaaaagtactgtttgaaaaggtcttagaaaaagtgtatccaacatatgaactagaagggggatacattttagaagtaagtggaataaaatttaaaccatatgtagatgtattaaaaggattaaatattactccaatagtaaaaacagataatgatttaaaggctaaaaaaggtaatcaaataaaatttgacttaatagggataacaagatgtttaaatattatggggattaaagaacatgaattagttgaacctgtagaaatagattatttttatataaatgataaaggaaatagggtttataaaaataaagttaaaaacaatatgataataaagaaaaagatagaaatttttaataattttaaagatcatatagagtcatttaagcacaataatatttatctatcaaagattgacttagaacatgatttatatgaagctatcggaaaaagaatggaggaaattttaggttcaaatcctgtgaattatcttcaagagcataaactaattaatatgattgaattaactaatagtctgacagaaaatgattgtaatgacataattaatcattatttatttgaacctttaagaaagttggtgccgaatgatactaattga

SEQ ID NO: 78947 - DNA, 1527 bp, Clostridium sordellii
atgatactaattgatcaagagcagagggatggaattatagaaactgatggaaatatagttgtttcagctagtgcaggatcaggtaaaaccactattatgataaaaaagttagggattgaacttgaaaaaataactaatcataaaactatagcagcaattacatttactgtaaaagcaacagatgaaattaaaaaaaaggctgaaaaaaatataaaaaagcctttcattactatgacgaatgattcatttattgaaagtgaaataataagaccttttataaaagatgcattaggtaaagattttagaaatgattacattgtagattatggagaagaatataagtttgagaattacccaggtggattaatacaattaaaggaaaaaaacatattgggtagtttaaaaaataaaaaacttaattttaattttaaacttgcttatgatattttagaaaaatcaatagcagcaagagaatatattaaatcaaaatattcttggatatttatagatgaatatcaagactctgatgaagatatgcatagattttttatgaagattaaaaatgaattaaatattaaattatttattgttggagattcaaaacaagcaatatacttatggagaggtgctgtgagtaatatatttgaactattaaaaaatgaaaaatttaatttttatgaactgataacaaattttagatgcgatagagaaatagaaaactatgcaaatttatttcataatccacaatattttgtgagctctaataataatagtaataatgtgattctaaaaaaatatagtaaaggtataagtggaataaaatactttatagatgaatttaagattattgtttctgacaaaattattgatttaaacaaagaaataactattattgcaaattataataatgatgctaaaaaaattacaaaattattaaatgaagaagggttcgattttatatttataccaaagacccctattgatgaaggaatacctaatggatatttacttaaggagcttgcaaaattttataagaattcaacttatacaatatatgattttttggaaaaagttaaaattgatgaaaggacttcgacaagaaaagagattaatagcattataggaaaattaaaaggaaacgaacatttaaatgaaaatatggttgaaggtatagtttttcaattagctaaatatctaggtgtttctatagataaatgtgaaatagataagttctgtgaaagtatttttaatagtgaatatgatttggcttttagattaatagattcaaagcataaagtaatgactgtatttgcatctaaaggactagaatttgaccaagtaataagttttactcgttattacgaaatttacaaaaatgaaaacttacaaaaccattatgtatgtataacacgtgcaaaagaaaaacttattatgtttattgataatgaagaatattatacttatgttaaaaatatagcacatagtaatggtgttaaagatatgcgaaatataattagatatgaatga

SEQ ID NO: 78948 - DNA, 2085 bp, Clostridium sordellii
atgcaattaacaaaaataattcttagtaactataggtgttttggaaaagaaccgacaactattgaaatcaataatttaactggattcataggtcataatagtagtggtaaaactgctttattaagtgcacttataaaacttttcggagaaaaatctagtgatagaattattgaaaggtcagatttccatatacctgaaagtactgatccggatagtgttgatattaatgaattatatattgaaacacaatttgaatttcctgaattggagaaggatgaagataacatgtcaataccagtattttttaaaaatatggttgttagtgaaccggggggaaaaccttacttaaggattagacttgaggcaagttgggaaaaaagttcaaatcctgaggggagtattgactcgaatatatactatataacatctgcaacagaagacataaagcctgaagataagcgcaatattaaaagacatgaccttgatcagataaagattatttatgttcctgctattagaaaaccagacgaacaattaagaaatgtatcaggaacaataatttcaagattactgaatggtataagttggtcagaacaaacaaaaacaaaaattaaaacgaaagcaaatgaaactgagaaaattttctttgaagaaaaaggggtcgaatctttaaagaaatcattagaaactcaatggaatagttatcataaagatattagatactcaaatccaaagataaacttcaatagtactgatttagaaacaattttaaagaaagtggaagtaactttttcacctacagagacacatagggactatcgtgttgaagaacttggggatggtttacgttctttattttatctttcgcttgtaaatacatttttagaaattgaagaagaaattctaaaatctattaatgataacaaagaagaagagatatttacattaataccacctgtgttaacgattgttgcagttgaagagccagaaaatcatatttcacctcatcttttaggaagagtagttgaaaaattgaatcttatttctaaaaaagaaaactcacaaacaatattgacatcccattcaccagctatagtaaaaagaattgaaccaacagatataagatattttagaatttgtaaggaacatgaatgtacaaaagtgaattcaattatattaccaaatgaagaaagggaatcagaacaatttaagtttgtaaaggaagcggtattagcatatcctgaactttattttgcaaaacttgttgtattgggtgaaggtgacagtgaagagattattattaaaaagatgattgaattaaaagcagaatctgtagattcatcagaaatttcgatagtaccattaggtggtaggcatgttaatcatttttggcgtttattaaatgatttagaaattccatttataacattattagatttagatagagaacgagatggaggcggttggggacgtataaaatatgcaatacaacaattaataaagattggtcgtgataagaattcattgcttaagatagatacaggaattctatcagatgaagaattcgaaaagatgcatacttggagcgtgtctgagactgaaattatgtcgggatggattaaaatgcttaaagattatgatgtttatttttcctctccgttagatatagattttgtaatgttacaaagttttaaagataaatatatttcaacattagaaagtggtcaaggtcctataataaaagggtatgggaaaatacaaaatattgaaattaatgaagatactgaagataaattaaaaactgattatcaagatagaatagtcagcgatattaaatcaacattaaaacaagaaggtggcgatggatctacttatactaaagaagagaaagaacttatgatatggtattcatatttctttttaggaagaggtaaaccaactactcatttatctttattttcaaataatactgatttagattttgaaagttttccagaatgtctaaaggagtttgtaaatagggttattgaaaagatgatagatgatttaggggatgaagaagatgaagaggaattggattggtaa

SEQ ID NO: 78949 - DNA, 1866 bp, Clostridium sordellii
atgaagaggaattggattggtaaggaagagtggcatccagcagcaggatttaaactagaatttgaggcgatgaatacagttattaatgatgaaaatacacttgttgtagctggccctggagctggaaaaacagaattattagctcagagagcttgttttttgctagaaactaatacatgtagatatcctaaaaaaatccttgcgattagttttaaaaaggatgctgctgcaaatttaaaagagcgtgtagaattgagatgtggtaaagaattagcttcaagatttgaatcgaagacttatgatgcttttgcaaaagaaatagtagatagatttagaaatagtttagatgaagcatatagaccgttaaataattataagattgctaaagatagtgatgttagaagagcatttgagatatcaggattaaattttagaggaaagcaaactgaatttaataaagtatatggaaataaactttcgataaataaattgcctttacatacagattttatagataaggtttttatagatgcttggaatgtattacttaaaggcaacaaagataataattttgaaagttcacttacttttgagatgatatcacgtttagccgaatatttgataagaactaatatatatattaagaaagcaattcaaatgacttatagtcatgtatttttagatgagtttcaagatactacgtcaattcaatatgatcttgttaaatcttgtttttttaaaacagaaacaataattactgctgtaggggatggaaaacaacgaattatgccatgggctggtgctagaaagtcaatatttgaagattttcaaaatgattttttaagtcaaaaaagaaaattaattatgaatcatcgctcagcgccaagacttgtagagattcaaaaaacaatgtataacaaattgaatgaagatgcaattgatttaaaaactaatgaaaagtggaatcatgaagatggagaagcttatttaaggctttttgaagattacctaaaagaagctgatgtacttagtgaggaaatagttagtctagtagaaaatggggtaaacattaatgaaatatgtatattagtaaagcagagtgtagaaatttattcagaagagattataaataagctttctaaacttaatattaaggcacgtaatgaagcagtatatcaggatttattaaaagaagatataataaagatactggtttcgctttttaggttggcgtcaaatgatagaagaccagatgattgggattatatttacgatattctaggcgaattatatggagtagacgaaagttataaccaaaaaacattgaatgatttcattaccaaagtagaattaatgattaatgatatcaaggcaaacttaaatattactgatgaaaaacaattcttagatttagttgattctaagattgaatatatttcatatgaaaaatttgcatcaaagtttcaacaatataaatctaaagattattttgatgatttggtagacaaatttaaaaaacttgtatggactgaatataatgaaactaaggattggattaaagcgattgacaactttgaagggaaaaactcaattccaataatgacaattcataaaagtaaaggacttgaatatgatactatcttttttgttggtttagaagactcagcgttttggaattttaaaaatcaaccagatgaagatagatgtgcattttttgttgcattatcaagagctaaaagaagaattgattttacatttagctcaaatagaccgacaaaattttcggatttacagaagcatgattgtattaatgaattctacgaattgtttgatgatactgagattgtaaaaaagatagagtattga

SEQ ID NO: 78950 - DNA, 2097 bp, Clostridium sordellii
gtggaaataactaaaataaaaattaataattttagaaagcttaaagataatgtagaatttgaatttaaaaaagatatacttatagttggaaaaaataatacagggaaaacttctatatctgaaattttttataagtttttatctccaaattcaaaatttggaatagaagactttaactataaatctataaataaaagtaaattaaatattattccagaaaaatttaatagcaaattatctcctgaagaaatactagaaattgaaaatttatttcctgaaataacacttgaattagaaatggagatatctaaggatacaaatttatataaaataagagagatgatttatgaattaaagaataatgacaatttaatattagtatgtaaatttaaagttgaaaatgcaattaaagtcatagaagattttaaaaattacattgagaagttaaaaaaagaatctgataaagaattagaaaaagaatccaataatattagtattgatttttataattatataaaaagaaatttaaatgaatattataaatgtttttattatactacaaaaaaaggatgttcttataaaaatcatgtaagtagtacatttatacagtctatatttaatataggaataatatctgcacaaagaaatgtggatgatacatccgaccaaaatactcaaacaatatcgaatgcaatatggaattattatcaaagaattacatgtgataaaaatgatatatcaaaagaagataagtttagtgattctataagtaatataaaactagaattagatggtagctataatgatttgtttaaaggactagtagagcgattagaaagtgttgctttaaataatgaaataggtcaaaaaatcgatataatatcagagtttaaagttgaagaattattgaaaaagaattctaaatttagatatagccttgaaggacttagcttaccagaatcatataacgggttagggtatagtaatattctatatatgtttatacagttggttacatattattatgatatagacaataaaaatgcaatatttaatattttatttatagaagagccagagtctcatttacaccctcaaatgcaatctgtttttatggaaaaattatatatgatgtttaatgatgaagtagatgtgtataaggtaataacatcacactcatcgtatatacttcaaaagcaagatttagataatataaggtattttttatgtaaaaacaataatatatatgttaaatcattagataattttttaaatcatgaagagtatatagggtttaaagagtttctaaaaaaatacttcatggttagtacatgcgatttattttttgcggataaagcgatattaattgaaggtactgtcgaaagaatgttaatgccattatttatacaaaaattatgcactgatgaaaatccacataaagatctgattaagcaacatataagtactatagaagtaggaggagcatacgctcatatttttaacaacttacttaaatttttagaaataaagacgctaataattacagatatagattcagtagatgaaaatgggaaaaaatgcagatgcgatatttctgatgaaggtgatgatatttcaaattggaaaattagaacttctaatggaactataaaagattggtatggaaagaaaaatgaaaaattatatataaaagaaatagtatctaaatctagtaaaaaatatagaataaaaaatattgaagataatgaaaactttttaatgctttcaactcaattaccattaaaggatgaaacctattggggacgaacatttgaggagcaatttataattgaaaatagtgaaatacttatagaaaaattaaaggatggtattagatataaggagatagagtctttatacttatcaataaacaaggtaaaagatgaagatggaaataaattaaatgctacatctataagtaaagtagaattagaaaaatatgcccacgaaattgttagtaaaatcgataaaacaaattttgcatttgatcttctcgtgttagaaaattggaacacacctagttatattgaggaggggttaaattggctatcgatgtaa

SEQ ID NO: 78951 - DNA, 1710 bp, Clostridium sordellii
ttggctatcgatgtaaatttaaaaattgaagattgtattaaacaaaataaaaattttatattagaggcaggtgctggagcagggaagacatatacattgataaaaacattaaattttttatcaaaatcagatgtatgtattaaaaacaaaaaagataaaaatatattatgcataacatatacaaactctgctaaggatgaaataaactcaaggcttaaaaataagaaaaatatttcaataatgacattacatgaatttctttggagttttatagcttcatttcaattagatatgaaatctataattttaaatatgatagaagataaaaaacaagatattacaaaaaaagttcaatcgtgtaataaaattttatcaagtcctaaaaaaaatacaaatattgagaaaaaaaagcaagaattagctaattacacaaaaaaacttagcaaacttgagaatcataaactagataaaaatattatacagtatcaaaactacacatctatagaaaatggaattatatctcatgatgaaattatatatataagtaaagagctatttagaaatgaatatttttgcaatttgtttatagatacattttcacatgttttcatagatgaatatcaggatactgatcaatctataatgaaaatatttttagattcaataaatagtaataaaaaagaaaagtatttcgtacttggactctttggagatagaatgcaacaaatatacgataaaggtatatctacagttgaagctgataagtataactttgagaaaatagaaaaaccagataactatagatcatgtaaagagataatcaatttaagcaacttattaagaagtgatggttttaggcaaataaaaaaagcaacagatatagaattagaaaaacttgaatttatatataatttaagtttagataaatacctaaaattaaatgaagaatataaaggttatacaaaactttttttaacacatagtgagatttcaaaagaagttggatttgaaacaatatctaatatatttagtagtgaatatcatcaaaatgcaaatgataagttattaaaactggaggatatgttcatacaatttgtaatagatgaaattatatatttaatagaaacttacaaaaacaatgagtttaaacctattttaaatagcatacgattaaaagagtttaaacaaaatgatttagaaatgttagataaagaaataaattatattatagataatacatcattaagtttaaggcttttcatagaaaaatttatagaattaaatgttttagattataaagcatataagaaattatataaaatatatgaagataaagaaaaaataagctttatagaaaggttacttgaagtacaagttaaggaatatataaatttatatagtcaaataaaaaataatcaaggattatatactttgcataaagttaaaggggaagagttcgatcacgtcatagttaatataagaagtgagcaaccttggacaaaatataattttaaaaatttaatagaaggaatagaaagtactactaaagagaaaacacaaagattattatatgttgcatgtacaagagctaaaaaatcgttagtaataaactatataactgatgataataacaaagaaaaaatcaaagatatagaatctagagtaaatatattaatgggtaaggaaataatttttagaatcaatgaatga

SEQ ID NO: 78952 - DNA, 1950 bp, Mycobacterium lentiflavum; identical to SEQ ID NO: 74516

SEQ ID NO: 78953 - DNA, 1893 bp, Mycobacterium lentiflavum
atgagcttagtagcaccagatagctggcgccccagcgggattgatgatcttgagcccgcggcgtggcaagctctaagggacgacagatcaacatgcgtgacggctggaccaggcgccggcaaaagcgagttccttgctcagcgagcaagttacctgttactaaccggtctatgtccagcgccgcggcgcatactcgccatatcattcaaacgcgacgcagcctccaacctcgaacgtagagtaggacttagggcgcctgaacatgcccaccgctttacgtcgatgacgtttgacgcgtttacaaagcacatcgtggaccggttcggcaccctgctgcccggacgctggaaaatggctggtgactacaagatccagttcagtagcgataggcaagtcgaagatgtgttgacggaagcatcggccaacgctcccgcaggactgaaaacggcaatcgacgccattccgcgcggcaccttcatgacgtcgatcctgggcacatacgctctcccgattaagccggtcagcccgcccaaagcagtcgactacgccgtcgaagagtggtggcgcagaagctatctggagctgccaacccccgtcgtggagtttgtcatgttgaatcgattggcagagttgattatacggaccagcccacagctacaacgggcgattaacctcacatacccatatgtattcgtggacgaatttcaggacacaactttcgcgcaatacaccttcctaaggtcactatttcgccgaactgccaccgtcacggccgtgggtgaccgcaagcaacgcatcatgggttgggctggcgcgctgactgacgccttctcagagtttcagcgtgactttgcggccgctccctacgccttgcggtggaacttccgctcgacggaggcgctcgttgatcttcagcaccggttcgctcgactcctggattcaaacgcgactactgcagcagcgcaagcgatctcggacatagacggcgaagctgcaacgatgtggtcgttcggtactgcacggttagaggcccgcacgatagccgcttacattgccgccgatactgaatcgacgggccgatcacccgcagactacgcactcatcgcgcgtcaaagagtggctgatttcgagcccgagttccgtgacgctctaagcgagtacgacatcgtggtccgaaatgatgacgcctcagtcggaaagatgaagcttcaggacctactgaaggacaacttggctcagctactactcggagttctcaagctcgccgcgacttcgcgcggtgaagagggtagcccccaggcttgggccggagtctcctcctcgatagccaatctgcggagtggcgacgaccagagcgttttcggctcggtcaggaccgatgatgaacttgcagcacgcctccgcattgtgcgtcagtggatgcgcgaccatgcatgcaaccaagacgcagtggacgcggtagtcgacctggtaacagaaatgatttctgtcatcaccgacggtcggatttacaacctcgccgacacagcggacgattttcaggtccgacaagatgcttttcgcatgcggcttaagacagcatgtgccgacgctggttcctggcgtgctgctgtgaccgcttatgaagcacgagatgcagttccactcttaacaattcatcgaagcaaaggactcgaataccacactgtatttttcttgggtttagatgatgaccagtggtgggcgcaccaacgagatctcgaagcgtccatcgccacattcttcgtagggctatcgcgtgctgcgcaacgagtggtcttcactcagtgcgatacacgcggtggccgacgcaacatcgccgacctctacgaaatacttgatcaggcgggtgttccggtgaccagattcggctag

SEQ ID NO: 78954 - DNA, 1680 bp, Sporomusa sp. An4
atgaattttgtatctatttcaattaagaatttcagaaatttcgaggagatacaaattgagttagctaataaaaatgttttctttggtttaaatgatattggaaaaaccaattttttgtatgctcttcgatatgtttttgataaggacattcggaaattaaatcttttagattccgattatcataataaaaagatagataatcctgttgagataattattacacttgatataagcgatgctatttgtattgataaccaaaagttgcgtgctcggctaggaggagcactgttaagttctcataataaggtttacattaaattagtagcagaatatgataaaaaggaattaattggaattccaatattatactgggggggcgatagtaataatcttcgggagatgaagcaacgaggctatttgtatgaaatagattatgtggtcaatgtgttatatattgattcttatgtggatttaaattcattgtttaaaaagaatgttaattcgttgattaaaaacgaaagtgatgttgataaaaaagtattggaacgtatacaacaaacgataattaaacttaattctcatatctcatccttatcaggtattaaagaatttgaaaaaaaagtcactcccgaatataaaaaattcagaaacgaaaatgtatctatatctataaaatcagaaatagcggttaagggattatattcaaatatcgttccgtatattaaacaagatagtgattcaaatttatatccgacagctggtgagggacgaaaaaagttattggcgtactctatttttgatattatttcagatgaatacgccgagacgaaaatcaatctgtttttagttgaagaacctgaaaatcatcttcataaatctatgcaaattgccttatctcagattttgtttactgatgaaaagtataaatatctttttgtgacaacacattctccgtttgtattatatgaaatggaatcagttaatcttgtacgtatttataatgagactaagataaacagtgccagtacgttttataaagtacctaaagagtacaaaaagaataggaaaatgttaaaccgcggactatcggaagctatttttgctgatagagttcttctagttgagggtccatctgaattaatgttatttgaaaaagtactatcctgcatcaatccgttctacgaagctgatggtacatatattttagcggtagggggtataggattcgaaaagtattttgttattttggataaattaaacatagataatgtgatcaaaactgacaatgatttgcgttatgtaaaaagcacaaaaacatatagtttacttggattttctcggtgtaataaaattatagacgaaaggttactgccaactaaacgaataaaagaaaatagcattgccgcaaagaaaaagttatatgcacacaacatcactcaattaaatgaaattcgtgatgattataaagtttttttatccaaatgcgatttagaaaacgatttagatgaagttcttcactctgagttagtaaaatatttaaatacagaagatgcagtggcctatctgcaggatgcaaagcattataatatggttaaattagttgaaaaacttactgacactgactgcagaaaaatatacaatcattataattttgcttgtttgaaagcagtgatgctatga

SEQ ID NO: 78955 - DNA, 1509 bp, Sporomusa sp. An4; identical to SEQ ID NO: 73591

SEQ ID NO: 78956 - DNA, 1671 bp, Acinetobacter baumannii; identical to SEQ ID NO: 71826

SEQ ID NO: 78957 - DNA, 1782 bp, Acinetobacter baumannii; identical to SEQ ID NO: 71827

SEQ ID NO: 78958 - DNA, 1671 bp, Acinetobacter baumannii; identical to SEQ ID NO: 71826

SEQ ID NO: 78959 - DNA, 1782 bp, Acinetobacter baumannii; identical to SEQ ID NO: 71827

SEQ ID NO: 78960 - DNA, 1599 bp, Chlamydia trachomatis
atgaaagtcaaatccatcactatcaacaaccacagcaggatttccaactgcaccatcgatgtcagagacaacttaatactggtgggagcaaatggcagcgggaaaagctcaatcataaggtgcgtagacctggtgcttggcaagacgacacagcagctgtactactccatcgacaactctgacttcgagaacgaggggcagccttttgctgttgaagttaagttagaagggctcagcgaagatgagctgtcgtttttcccagatgattacgatgtaatagacaactcgttgaccgttcgcatggaagccgctctggacaaggacgatctcactatcaggcgatactttccaaaaggcgtcggcgataacaatttgagaagagagcaacttgagagcatcggatggagcatgattcctgccgatttttcaaccacgcagcttgacccaggcaggaagaccatcgttgatgactacctcaaagaggtagatgcctctggagacgaatcgaaattggctgaggccatcaagtctctgagtgatgcgattgacagctcggatgccttcaatgaagcattgagtaccctagcaggccagcttgaccctgtgctcgatggaggcatcacgtcaagcaagcttcacttcgtccccgaagcggcaatcaacggagatctactgaataacgtccggcttcagattgagggcaagtcaggaaccgctcgtcaggcaacagagcagtctgacggtaccaaagcccttatagcattctctatctttgagctacttaattcgggcggaatgatcgccattgatgagccggaaactcacttgcatccatcggcgcagcgaaacttgatacgtattctgaagagtgcaggaaagcagcttgtcatagccacgcattctggagttgttgctggagagttcgaacccgacaacataacggttactcgcgaagggattccgcccgtacagccaagtcgagggttccttacgggcaaaaaagaccaggcaacccttgcaaggtggtggataagcagcaaaattgagcttctgacggctaaacagattatcgcagtcgagggacagtcggacagaatggtccttgaagaggctgcggttaagataggacgtcacctcgaaagggacggtattgaaatcctagaagctggcgggtgccaagaaatgccacatgtattagacatctttggagaaagtggattcgacctcaaagtcagtattttgattgatgaggatgacggaagaaatctagccaaactagcgaagagccttggagtcacggttgataacctcgcagagaaatccgtctttgtatcaagaaaagatcttgaagacgagtatgtttcagctattggggcggacaggctatggaacgcaatgtgcaattcgagcctgttcactaaaaacatgctgaagtgttgcaagattgcacccggtgccgcaacgccaaatgagcaggacctggcgaagtactgccgatcaaacaaaatcatatgtgctgtagtcgcctgcggaacatttgacaaagggacggcggagaaagtgtcaagcgttgctaaggtgctccaaaatgcaagctag

SEQ ID NO: 78961 - DNA, 1722 bp, Chlamydia trachomatis
atgcaagctagcgcacctgggcccaccaaggaacaacaagagattttcgattacgagccttatagcatgatgattaccgcgccagctggctgcggtaaaacggaagcgcttgcctatagagcaaagggtctccttgaacgatacgatttttcaggaaacggcagaagactgcttatcacctccttcactaatcaggcgaaggacaacattagcgaacggcttaagaagtacattggtgtgcagacgctaagagagcatgtcatcgtctgcaattttcacggcctagcctcgcgaattattaaggcgcacggtcaacttataggcattggaagtgattggactcttgcaaatgttgactgggtgggaagagagctacgtgctggtagatacggatggaatgacagcgaccgagctaggcaggtcttacgcgatgtaaaactgaagtgtctgaccgatgacaacgtaatgaaacagcttgaaggcactgttgggcaagctggggaaattgctcgcacgattgagaaaaaacgcatcaacgaaaagatgatttcctacgacgaccaaattagggttgcactgtggcttctaagcgatcatagggtagctgacctttacagaaattatttcttcgcggcgctggttgacgagtttcaggatctgactcctcaacaattgcggttcgtgaaggcactttgcggagaaaacatcacttttgctggtgacgttgctcaaagcatctattcgtttgctggagcagatgtagcctacgtacaacaggagattgccaaagattctggtaggcagataaagttactgaagtcatttaggtcggcacctgcagttctgaatgcagtcaactctctttctccggtaaccggtagcgagcatctcagagccgccttccccaatcgctggggctcgggtggagtcgctgggcttgcatcttttgatgacgaggactgtgaagccgcgtgggtagctggcatgtcaaagtcaatcttgcgtcattttccacatcaacgaattggcatcatcacgaggacggttaaccgggctatcgttgcgaagaggactttaacgcaaagcggaatcgaatataccgattggggaagaggaatcttcagaccagaggtcgccggagtccttaagcgcatctgttctgatatacaaacccactcctttgcaaataatcttgaagctctccaatacattcaacagaaggctgctacctattatcacgtgggccaaactgaggagtttgaagaaggctgcgactggctctttgatcaatttttccaacgtggttttgatttatcaaaagcgcacgaaatcgaagagaacattgccgtaaaaagaggtaacgagactatcgcaacgcatgaaggcgttcactgcctcacaggtcatgccggaaaaggccaacaattcgactgggtattcgtgcttggcttggaggatggaactatacctgactttagagcgaaagaccccgagtccaaacgcgaagaagccagggtgctttctgtaatgatctcccgtgcgcgaattggtgtcttcgggacttatacaaaaggaaaagttgatagatggggaaagtatcgcgagaatacgccctcggagtttatcgagtatctgaaaaaggcacctggattcttgtgtggcaaagacgctatcgagacatggtgcggcaaagctgactacccagcaatagcattgatgtaa

SEQ ID NO: 78962 - DNA, 2076 bp, Ketogulonicigenium vulgare; identical to SEQ ID NO: 72448

SEQ ID NO: 78963 - DNA, 1761 bp, Ketogulonicigenium vulgare; identical to SEQ ID NO: 72141

SEQ ID NO: 78964 - DNA, 2022 bp, Alicyclobacillus ferrooxydans
atgcaaattacgaaactaaaaattaggaatttccgttcatttggtgatgtcgaaaccacaatcccattaaaggacctctcagcactaatcggctctaatagcagcggaaaaaccgcggcgcttcaggctctccttaaattgttcggaactacgtccaaagaacgcacaattcaacgttctgattttcatgtacctgatggtgtggatcctataactattgcaagtgcctcactttacattgaggctgttattgagtttccagagcttgcagaaggaaccaccgttgagaactcgacagttcctccccactttatgcaaatggttgttgataatgagggagaaccaccctatgtcaggatgaggttgacttcaacttggcaaagaacgaatacaccagaaggagaaacagaacagcaacttcactatatacttgcgagtgaatccgaagatatttcagacactgatttaatccctgtttcgtctactgaaagatcaagaattcagatgttgtatgtgcctgcatctcgggatccatctgttcagttaaaaaatgcttctggaactattttgtggcgcctactaaatgggataaattggccaggagatatggaggctaaactgtccgatcagatgaaagttgttaatgacctgtttgacactgtagaaggtgtaaacgtaacacaaagtgtattgcaaagtgagtggggcagtatgcacaaggacgcccgctatagccgtacaggtataagcttccatacaaataacgtagaatcgatactcaaaaaagtagaagttaattttgaacccactgaactcccaactaaatacactgtagatgaacttggtgatgggcttcgttcgatattctacttgtctcttgtgtcaactcttctaaaaattgaaaacgatattctagaaagatcatccgattccgaaacagatcagccttttaatattatccctcctgcactaaccattctgggagttgaggagccagaaaaccatgttgcaccccatttgcttggacgaatagtgaaaaacttgacggcgattgcacaaagagctaattcacaagttctgataagtacacacacgcctgcaatggtaaaaagggtggatcccgagcatattctccacctccgaatagactctggtaccgactctacagtcgtaaaaacgatacaactcccccccaatcgaggggaagcatttaaatatgtaaaaaatgcagttcaggcctttccagagttgtattttgcgcggttagtcattcttggagaaggagacagcgaagaaatcgtaatttccagactccttgaggcttttgattcggaagtcgatttgagtgctttatcagtggtcccattaggcggacgccacgtaaaccatttttggagacttcttaaccaattagaaataccgtatatcacgttgctggatcttgaccgcgaacgggatggtggcggctggggaagaataaaatatgttatccagcagttgctagctaatcaagttgatcataactcattattgaccgtctccacggaagatggcggaacgtcggttttgtcggcagaagatctggatgaaatgcacgaatgggatgtaaccaataccgaatccatggaagaatggattacttcgctcgaagagtatggtgtctttttttcaaaacctcttgaccttgacttcatgatgttaaaggcattcgagcaggcctatcgctcaacggtcccctcaggcggaggtcccagaattccagatataaagaaggagcccaaagaatattcatcaaaaaggcaagcatctgtacgggctacactgaaagaccaagggggcgatgggactacctatgaagactctgagttagacctaatgatttggtacaattatttatttcttacccgtggaaaaccagcaacacatatattggcattaaccaacataacggatgaggctctgaagaagaatgtaccggaatctttacggaagctaatgacagccatacgagaacgactttaa

SEQ ID NO: 78965 - DNA, 1884 bp, Alicyclobacillus ferrooxydans
atgccccgctatattacctcaacttcatggattccatcagacaacatggaactggaagcggccgctctacttgcggtcaaaagcaccaaaaattcgtacgtcattgcggggcctggtgctggcaaaactgaactactcgcacaacgtgctagttaccttttagaaacaaatacgagtccattaccaaagaaaatattagcaatcagcttcaagaaggatgctgcgaaaaacttgcaagacagagttttaaaacggtgtggaaaagccttagcaacaaggtttgagtcgcttacctttgatgcatttggtaaaaggctgtttgagaattttaggaaggcaattccagagtcgtatcgtccatcaaaggagtatgagttgctagcacagtttggccgcgacgctttggaacaagttttcatccaactgtctccgcctaagcaattagggaagtacggattggcaggggtgaataaagggcaatttttgatgcagtacactgccagccaattacctcacgttaacccagaaactgactctatcctgaattgggcaattcgcaacacatggacatacatgttgaatagtaacggtaaaaagtcacaatgtacgtttccaatgatatctcgtatcgtcgaatacatgttgagaaaaaacccgctgattacacgcgctctgagaagtacctatagtcacgtatttcttgatgaatttcaggacaccacagacatccaatatgatctcctaaagacggcattcaaagattcttctgtagtgataacggctgttggggatgataagcaacgtattatggggtgggcgggtgctatgcataatgcgttcgaaacttacaagacagactttgatgcggacgagtttgttttgttgaggaattttcggtctgcccccaatctcgttaaaatgcaacaggttttagcaacgtctctgactgacaattcggttgtggctgttccgagtgaacgttggaacgaagacgaaggcacttgtgaaatatggaactttaacgacgaacatagagaatcggtttatgtggcaaatcaaatcagaaactggattgcatccgagggtattaatccgagggatatatgtattctttccaaggttaagcccgaacggtattgtggctccatcatatcggaattatcaaaattcagcataaaagcaaggatagaagctaatttacaagatattttgtctgaaccctgcgtcggtgtcattgtcgattttctgaggctggcttgctacaaacaggctccaatgtcctggggcaacatagtaaaactgctgtttcacataaatggaataaatgaggaggctcgatattctcaagtttacaacttagagaatgagttgaaacgatttatttcgggactctccgaccaaatgctggatatggataaactaagcttagcacaagttcaggctttattatggagtactgtggaattcctgaacgaagatatacttagacgaattttccctgtataccaagttggtgactatctccaaaaagttgtttacgctatggcagattatctatatcagtatcttgttcatgacggcagttggacttccgctatcgaagattttattggaattaacactattcccattatgaccattcacaagagcaaaggacttgaatatgacacggttctattcgtaggacttgaggacagtgcttttttcaaatttcaagaacaaactgatgaagacactgctgcattttttgtagctttctcacgtgcaaagcgtcgagtagtcttcacgtattctcaaaatcgtcaaaggtcccaaagtcgatcaaacattaaatccctttatgatttgctcagtgatgctggggtgaaagagataacaatttga

SEQ ID NO: 78966 - DNA, 2022 bp, Alicyclobacillus ferrooxydans; identical to SEQ ID NO: 78964

SEQ ID NO: 78967 - DNA, 2190 bp, Alicyclobacillus ferrooxydans
atggatgcatggattcgggctacgataggtggacggaaggtcaggctcacgtatgacgatttgatgcaaggtgatgccaagactcaggagcttcttcatgaattgtatgaggagggagccgatgtcgaatgtatgtgttgtgacaagcctgtaccgatgcacatccggagaattcgaattcgtcctccgacgtattgcctcgtgacgaataagtactaccagcatgcgaatacctgttttcggagtagtcaatccctcacaatgccaccacctgatcaaactcaacccgtgctacgtaatgattcccccaaagcccataacaatcaaactgagatgatatatgaaacgcatgcgtcacaacgtgaactcaccatcaataggtccagtgcagacccaccagcccaagaaaggagaacactcatgccgagtgtagcagagctcaatgttgctcagagggaggcggccaagcataaagatggcccatgcattgttgtcgcagcggctgggtctgggaaaaccgcgatgctcatcacaagaatgaagttgcttgtggaaaatggcgtgcaaccggagcggattcttgcatgtacgtttacacgtaaagcggcagatgagatgaaggaaagattggttgctagtcttggaagtagaggcagtcagattacaatcggaacgattcactcgattgcctatcgtatggtgatgccgcaacttggccacggctggagtgtggtgacagaaccatcctggttgattgagcagatactcgaacccgcccattcacacaacccatttggggtagggaagattcttgggccgaccgaagcaattcttggcgtacatcgtgcaaaggcagatgcactttggccgatgcaggttgatgggaaactggggaaggtgtacaaggcatacgaaaatctgaagtcagagaaaaagaaactggatttcgaagaccttctgcttcacgcagtccgcttatttcagactagacctgacgtggcacaactgtggcgggaacgatttgactacgtattggtcgatgagtttcaggacgtcaaccagatacagtggctgttcctatgtgaactggtgaaagagacgcgaaacatttgtgtggtaggcgatgattggcagagcatctatggatttcggggcgctcgtccttccctgatgcaagattttctgcggcagttccctgatgcgaagaaagtcgtgttatccatgaattatcggtcgcatgacttgattgtcgaactcgggaatcgtgttattacactcaaccacgggcatcagatagagaagcgggttcaggcgaaccgtggcatatctgaaagtgccaacgttcagattgtaacggtgcagtcagacgtagaggaagcacgttttgtctcgaacgaaattcatcagctgaaagcacgatttccagaggttccgtatagcgaatatgccgtgttatatcgcacgaacatacagtcacgtgtgtatgaagaggcgctggctgaacatgggatcgcttatcagattgttggggacacccatttttatgagagccgtgatgtaaagatgattctcgattacctacgtacggtgtgcgataaatcggatccgggactttggggaccgctcatcaatcgtcccaagcgttttgtgccgaatacggtcgtacgcgaagtgcaacagggtggttggaccgctgttgaaaatcacgcgaagtgccacgcgtttcttacaaccattacggaattggagaagcgtgcgtctccagcggacgccattcgatggctagttgaagcggaaccggagattgttcgttcccaggatgatttagagccgattagatgggttgattcactcatccaatccgccgctcggtttgaaaccatacatgagttcttacgattcgtggattgggttacagagtggagtcagaaaccaaagcgggacgctgtgcagttgatgtccattcaccgtagcaaaggattggaatttgagacggtatttgtaacgggccttgtagaaggactacttcctcacaaaaagtcgttgacagaggaatcgctgcgtgaggaaactcgactctgctatgtcgccattacgcgcgccaaggagaacctctacctcttatcgtcggagacgtacggcaataccgcgtttgaaagatcacgatatatcaaagtccttcaggaataa

SEQ ID NO: 78968 - DNA, 2064 bp, Paenibacillus sp. A3
atgaatattacagaacttaggattaaaaactttagaagttttggaagtgatgataggcctataaaaattgatcgtttgacaaccgttatcggagctaacagtagcggaaaaactgcattaatccatgcattattaaagctatttggggtaaatccaaaagatagacagcttttaaggagtgattttcatgtaccttataataaaaagcctgaggaactatctgaagacaaaaagctttctatagaggtgaaaattgagtttcccgaactaaagaaagcgggtataggcgataacactgtaccatcattttttaaacaaatgatggtaggtgagcctaaagaaattccttatcttagaattcgacttgaagctacgtggtctcaggtggagatacctgagggggaggtagagacaaaattattttatgtcactgtaccctatggtgatgaagaaaatgaggaatctttaaaaccagtacctgcacatgataaatctctgatacaaatgatttatgttcctgcagttagagagcctgctagtcaattaaagaatgcctcaggaactatcttatggcgtcttttgaaatacattgcttggccagagaatacaaatactgaaatacagaagaatgtactacctcttgaacagtttcttgaaagtgtcgggggactaaaggaggttcgagaagagatgcagaaggcgtggaataagtatcatcgcgatccaagatatagaactacagatattcaatttagtgaaacttctttggatactttgcttaagaatattaatatccgattttcgccaactgaggatgtaactaactattcaattgatcagttgggagatggcctacgatcgttgttttatatttctttagtttcaacacttttggaaatcgaacaaaaaataattaatgagaccacaggtaaatataagaaaaaaaaggggcccaacgctctaaccattctagcagttgaggaaccggagaatcatatctctccacacttgttaggcagaattacagcaaatttacgaaaaatatcgacaacagataatgcacaagttattattacctctcatagcgcttctattgttagaagaatagaacctgaagagattaggcatacaaaaataataaccagcggatcaaaaaaaggaacaacctctatctcagaaatcaagcttcctcctgaaaaagatgaagcccataagtacgtcaaagaagcggtaagggcctatcccgagctttatttcgcgcaacttgtaattcttggcgagggcgatagtgaggaactaataattccaagattacttgaggttgaagatataattttagatgacgaaacgatattggtagttccactcggaggaagatatgtaaatcatttttggcgattgttaaagcaactagatattccttatataacccttttagacttagatcgtgaacgtgggggaggggattggacacggataaaatacgcaataaaacaactattagaaaatggtgctgaccctaaaaaactactcctgatgggagggaaaatggttagcaaggatattattgaagtaatgcacaagcgaacaatgactaaacaaacgggttgtaactcaattaaaaatatggagaattggattaaaaaattagaatcgtataacgtgtttttttcttcgccgctagatatagattttttaatgctacagtcgtttacggaggaatataaggcagtggctcctcaaggacctgatttgcctgaaaaaacaatagaccttgatggctataatgaagcggtctccaatggggtcagagctactctaaagaagaagaaggatgctactggatttggctatacgtttagtgatgaggaaaaggaattaatggtgtggtataacacactgttcttggggagaagtaaaccgagtacccatatagaagcacttgtcaagattgaaccaacccaattttcggcgaattgtccaaaaccattaaagaatgcaattaatgctataaaaaagattttggaagagaagaatgctataaataacaaggagaaaatatga

SEQ ID NO: 78969 - DNA, 1899 bp, Paenibacillus sp. A3
atgagtaacacttcaggcgttaaaaaatggttaccggcagataacattaggcttgagaaagcagctgagcgagcagttttcagtgaaactaatttattggttactgctggtcctggggcaggtaaaactgaattacttgcacaaagagcatgttacttactccaaacaggagtatgtaggtcacctaaaaaaatcttggcaattagttttaaagttgattctgctagcaatttagaaaaaagagtgttaaaaagagttgggaaagaactatcaaaaaggttcgaatctagaacatatgattcttttgctaaaaacctcctagatcactttagaaagggattagaggaggactattgtccagatcaggattatgcaataataacgacaaaagaagaacttaaagaactggttgttaccatttttagagacaggtaccctgttcaaaaaattaactatggtgacttattgggtatgttggcaaacgatcagttgcctttaaaaaatataaataataacaataatgtttatgatatgttggttaatgaattatgggcagtaatgcccaaagggtcaggcaactttatatcaacattaacatttccaatgattactagattgaccgaatatttagtgaaaactaatagctacataaagaacgcactaagaacaacttacagtcatgtttttctagatgaatttcaagatacaacatattttcaatatgatttattaagggaaattttcttgaattcgaatgcagtcataacagcagtgggggacaacaagcaaagaataatgggctgggccggtgcattagaaaatgcttttgaagattttaaaaatgattttaatgcaagtgaagaacaattgatcagaaaccatagatcagttccttatttgatagatattcaaaattatttggctaaagatctcgatcctaatgcagctaaagtagaaacgcctgtaaaatcaaaaaatgataaaggggaatgtcaggtttggaaatttacagaccattatacagaagcaatttatttgtcggaccaaatacaagtatggttaaaaaatgattcaattaagcctcgagatatttgcattctcgttaaacaacaagaggaaatatatgcagatgcgatgatgtcggagttgaaaaaaagaaatataaaagctcgtgttgagaaggaatatcaggatctactatcagaagactgtgtcactttattaatacatatgatgaagctaacagttactcataggtctcctgagtcttggcaatatgtctttgatactttaatgcatttaaattcctttaatgaagaggattcaaataaagtatacgagttggatgaattactctcaagatttattgataagttaaaatctgaccttattaaggtcaattccccgaaggcgttagatatttttttctttgacatgtttaattttattggtattgaccgatacagttcgttttatcctcagtataaaggaggaaagtacctttctaaattagtaaagagtttttcaaagaaaatttctaactcgtatcgtttattacgcgattgggagcaagctttaaatgattttattggtgaaaacactataccaattatgactattcataaaagtaagggactcgaatataagacagtgatctttattggtttagaagacgctgcgttttggaactttgtgaaccaatcagaagaagataaacgagcattttttgtagctttttcaagagcgaaggaacgagtcatttttacttacagtaataaaagaatagtcaaacgttacgatgagttaagaaatttacctcagaactcaacaaatatttctgagatttacaataacctcaaacaggctggtgtcgatattattgacatggtaaatgtttga

SEQ ID NO: 78970 - DNA, 2073 bp, Listeria monocytogenes; identical to SEQ ID NO: 72152

SEQ ID NO: 78971 - DNA, 1734 bp, Listeria monocytogenes; identical to SEQ ID NO: 72165

SEQ ID NO: 78972 - DNA, 1797 bp, Pseudoalteromonas sp. P1-8
gtgtttctatcaaaactaacaattaaaaattttaggcgtcttgacgagattacttttaattttgtagatggattgaatgtaatcgttggtgaaaacaacattggtaaaacagcacttgttgatgccttaagggttattctggcaagtcatgaagatccttatttaagaattaccgaagatgatatatttcaacctcaagatggaagggaagcatcaggtgatattacatttcactttgtattttcagatttgaatgaatctgatgaagctgattttctgcacgccttggttcctattgataaggaaaattttgaagcacatatacacgctcggttttctctgattgatgcttcaggtcggatgaggttgaaaaggtggtgtggagaacatgaagaggtcgggatgacttcagatatgctagaaaacttaagaggtgtttatcttcagccattacgtgatgcatccaaaggattaaagccgggaagaaatagccaactagcaagattgatgagacttattggagaagaagatactctaggcaggcagagtgtggatgggttagtaagtgcttttgagaagcttttgaagcgtaaaccaccattagtctctacagggaactccattgttgaaaaacacaaagacatgttaggcaaacagctttctcaagagctttcactaggcttgagtggtgctgatttcaaagagctttcatccaaattatcaattacagcaaatggtatggaaatagatacaaacggccttggatataataacttaattttcatggctgtggtcttaagtgaaatgataaaggatccttctgccgcataccgaggcttgataattgaagagcctgaagctcatcttcacccgcagttacaggttgttctgttagattattttcaggctattgctgcaagtaaggtagaaaaatccatccagcttttcgtaaccacccactcttcaaattttgctagtttagctaacttagaaaacttaacgtgtatggtggatcgaaacagctctgttaaagttttcaacccgcgagaagctacctttgacccatctccaactaaagctgaaaaaaagcgaaaaaaactggagcgttacttagatgtaacaaaagccgaattattctttgctagaaaattgattctagttgaaggtacggcagaactaatgttgataggggtattggcaaaacaacttgattatgatttgcaaaaatatgcggtaagtataataagtgttgatggtctgaacttcgattgttttttaccgttaatgggtcaagaaaagttggcaataccagtatcagtaataaccgatgctgatcctaccaaagaagatagtagtggcaacaaaaagactgttccactttatccgtctgctaacgataatgttatcgcttcagataatacaagagttctcaaagggcaagagtgtgagctcgtaaaagtgttttttggggtaaagactctggagtatgatctagcattgtatgaagataatcgctcagtaatgttagacgcactatccgaaatacatcctctgatagcgaaatcaattaaagatgaagtaaatgataaaacaacagatcaagaaaaggcaaaggcactattttgtggaatgtttgaacgtggggatggattgaaaaatgttcaaaaagggcagtttgcacaggagctagcgtaccaagtctctaatacttcagctaattttgttgtacccggttatataagagatgcaatcaagcatgtgatcgaaggagaggacattttagatgaagctttctga

SEQ ID NO: 78973 - DNA, 1740 bp, Pseudoalteromonas sp. P1-8
atgaagctttctgacgagcagcataaggtcgttttttcgcccttgaaacccctttctgttattgcttgtgctggtagtgggaagactacaacagcggtacatcgcctttcacacgttaggcattcattaaataatgaacgtggctatatcgcactattgtccttttctaatgtagcggtgaatacttttaagaaagatttcatgcagcatgcttcaaaccaaaccaacaagcacccttattcagatagagttgttattgagaccttagatagctttattgtaggaaacgttatacggcctcatggttcaagagttatgggctgctctggtgtaccctttttgctctctggaggggaattatttttaaaaaatagaaaatttaactttgagatagagacccaaactgggcgaaaaacaattggttcggataaggttgttgagcttacatgccgtgtagtcgatattagcgttgaatgctttctaaataagaacaaagtagctgaaggtcgagatttaatccttacgttaggaaaaacgggtggctatacacatgagtttggagggtattgggcctgcaaaatattgaaagaacagaagtcattagctaaagccatagccaaaaggtatccgcatataattgtcgatgaagcacaagatataggctcaatgcacgcatatttccttagtatgctgattaaaggaggttcgaaagtgtctttaatcggagatcctaatcaggctatttatgaatttgcaggagctgatggagcctttttaaatactcataataacaaaccgagtactttaaaatgcccccttagcttaaatagaaggtcgataaaagatatcgtagatgcagctagtttagtatcagggtttcagaatcaacatattagaagtaaagaaaataatgactttggcctattctattgcacatataaagaaaaaaattatacagaggttatcgactcatttttgtccagacttaaagacttgagtattaataaaaacaaaagtgctattcttgtaaggggaagtgaattaaagaaaactctccttggatctaatgggaaaagtggacaaggaaaaacaaacattttcgcgcaggcagcgataaaaagagacttgtatggtcacccatttgaagcttttaaattagtgttgcgttgtattgcaaacttgattgaagatgcgccgaaagagttctttactgatgtgctgagtgctgcaaaagataaacgtgaatatagcgagagtaaaaaagttatctggcaatttgttcgctcggaaagtgcaggtttaccttcggcaaaattacatgcgaaaaaagaatggcaccctaagttgaaagaaaaccttgctaaggtactaaaaaaaatatgtgaattacacggctttaataatgttagtaaattaggcaacaaattagcctctacaaacttacccgatagtgcccttttgccaagtgaatatgctaagagtgatgatagccgtagattaattcgtattgacacagtacatcaattgaaaggtgaaacacttgatgctgctatgtatattgcaactaatgatcaagtggtaaagatggttgaggggacttctactgaaacaggacgaataggttatgttgcactaacaagagccagagatttttttgtattagccatccctcgctcgaaagaaattgagttatccaaacttataatgccaatgggttttaagaagttagcttgtgattag

SEQ ID NO: 78974 - DNA, 1698 bp, Pseudoalteromonas sp. P1-30
ttgaaaataagtaaggtgcatttagaaggatttagaaatttttccaattcgaatattaattttaacaaaaacactttaattattggcgccaacgatgtgggaaaaagcaatttactccatgcattaagaatactattagacaaaagcttatctgaagtggatatcgagccaagtgagcttgattttcatattaatccgaccggtgtcagcgacgaaatatcaattaccgttaagttttcagatatcaccgaagacgctgttatctcggttcttaaggggagcgttagtgaaaataatgaaacctttttacgatataccgcagtacatagcagcctaagttataagctatttgttggtccttcagttgatgatctacaagaagtcaacagtcgtttttatctaaaacacatgcacttaaaatatattgagtctcaacgtgatttagagaggttcatccgcaaggaaaagcggcagctgttaaaaattgctcaagaatcactttctgacgatgagaagcaagaagatgatgatttacttggtgaaatcagtagtgacttagaaaacctcaatgataaagtctctcaattggtttatgtagataacgcaatgaataacgttaatgacgaactaaagaagttagctcatcattatgctaattatgaggtgcaacttgacacgggggcaattcaggtaaatgactttatagaaaagctacagcttggtgctaataccaatggctctaacgtgatgctcggtggcgatgggcgaaataatcaaatactgttagctttatggaaagcaaaaagtgcacaagaacatgatttagaaaacgaagttatcttctatgttatcgaagaaccagaagcacatttgcaccctcatcaacagagaaagttggcaacttatttaattgatgagttgcccggtcaaacgattatttcttcccactcaccacagataactgtgaatttttcgcctgactctatcatacggttacttccccaaaattcatcaacagtagctgctagtgagggatgctcagattgtattgagtcaggttgggaagatatgagttacagaatgagtattttgccagctgaagcatttttctctgacggtatattcttagtcgaggggccatctgaaatgctcttttatcagtcactatctaaagccttgaatattgaccttgattttgaaaacttgtcaatcctttccgtcgacggtatttctttcaaagtattcatatctatactcgatgcgcttcaaattccatggataatgagaaccgataacgatgtttcaaaaatatcaagtaaaaatgaatggcagcatgcaggcattaatcgttgtttaagtcttataggagaagacccattcgatagaggttataccgagttttcccctcaagatactgtggacaatggagagtggcaaacagcttcggatatgctcaatgaccaaggaatatttttatctaaagttgatttagaaactgatttagttgaagaactatctgatgaaatacaaacagcggttggaaaatctgacgatgattccgcaatcaagtaccttcaaggaaaaaaagcactaaggatgagaaatttgcttaaatctatttcaagagatcttcataagctgaatagaggtgaattagcaaaaccattgcacaaactagtagagatgagaaggtcttag

SEQ ID NO: 78975 - DNA, 1611 bp, Pseudoalteromonas sp. P1-30
atgagcacttttaatccaacactgcagcagcaggccgcgattgactgtgaagatagcattgtcattacagcttgtcctggtagtggaaaaaccaccgtgataaaggaaaaaatccgagggattacaccgaatctatctagtcataaaggtgtaattgctattacttttacgaaaaaagcgagtgaggagcttaagaagcgctgcaaagagaatgctcacgacacaaaacttagcttttacggcacaatagatagcttttgcttgaaagaattgatattgccatttttaggtcgaatatgggatggcaaaccgtctgattgtaagatagttaaaaaactagactctcatcagcaactttacttatccggagaatacaattcaccgacttgtgatgaacttagttctgatgctggttttaaagcattatacgatgcaggtatattgtggatgaatagttttgctgcattgtcattattaattcttaacaactcggttaccgcacagcgttatataagagcacgttactcgcatgtttttatcgatgaataccaagactcgtctcaatctcagcatgaattattcataaaaataaaagagcttggattaatcgcaacggcagttggagacattgaccagtcgatatatcaattcaggggaagtcagccaaaattcttgctagccttaatcgaagacaatgctaactttcagcactttgaactcgacttaaaccatagatgccacccatcaattgttaattatgcttcccgtgttcttgatcctgaatacaaattgatagctcatgaagatgatatttatgtgtttcgtcgtcttattaatggaagcttaaaaaatgctgcagaacatatttcaccatggatagacgattggttagaaaaaaacacaattaacaatgcatctgatgtagctatcctagctaagaaggaaatatcgttaagagaatttgcaactggtttaaaccataatcaccgactatatactgacagccccctcaatgacataggaactgaatgtgctgacgtttattcagatttgctattatataagtacggagctattccaaccgctcaagacgtaatagaaaagtatttctttcaactgccagcaagaaatatggcaaatatacgaagacaattaaagggtatccgagcagaagctatactagaggctttcattgagaagagtaacgacttacttgaattaatcgggttcgatgaatttgaagaagaaaatgatgctgtgaggcttatctggagcaaagatacatgggttaagctgttcaagccaatagctaaagatgaagttcagttaatgacacttcataaatctaaaggcctagaattcaaaataatattgcatttagatatggaggaatggtcttttccacatagaattccgggggttaactgggatgacattaactacccaagcctagccgaagatactaatctgcattatgttggggttacgagagctgagttatgctgcattttaattcgtacatcgttacgcagaaacgcgcaaggaaactatggaaactcaaggccatcttattttctaggtttacctcagcttgaagggttataccaatga

SEQ ID NO: 78976 - DNA, 2049 bp, Pseudomonas cannabina
ctgcctacgctatgtcagcccgcgataaacccatatccgtcgcggcatagaggaagggatcctgtgctaatcgaatctgccgtcctatctggtttccgttgctttgcgccccgtcctatcagcgtaacaatctcgccaaagatcacgaccatcgtcggccccaacgcggcagggaaaactgcgcttctacacgcgttggcgaagctgtttggagtgactcgggcacaacgcaccgtacgtcgctcggactttcacttgggacctgatgacgatcccaccagtcttgaatcaaagcacctctacattgaggttttgatcgcccttcccgaactgattgatggaactgcaacgccagaaacgatcgcaccttcatttcggcatatgctaatcgagcgaccagacgatgctcccgtctgtcgtcttcggcttgacgctcagtgggaggacgatggaaccgtggaaggcgaggtttcgcaaaccctgcactgggtcgacacgctcgacgatgcaccgccagaagacaagtgccaccccgtctccgtagccgatcggggattaattcagttgtattacacaccggcaagcagagacgctgctgctcagacccgggcgactgccggagcattggcggctcgtttgttacgcgcgatcgagtggtcgtccgataccgaagaggcggttcatgacgctaccgaaaatcttgcctctgccttcgaggaagaagcggcaattgccgcaatcacagaagctctacagacgcggtggtcggcacttcatgatgacgtcgtcgacactaatccgcgcctgagtctggtaagtcgcaggttcgaggaggtcgtcaacaaaattgcagtcatgttcgagcagggacctgacggtcaggagcgcggtatcgaggcgctcagcgacggtcaacaatcgctcttttacttcgctctggctgcggccgtcttcgacctagagcgtgaggttgtagcgggatcaattgagggcttccgaagtgacgctctgcggatacctgcgttgacgatcttcgctttggaggaaccagagaaccacctttcgccatatttccttgctcgcatcatccgccaagtccgatcactcacaaccgatggcagcgcgcaagccattgtcaccagtcactcacccgcagtacttagccgcgtcaatccgacggaagttcgatactgtagatgcgaccccaaaacgcgcgtgtctacggtcaagcggattaagcttccagtcaacgacgtggaggctagcaagtttgtaaggggtgcgatgttggcctacccagagctttattttgcgcggtttgttttgctggttgagggagattcggaaagaattgttttaccgcgactcgcagaggcgctgaatttgctgatcgatccagcctttgtcgctattgtcccattgggtggacgtcatgttcagcatttttggcgcttgcttaaacatctgggtattcctcacgccacgctgttggatcttgacctagggcgcgatggaggcggttttagacgagtcaaaacggcgatcgaaaagctgatcgagttcggtgcaccgaaagccgaagtgctgagaattacaactggcatcttatccgatgccgacttagcgaacatgcataattggcctgattcggtcgatcatagcggcctcctgtcatggatcaacaacaacctaaaagctcatggagtgtatttctcctcaccgctggatttagatctagcaatgctggaagcattccctgccgcctatgcagccatcgtccccgagcgcgggggttctcgcatggccgctgacaaagccgccgaagtggtattgggaacggcaggtcccggattaaaagcctacacagggccctttgttggttatccccctcaattcccgagttaccgctaccactttctcactaacagtaagcctgcaacccaccttgcagcgttgactcatatcacaaaggcgcaactggtagcgcacatgccagttgtgcttgcttcagtgctcaaacacatttccgcgtcgttgaggcgggactga

SEQ ID NO: 78977 - DNA, 1911 bp, Pseudomonas cannabina
ctgaacatgaccttatcgtcgcgaagagtcagctcagaaaactggaaaccggtaggggtaaaatctcttgaaaagcacgcgtttgaggtggtttgttcacacgtaaaccgatccgtcatcgcaggccccggcgcgggcaagactgaattactcgcgcagcgtgccgcctatttgttacaaaccggtgcagcacctgcgcctagacgtattcttgcgatcagtttcaaaagagatgctgcctccaacctcgccagccgcgtgcgaaagcgctgtcaccctgaccatgccggtcgtttggactccatgacgtttgatgcgtttgcaaagagcctggtcgatcgcttcggccaatcactgcccgagcgttggcgaccccgacccgattacgaaatcacaagctactacgagcgcgactacaaagacttcctctttcaagacgttggcttgcctccaacgacaattggcacaagggcggatctacgcgcagtcggaccgaaaatattcgagcgcaactatgtactcggccaaccgctcccgattgatggatggctgtgtccgaccgtcggccaatgggctgcggatttattctggcgggcatccctccacggtggtgaaaaaagtgtcttgtctttccccatgataggcagactcgcagagcttttactgcgagttaattccatggcacgtgacgcgcttcggctgacttactctcatcttttcatggacgagttccaagacacgacgcaggtccaatacgatcttgtgagtaccattttccgaggtactgacaccgtattaaccgccgtcggtgataacaaacagcaaatcatgcgctgggctatggcaatggatgaccctttctccgaattcgacgcagatttttcggctaagcggacgtccctctacaacaactaccgctcctcgcctgacttggtacgtatccagcatattttggctcaggccttggacatcgcagcggttgaacccatttcacagacggcaggtacgattaacgaagaaagctgcacggttttcgacttccccagcccacatgcagaagcacacaatctagccgtatctgttgcgtcgaacatcgcgtcgggcaaactcacaccacgcgatttcgttctccttgttcgccagaaggcgggggaatatgccgaggtgctagagccggcttttacggctcagggactgagcttacgcaatgaggcagggctggtcggagcgattatgttgcaggagttgctcgtcgaggaggtctcggtacttctggtttcgctacttcgcctatccatgacactccgggcaggacgctactggtctgaatgccaaaaatggatggcatcgttgcggggagtcgagttcgacgatgaaatcgggcactccaaactcacacgcgaactggacgcctgcgcgatttggcttggtgcgaaccggtcaagtttaccgactacgctgaaagccgcacgatcactagttgatgaggtcatgggctttgttggacttggccacctcaagagccgacaccctgcttacgcacaaggagaatggctcgaaaaggtgctcgacgctgctgcaacacatctatttaactgtgcaatcaaatgtgcagattggccttcggcactcgacacctatgaaggcgtcaatgccattccactgatgaccattcacaaaagcaaagggctggagtatcacactgtcatctttgttggcttggacgacggagcatggtggagtttttccaacgatgagattgaagcaaccgccggattttttgtcgccttcacccgagccaagcagcgcgtgattttcacatattgtgccaaacgcgggggccgcacgaaaattgccacgttgtaccacctgctccagacagcaggcgttcagataacacaaatatcctga

SEQ ID NO: 78978 - DNA, 1146 bp, Pseudomonas syringae pv. coriandricola
ttgccggaaagctacaacggtttaggcgtccgcaatttggtatacatccttcttcagttgctaaaattctttagggagtttcaggcaacgccagcagcggcaagtgtccacctcattttcatcgaggagcctgaagcacacttgcatccccagatgcaggaggtcttcatccgtcagctccatctaatcaaaggggagtttgagaagcagttgaacgacagtcggccatggccggtgcagtttgttatttccactcattctccgcatatggccaacgaggcgcgctttgaaaccatgcgttactttttgtcagctaccgatgaacacggtgtgcggcagtccaaaatcaaagacctcagacaggggatgggtagcgtttctctgccggatagagactttctgcaccagtacctcacgctcacgcgctgtgatctgttctttgcagacaaggcaattttgattgaaggcacttctgagcgtctgcttttgccgaccatgattgccaaaactgacttagctgcggccggtgagtccaagcttgcgagtcaatacgtgaccgtgatggaagttggtggggcgtatgcgcaccggttccacgaccttctctccttcctggagttacgtaccctgattgtgacggatatcgattccgttcagccaaacgaggacaagaaacgaaaggcttgtcctgtggcagaaggtcagttcaccagcaatggatgcctcaaggactggtttgaacccgacatctctccgacgcaactgcttgcaaaaacgtcggcagagaagactaagggaactagacgtctggcttaccaggtacccgaggtagccggtgggctatcgggcaggagttttgaggacgccttcattctggcgaatcttggcctatttgatttaggccatggtgatgcagcgcttttggcttatagacatgcggctgatcagaaaaaatctgagttcgctctgaaatatgcgattgaggatacaaattgggcggtgcctcgatatatcgcagaaggattgcggtggttggccgttggcgctccggtcgtcgatttgcaggcaactgtccaagcaatggccgccgtcggagaggctgccggtcaggtaatagccactgaaagaggcaatggtgatgcctaa

SEQ ID NO: 78979 - DNA, 1764 bp, Pseudomonas syringae pv. coriandricola; identical to SEQ ID NO: 78355

SEQ ID NO: 78980 - DNA, 2337 bp, Pseudomonas syringae pv. coryli
atgcatattgagaccgtttgggtgcgtaatttccgtcgtctgaaggacactcgcatcgatctggcgtccgatatttcaatattcgtcggggccaacaacagcggtaaaacatctgcggcgcacgctttgcagctttttacctccgcttcgaaggatcgatttaccctccatgatttcagctcagagtgctgggacgccatcaacgctttcggagaaggggcggacggagtcgaactgccaactatttccctcgacatctggttctgcgtcacgccagccgatctgcatcgagttgtagatctgctacctagcctagattggcaaggtaaccgggttggtattcgagtggagctcgcagcagcagatgccggccttctgagaagcagtttccaagaagcacgggccagcgcgcggcatgctctgttgcagccaacagaggaaggcgtggcacagcgagatgtggagccagccattgcgcaacacgggtacaacccgcgaccgcgtgacctttgtgacttcattgcagataccgtaggtgacaggctacggcgtgatttcgaattgaggtactacatactcgatagcgctggatttgaccctgagtttagacagcttgatggtttcgtgccgctacgcctgattcctgataagggtcgcagtggaagggatgtactgggtagcctggtaaaggtcgactgtttacatgctcagcgtcacctgtccgactccaatgctggatctcgatctgaagatctctcccgctgtttgagtcgtttctacgaaaggaaccttgagaagcgcggcgaggattatgacgctcagcgcgcactataccagtccgagagcctgctgaatgaccacctggaacgtgttttcggtcccactttggagcgtttggcagatctgggctatcccggggtcaacaatcctcggctgctgatcaagactgcattgaaccctgcgaccattctgagtagccatgaaggggcacgtgtgcactacgcgcttggcgctctcggagcagcagaggtcacggcaaccttgcctgataggtacaacggcctaggtttcaagaacctgatttatatggttgttgaactgctcgatgttcacggtcgatggttggacattgaggaaaaccgcccaccgctccacctgatattcatagaagagccggaggcgcatctccatgctcagctgcagcaggttttcgttcggaaagtgttagacatcctcgccgtgccagaggaagacagcccatattgcaccagccagcttgtagtctcgacgcactcgcctcacgtcctttacgagcgaggcttcaaacctattcgatattttcggcgagtagcggatgccggcatacagcaatctaaagtgctcagcatggcagctttttatgaggcggccgtagatcctaacgacccgaatgaccgcactagggattttcttgagcgatatctcaagctaactcactgcgacatgttcttcgctgatgcggccattttggttgaagggaacgtcgagcggctgctgatgccgcaaatgattgctaaagctgcacctcgacttcagtcgaactatttgagcgttttagaggtgggtggtgcgttcggacatcgattcaaaggcctcattgatttcttggggctcacttcgctgatcgtgaccgacattgacagtgtttctccgcccgcagcgggcgctttagccgcaaacggcgagttgccggttgatgaggatccagcggatgcagagcctgacgacaatgaggacgcggaggaggctgaagcgagacgtaaagggcgcaaggcgtgcatggttcatgaagccggggctcttacttcaaaccagacgttgatcaagtggctgcctgggcacaccacgattgacgatctgctggctgcgactgccgaacagcgcactcaatcccgagacgaagaaggcggcgcccttgtacgtgttgcttaccagacaccagtagcggtggtgtggggcggagcgactcaggtgaggacaggcaggacgttggaggaagcgtttgcactgcaaaacctagcctggacgcagcacctggaccgcaaggatctcggcctacgtatcaagggttccaataatctggaaatcgcaggtattgcggagcgcctttaccgtaaggtcaaaagctcaagttttcgtaaaactgatttcgctctcgggctgctggctcaagagccatcggcatggacggtgccaaattacatttcggacggtcttcgttggttggaggatctggtcgccccgccaccgccagcagtagctgaggcggaggcgcctctcaacgggggtgaggtatga

SEQ ID NO: 78981 - DNA, 1899 bp, Pseudomonas syringae pv. coryli
atgactgcgcgtatcggtcagccggatactcaagcagatatcgaactaaggttgtgcttggaccagcgtcctcaacgcagctttgtcatggttgctggcgcgggttctggaaagacgacgtcgctggtaaaggccctggcgcacctcggccagacgcgaagactaaagctcaacatgcgtggtcagagagtcgcttgcattacctacactgaagtagcggtcaaggagatctggggggacgtaggtaacgatccgctgttccatgtctcgacgattcatagttttctgtggacggtaatcaggccattccaagtgaacttgaaggcttgggtcatcgcaaggatccacgagaaaatcgccgaggcgcagcagcatcacgacaagcctaggactcgggcagcaactcgtgagcggctcgtgaaagatatcgcgcgttaccagcgtcaccttgaggccgtaaggcatttgactcattttaactacggcgccggaagcgatttcgggcgaggtgtactcgggcacttcgacgttatttcggccgcggtcgagctaatcgagcagagccagttgcttcgtgatgtcatcgccagcaggtatccagtccttttcattgatgaaagccaagacacgcgtccggaagtagtggctgcatttagaaggatcgccgagacgactcctgtggagttctgcctcggattttttggcgatccgatgcaaaaaatctaccttgaaggtgctggagtcattgagacggccgcaggctgggagcaaatcaccaagccagaaaatttcaggtgtccgcagcgagtgctccaggtagtgaatgctatccgggagcccgatgacggtttgtctcaaacacgaggccggatgaactgggtcgacggcaatcctgaacctgttatgggatctgttcaattcttcctactgagagcagatgaccatcgctctatgaagctagctaaagttcgtgaatggatgcggcgtacgaacgatgacgatcattgggtgagtggtgatcttgccgctgacttcagggttttggttgtcgtgcatcggatggcggcagcgaggctcggctttccgaatctttacgctgctttgaatgacaacgatgcaccaccgtccatcaaggagggccttaaggacggcaccgcatggccgctgcggccgtttctggattacttgctacccttggcaacggcggtttcagaaaaccgaaagctcgacgtcatgacttttctgcgttcggaatgtccattattgcagccaacggctctggtcggtagcgatccggtagcggtgcttcgggcattgcaagcatccacaacagagttggccagactcattttttcgagcgatgcattgctgcaggacgtgctcgttcactcccaggcagcaggtctgctacaactggacgaagcgtggacaaaatacttgggcccagaccgcacagctgacgatgatgatcctgagatccccgccgtgtcggctttcctacgttgcggtgtcggtgaattggctggctatcgtcactacctcgaagatctttcaccgtttgcgacccagcagggagtgaagggggcggaattcgaacgcgttttggtgctcatagatgacgaagaaggtagaggacaaaggcagttctcctacgaaaaatacttcggcattgtggagccctcagatactgatctggaaaaccttgcacagggcaaggatagcgtgatggatcgcaccagaaggcttttctacgtgtgttgctcccgagcgactagggatctcgctgtggtcatgttcgtgcaggacatcgaaaccgctcgagaaaaaattgccgaaaccggcatctttgattctgccgacattgtggatgaggagactttggaagccgctctaacttag

SEQ ID NO: 78982 - DNA, 2160 bp, Pseudomonas syringae pv. castaneae
atggctaaacggggtacgttattcgtgcatatttcaaggttacaactcgtcaactaccggaatttcgaatgcgcgaatgtcgtattcaacaagggcgtaaacacgatcatcggcgagaacggatcaggcaagaccaacctgttccgggcgttgcgtctcttgctcaacgacacgctgctgcgcgcggcatataggctcgacgagaaggacttccaccggggccttggcgactggcgcggtcactgggtagtcattagcctcgagttcgatgaggtatcccaggacgaagcgattcaatccctctttctccatgggaccggtaatatcgccgacggcgcgatcggcaaggcgacctacaacctaatttttcgccccaaggcggcagttcggcggaccctggccgaccttgccgtcggtgatgccgtaggactcgccgaggcacgttcgaagatcaccatttcggattatgaaacgatcttcaccggcaagagcaccgcaaacttcctcgatcccgaaacctacaggcaactggttggcgacttcgatgcggtaaaatttccccaagaactgacgatccccgctatcgggggcgtcatcccgggcatgctctcgatctcgcgcgaagtttgcttcaccttcgtgcaagcactgcgcgatgtggtcaccgacttccagaacaaccgcaccaaccccctcctaactctgctcaaatgtcgaagcggtgagatcgatccgcagagcttcgagccgatcaccgcgctcgtcaaagggctcaacgatgcaattgagggcctaccagatgtagaaaccatccgcaccgatatccgcgacaccatcaccgatgcggcaggcgagacctactctccgcgatcactttcgatccgctcggatctgtccgacgaggccgaccgtctgttccagtcgctcaagctatttgtgggcgagagtgaggaagaatatgagggcgcgattcacgagttgagcctaggcggtgcaaacctcatctacctgacgttgaagctgctcgagttcaaataccagaagcagaaagagtccttcgccaatttcctcgtgattgaggagccggaggcgcacatccacacccatatccagaaaacgctgttcgaccggctgaactttgatgacacccagataatctattcgacccattcgacccacatatccgaagtgaacaacgtcgtgaacatcaacatcctcggccggcaggacggacgatgcgaggtgtttcagccatctacgggacttgacgccggccagattggcaatatccagcgctacctcgatgctgtccgcagcaatctgctcttcgccaagagcttggttctagtcgagggcgacgccgaggagatcctcatcccaatcctcgttaaaaaagtgttcgggcttagcctggacgagctggggatcagcttgatcaacatccgcagcaccggcttcgagaacgttgcggtgcttttccacaacgagcgcatccgcaagcgctgcgcgatcatcaccgaccttgacagcgcgtttatcgatacgaccacggacatactagacagtgacgataaggcggccgcgaagaagaaagcactggggtcacagatcgctggactccagcgcgaggcagcgctcaaggagttgtgtgccgggaatccctggctgacggcgcacttcgccgaccacactttcgaggtcgatttcgtctccgccggcaatgtcggcactgtcgtttcggtgctgggcgacgtctataaggatggcggcaccatcgctacgtctaagatggagctggaatcgggcgacatcgcacgtttcgggacgcgcgtgctgacgatggcacgttacgccggaaaagggtggttcgccatcatcctagggcgaatgatcacgccagaaacttccattccggattacatcctcgacgccatcttccaagcgcatatcccggtatccatccagacatgggcgcgtgtgctggactatcgggtctcgatccttgcggcgtcgcaactacacgcgccaggagacatcgacgcgatgcgcgcgcaaatcaggcgctaccaccgcggcgagatcgactttgcaggtgtccgcgccgaaatgctacaggcctttccggcagacggcatcaacactatcctggcgagcttctag

SEQ ID NO: 78983 - DNA, 1431 bp, Pseudomonas syringae pv. castaneae
atgcacgaggaactctgcagcgcggtgcagggcactaagctcagcagcttcgactgcgcatattatttgaagccgaacggctgtgtcctgacatgcaacaagactgacaagcatgaagcaattcgtggagttttgcaggcatattggaagacgctccgtgccgagcggcaggttgattttgaactgatccttttctacgcctatcaactcatcgagaagaatccctcgatcagcgcgctgctgggctcgatctttgaatgcgtgctcctcgatgagtttcaggatacgcgggaaatccaatatgcgatcctcgcatcgatcctgaaagcgtctaaaggtggtgcgtccgccttcgtcgtaggcgatcctaatcaggcaatttatggctcgcttggcggctatgcgatcacggcggcggactttgggacgcagtgcggcatcgctttcaaggaaatggagctatcagacaattatcggtcgtcatcgcgcattgtgagctatttcggcaattacaacgtcttgccttcgaagatcgaggcggtgggaaggggcaaggactacgcgagcgtggtgtcattcgatcaccagacgcaccgcgacgcgctggaagaagagcttgtaaggctcatcaaattcaacgtcgaaacgctcgggatcgctcagcatgaggtctgcatcgttgcgccttggtgggtccatctcgcaagcatgacacgccgtctggtcgcggcgcttccggcctattcgttcgatggcccgggcatggtgcccttcgcgcgcgacgtcgacaatttctggtacaagctcgcccggatcattctgacggaggcgtccccacagctctatgtacgccggatgcgatgggcgggggaagtaatcgctgacctcagcgtggcgggcgtcgaggttcaaggtttggaccgcaagacactgctgcgcgtctgcaactccgtcaccgaaaccgatggcctggtcttcctccgggtgttcttcgaccagctatgttccactttgggagtcgatcgccacacttacgcggcgctccaagagcatcacgacgctttctttgaatgctcgcagaagcgcatcgacaagctcatcaaagaaggcgctgaggcgatcgctgaattggagatgttcaggaaggtctttgcgggccggactggtatcaccgtatcgacgatccacggggtaaaaggcgctgagtatgatgcagtgatcgcctatggcctcctagaagggatggttccccatttcagcgatccgaaccaggccgagacagcgaagaagctcatgtacgtagtttcgtcgcgggctagaaagaacctacatctgatctctgagcgcggtcgcagccgaggctggagcggagattatcaaccaaccgacgtacttgctggatgtgcattcgggtacgaccagctttcttga

SEQ ID NO: 78984 - DNA, 867 bp, Pseudomonas savastanoi pv. glycinea
gtgcgttactgccgatgtgagcctaagacacgggtctcgactgtcaaaaagattaggtttccagtcaacgaggtagatgcgagcaaatttgttcggggagccatgctggcgtatccggagctctatttcgctcgatttgtactgcttgttgagggagattctgaaaggatcgttctgccaattctggccgaagcgctcgatttgctgattgatccggccttcgttgccatcgtccccttgggagggcaccatgtgcagtatttctggcgtttgctaaaacacctgggtatccctcatgccaccttgctcgatctagaccttggccgtgatggcggagggtttggtcggattaaaaccgccattcaaaagctaattgagtttgacgtgccaaaaaccgcagtacttgagattgataaaggcattttgagtgatacagatcttgaaaaaatgcacgagtggtcaactactggtgatcacgcaaacctccaggcatggattagcaacaacttgagaccgcatggtgtgtttttctctgcgcctttggacctcgacctagccatgcttcaggcattccctgacgcgtatgcgggaatcattccaaaaggaggcggaccgcgcatggctgaggaaaaggccgccgatgctgtactaggcaccgcaggtccgggactcggcgcttacactggtccgttcgaggtgtataaagcgctgttaccggcttaccgataccactttctcaccaatagtaagccggccacccatttggcagcactatcgcggttaaagcagaaggacctacgtgaaaaaatgccggcagttctagctgaggtgctcaagcacatagaagcttcattgaggcgcgactag

SEQ ID NO: 78985 - DNA, 1659 bp, Pseudomonas savastanoi pv. glycinea
attgaggcgcgactagttatggccgtttcgtcacttcgagttcgaccagaagattggacgccgattggggtaaaatctcttgaagccaatgctcttaaagtcgtcagagcgggcataaatcaatccgtcatagctggcccaggggcaggtaaaaccgagctactggcacagcgtgctgcctttttactccagacggaggccgcaccaacgccccggcggatcctcgcgattagtttcaaacgcgacgcagcctccaatctagctgctcgcgtccgtaaacgttgccatagcagtcacgccagccgattcgactctatgacttttgacgcatttgcaaaagggcttctggaccgcttcggccaagcgttacccgaattctggcggccacgcccaggttacgagataactacatactacgagagagattatagaaattttctagatctaattgcgggatctcctccaggggatataggtacgaaagcctctctgcgcgcgattggggcgaagtcgttcgagcgaaagcacctgctgggagcccccctacccgttgcggcttggcctaagcccgacgtcgctcaatgggcgatggcgcgtttttggcactattcactacacgaaggcaagaagagtgtattgacgttccctatgatcggccgactagtagagctcctacttcgaatcaaccctatggtgcgggacgcactgcgactcacgtattcgcacttattcatggatgaatttcaagacacaactcaggttcaatacgatcttgtgcatacaattttctgtggcactgacacagtggttacagctgtaggtgacaacaagcagcagatcatgcgctgggcattggccatggatgatcccttctccgagtttgacgcagattttgggggacttcgaacgacactcttcaacaactatcgatcatcccctgacttggttcgtatccagcacgtgctagctcaggcattagattcaggtgcgatggagccgatatcccaaaccgaaggtacgattgatggggagagctgcgtaatcctcgactttccaagcccaaaaactgaagcgcgacatctggctaaaactatttcagcggccattgctgacaagaaactgctccctcgcgattttgtcgtactcgttcggcagaaggccggggactacgcagatgtattgagaccagcttttgaagctgaaggcctttcactaagaaatgaggctggaactgctggacaaatcatgttgcaggagttgatgaccgaggatctgtctaagcacttagtttcgcttctccgtctcgcaatgaacccgcgcgctggacgccactggtctaactgccagacatggctcgctttattgcgcggcgtggcagccgatgaacctggcgttcagcaaaaactagcgattgacttagacgcgttcgcaagagccctcagcgcgaactaccccacccctccaggcgatgaagctacatcaaggtcattggttaccgaggtgctgaacttcttaggccgtgagcgtcttagcagctcctatccgagctatgcacacggggactggctagacacggttatagattctgcattgaaacatttattagattgctctttaaacagtatcgactggtgctccaccctaggagggtgtagacaa

SEQ ID NO: 78986 - DNA, 1920 bp, Pseudomonas savastanoi pv. glycinea; identical to SEQ ID NO: 71928

SEQ ID NO: 78987 - DNA, 1683 bp, Pseudomonas savastanoi pv. glycinea; identical to SEQ ID NO: 71929

SEQ ID NO: 78988 - DNA, 2136 bp, Pseudomonas savastanoi pv. glycinea; identical to SEQ ID NO: 78348

SEQ ID NO: 78989 - DNA, 1812 bp, Pseudomonas savastanoi pv. glycinea; identical to SEQ ID NO: 78349

SEQ ID NO: 78990 - DNA, 1905 bp, Pseudomonas amygdali pv. hibisci; identical to SEQ ID NO: 72704

SEQ ID NO: 78991 - DNA, 1752 bp, Pseudomonas amygdali pv. hibisci; identical to SEQ ID NO: 72705

SEQ ID NO: 78992 - DNA, 1788 bp, Pseudomonas amygdali pv. hibisci
atgagggtttctcgggtcaggttgatcaatttcgccaatttctcggatgttgatgtcgagacgggggaaagtatcgtcatcgtgggagagaacaaggttggtaagagcaatttcattcgcggcctgcagttgatccttgatccgggcttgtctgagcgcgatcgacaactggggcttgaacacttctgggacggacttggcgaagacaaggttggtgcgaccattgaggtctctgtggatctaacggacttcacaaacgatccccggctgatggctcacctcaacgattgcgtgattgatcctggcccacccatggtggcccgactcacctaccgcttccagcctaaggcgggcctggggcgcgccccggaatcgttgaaggactatgagtatgtgatcttcggtggcgacgatcccgacatgcgtatcggcggcgcattccgccggatgttgccaatagatgttcaggtagccctgcgtgacgctgagaaggaccttgcgagctggcgcaattcgccattgaggccgcttatcgaggaccttgccgcgtcgttggatgatgacgcccgtgaggagattcaggatcaggtcgaccaagcacagcgagagctggctggacacgaggaagtggtagcgacagcagaacggatcagcgaacgactgatcgccatcgctgggggacaacatgccgttccggtatcgctcggacttgcaccaactagagtcgacgcgttgctgcgcagcctgcggctgctgattgacaacggcgtacgcggagtcggcgatgccagtttgggaaccgcgaacttgatcttcctggcgctgaagagtctcgaactcgaccgcctcgtttccgatggagagcgcgaccacaccttcttcgtagtcgaggagcccgaagcgcacctgcacccgcacgtgcagcgtctaatctatcgttacttccttggcacggggacggaagacggtgaggaacagccaccgcttacgacaatcctcacaacccactcgccacatatcgcaagcgttgcgccgatcagatctattgtcctactgcgccatgacacagcgggagacaagactgtcgctgtgtcgacagcaaacgcacctttcacgcagcgggatgaagaggatcttcaacgttacattgacgtcactcgcggcgagattttcttttctcggggggtgattctggtcgaaggcgacgccgagcgcttcatcgttcctgcgtttgccgaggtactggatattcccctcgatatgcttggaatcactgtgtgctcggtgggggggactaacttcaccccgtatgtgaagctactgggccctgaaggactcaacattccccatgtgatcctaacggaccgggatccaaccgatggtaatcatccactggttcgcaggcggcttatcaatgtccttgacgtgattgatggcggtgtcgatcacgagaacttggatgcagatgaagtaatcgagcttgccgagcagtacggatacttcgtcaacgagaacacgttggagcccgaactatttgcaggtggactggctcaggacatgcaggaggtaattcgggaggaactgccgcgattgagaagagagactctgaatgccttgcagcagtgggtggacgatcctgatcaggttgatgaagactggctgctcagattgatcgagaggatcgggaaggggaggtttgctcaggcacttgcaccgtcggtgtcacaggacgtttgtccggcttacattcgttccgctctggagcatatccgtgatgccatcgcgtag

SEQ ID NO: 78993 - DNA, 1815 bp, Pseudomonas amygdali pv. hibisci
atgccatcgcgtagtgtcagcacagcctacttggctcaggctgccgaactggctgggaatccgggccagttggcagcctacaactctcaaggacattgtgtggtactcgccggcccggggagcggtaagaccaagacactcgtcctaaagctcgcccgcatcctagccgaagacgtcgaggcccctcgtggcgttgcgtgcatcacttatagccaggagtgcgctcgcgagctcgctcgccgaattgaaagtttgggccttcagcgcgcacctaatcttttcattggtacggtccatgggttctgtctgcgtcatctcttgatgccgtatggacgcctggcaggcctgcccttagcttttccactttcggtggccactcaacgagtcagtgatcggttgttgaagcaaactggagacgcgcttttcgggcagaaccatccgtataaagtcattgatctcgggcggcatcgccgttccgtgctcaatcgaaatggcgtcgcttggcgtagcgaggaggaactcgctgcctgggccgaggcctacgaggccgctctgcgcgacgaggggctgattgactacgatgacatggttgtcttcggccaacgtttgatcgccgagcacgactgggtactaccgctggttcaggcaaaattccccgtgctcgcggtggatgagtaccaggatttaggtgtggcactgcatcgcatcgtcaaacgccttgccttcgacgggggtgtccgacttttcgctgtcggtgatgcggatcaatcgatatatggatttacgggagctgatggcgcgttgctcatggaattggcggctcgcagagacattgagcctgtccagcttcaattaaattaccgttctggtgcagggatcgtgacagcgtcagagatggcgcttggagaagcccgaggctaccaagcgagcgatcctgcgcgacaaacgaccatcgaatttgtcctgcgcccgggtggtatggcggaccaggctgcgcacgccatcgcgcagatcattccggcggccctagcctccaaggcgggacgaacactgggcgatatcgcgatcctatacaaagactatcgctcaggcgatatcgtggctgaagctgtggcagccggcgggctcgattacatccgtgtggataccgcagcaccttaccgcaaggttgccctaacaagttgggtagaagattgtgcggcgtggtgcgcgggtggctggcgtgttggacgcccacaattgcgtggactactcgaccgctatcgcgcatttcatcgggcgagcttagacgattcacaagccaagcgcgaagagcaggagctaaccgccttgttatgggagctgcgcgctgaccagcaacctgcgcgagaatttgttgcttcgctgcgcaacggtgcaatggatcatctgctggcgactgaattggcgctcgctgatcagaaggagcaactggatcgcatgacggcagcgctcgccgaaggcggcgcactggcttcgctagatatcacgagtttgggcggtcgggacggttcgcccgatcacctgaatctgctgacactgcattccgcaaagggctgtgagtacgacgtcgtcatcatggttggactcgacctcggaaatctgccgtggcgcaatgaaactccagagaagttgcgcgaaagtcgcaggctcttctatgtgggactcacacgtgctcgcgacgaggtccacatgctgtattcgggcttcgtcgatggccgctatggccctatgcgctatgggcgctcgccattccttgatgagctggaagcgcgaatgcgtgccgctggcatttga

SEQ ID NO: 78994 - DNA, 1956 bp, Pseudomonas amygdali pv. lachrymans; identical to SEQ ID NO: 72702

SEQ ID NO: 78995 - DNA, 1671 bp, Pseudomonas amygdali pv. lachrymans; identical to SEQ ID NO: 72703

SEQ ID NO: 78996 - DNA, 1905 bp, Pseudomonas amygdali pv. lachrymans; identical to SEQ ID NO: 72704

SEQ ID NO: 78997 - DNA, 1752 bp, Pseudomonas amygdali pv. lachrymans; identical to SEQ ID NO: 72705

SEQ ID NO: 78998 - DNA, 1962 bp, Pseudomonas syringae pv. aceris
gtgtttgtccagcacgacagtgcggccagtatggtggcgactgatgcgctgaatgagactcatgacacaagccgtgtaggcgagactgtttgcctacatactccaatggccaaggttcgacggtatcgtccattctgcaacggcatcaccatcaaggatgtggaaatgcaactgacacgcgtcgccatacgcaacttccgaaattttaaagatctcgacgttcctctcagtggcaacatcgtcgttgtaggcgagaaccgcgttgggaaaagcaacctcctgtatgcccttagattactcctcgaccctagtcttgcggatagtgcgcgccagttgggacagggtgatttctgggacggcttgggggagccgttggaagatgaaaagatcactattctcatcgaaattcaaggctttgaagaggatgtggatctgctcgcgatgctgacagactatcggctggacgatgacgctgacacggttcgactcacctacgagttgcggcccctcccaaatcttggccggtttccggcctcggatgaggattacgagttcatctgctttggcggagagactgaaagaaagcgctttggtcatgaccttcgtcgacgtatcaccatggatacactgcccgcactaagagacgcggaaggtgatctcgcaatgtggcggcgttcaccgctgcgcccgctcattgagcgagctttttcggaggtaagtcgcgacgaactcggtgaggttcaggaagcaattaggaccgcaaccaatgatcttacgcaattcgacccagtgagaacgctagaagaaaatctgggagctatgtacgcatcaatgagtgggcccaatcagtatatcgagccccgattaggcttcagcaccatcgacatcactcgtctttatcgcaatgtgaaactattgatagatggtggtttacgaacgatcagcgaggcgagcctcggctccgccaacgtcgtgtttctgagcctgaaaacacttgaattgaagcagttgatgaatgaaaatcgacgagatcacactctccttggtattgaagagcccgaagctcatcttcatccccaccttcaacgatccgtttatcgacatctattcgaagagtttggcggggcgggagatgagagattatcaatccttctgacgacgcactcccctcacattgccagtgtcgcccccttgcgatcaatcatgctgttgcgtgagacccgtcatgaagggaccgttggacggtccacggctgaattgaacctgactgacgaagacgaagaagacctgactcgatacctagacgtgacccgcgcggaaatgcttttcgcgcggggaattatccttgtagaaggcgatgcggagaaatttttgctacccgtttttgcaaagtcacttggctacgaccttgatcacctcggtatcacgatttgctctgtttcaggaaccaactttcaaccttacgtaaagtttttaacagctcttgaaatacccttctcagtgattacggactgggatccgcgtgcagccgcgcgacctcttgggttcaaccgtgcgttggagttggttcgaactattttgcgtattcggaaccgccgaaaccctagaagaattattgctgaacttgaagccttgaattttaaagattttgaagcacggtgtgatggatacggggtattcacaaatgtagacacgctagaagtcgacctctttgaagacggcgatttcgtagcccctattctcgccaccttgcgcgatgaagatttgagtgatgagcggagcgcttgggtagatggctgggaggatgacccagatacgctcgatatcgtcaattacatcaaagtcatagaggctataggcaaaggcaggttcgctcagcggctcgcctctcgtgttgccggcgtggagcctcctctctacatacagtcagccattgatttcgtggtgcgacgtgtccgataa

SEQ ID NO: 78999 - DNA, 1647 bp, Pseudomonas syringae pv. aceris
atggctcgattacttgcagaagatgttgcggagcccagaggggttgcctgcattacgtttaacaccgaatgtgctcgggaattagaaagtcggttgagtgatctgggcgttgagccaggtcgtcgaatattcattggaacagtccactcgttctcccttacccaaataatactgccttacgctagggtcgccagactcggattaccagatgacttccatgtcgcaacaaaaagcgagcgggaccgggcactgcgggcggctctagacgacatggccaaataccctgagccattgagggagtgggaggcaaaaatgaacggctatcgacagtcgattttagatcggggtcgaccggagtggctggaaattaatcctgagcttgcgcgcttggccgaactctatgaaggacggcttcggcgtatgaatttgatcgactatgaggatatgcccttgctggctctgagggcccttcgtgagaacgaatggcttcggaaagcactgttagcaaagtttcctgttctcgtcgttgatgaatatcaggacttgggcaaggctttacacaaaatggtccttggcttgtgcttcaccacgggaatgcgattattcgcggtaggcgaccctgatcagtctatttatggtttcaacggtgctcggccggatcggttacgacgcctctcggagcgtcgtggcgtagagactgtgcgactgcgcttgaattatcggtgtgcgactcgaattgtggcagcgtccggagctttactcgacgaggagcgagactatgacgcagtagcaggcgcaccatcgggggaggtgttttttcaccccttgcgagggcgatatgaggcacaagcatcggtactcatcaatgagcttttgccccaggctctcgctcgccacccgcacctcaggctcggagacgtcgcgatcttgtaccctgcggcctggttgggcgacacaatggttcccgctatccaacaagctggcgtgccgttcattcgcacagataccaatgctctgtattcgcgttccagcagattaatgcactggctggagcagtgcgccatatggtgttgcggagggtggcagagcggatctccacttttttcacagctgaccaatactggcaagcacttattctctaatgcaattcgatccgacacccaagcggctgagtttcatcggggattgatcacaaagctgtgggcctcgcgagaggtcgcgctgccactactgggatggctaactgattttcgcgaccgacttctagctcccctaggcgcagaatgcccagatctggctgatgagttgaccatattggctgacttcatcgatcggatttcgcctgaaggggacagtcatggcatgtgtctcgggagtttagctggccagagcaaaggcaaagatagcttgaatctttcttctctccatagtgcaaagggtcgggagttccctgtggtattcatgtttggcgccgacgtcgggaggatgcctcgtgacggcagcactgatccggaagtcgctgaggcacgccgagtcttctacgtagggcttacacgtgctgaagtcgagatccatatgatctacacacagggacgcgcatcaccatttgttagtgaggtgcagcggcgcatcgaaaatggtgattag

SEQ ID NO: 79000 - DNA, 2337 bp, Pseudomonas amygdali pv. aesculi; identical to SEQ ID NO: 71950

SEQ ID NO: 79001 - DNA, 1899 bp, Pseudomonas amygdali pv. aesculi; identical to SEQ ID NO: 71951

SEQ ID NO: 79002 - DNA, 2136 bp, Pseudomonas amygdali pv. aesculi; identical to SEQ ID NO: 71948

SEQ ID NO: 79003 - DNA, 1800 bp, Pseudomonas amygdali pv. aesculi; identical to SEQ ID NO: 71949

SEQ ID NO: 79004 - DNA, 1932 bp, Pseudomonas coronafaciens pv. atropurpurea
atgaagctttgcaaactgcggatcagcggttttcagtcatttgggccagacgtcaccgatatcaccttcgaagacgtgacttacctactggggcctaacggcgctgggaagacggcgaccctgcaggctttagcgcgcatgttcggcttcgagccaggcctgcggcgccttcgtcgttcagattttcacgtccccttggaagagctggaagccccacctcagcgcatactctggcttgaagctgatttcaccttcgatgaaacccaagatgatgaagacgacgatacagtaccgccgttcttctcgcagatggccttgcagtcagcggatgaaagcccgcgtctcagatttcgcctggagggagtcctacatcccgatggagatgttgaggagcgcttcctctacgtgacacggatggatgagcacgagctacccacgaccgtaaagccagttgccaagggggaaagagacgagatacacctgcactaccttccggcccgtcgtgacccagccgaccatgtcgcttacggtgctaccgcgcttttaggccgtctacttcgtgccgtcaattggagcgatgaccgggactcgatcaaagtgctcaccacgcaaatcacagaatgcttatcaggaaatgaatcgatcaaggcactgagcactagccttagtagtgcctggcaacggcttcaccgaggaaactttttcgcttccccgtccttgacctttgcgaactcagaaatcgaagccatcttgaggcatttatcgatttccttcagccccggccatggcgaaacgcaagtggactatgcgcgactgagcgacggtcagaagtccatgctgtacctctcgcttgtgctgacatctctcagcataggtcgagaggtaagatcagcagagaacacttcgttcgatccacttaaactgaagccagcggccttcacgatcctggctgtcgaagagcccgaaaatagcctatctccccattatctgggacggattgtaagctcgctcaaatcatccgtaggtgtggatgctcaagcattaatcgctacacaagcgccgtcgatgctcaggcgcgtcgagcccgagcacattcgatacctgcgtctgaatgtgaagcgtgaaacggatgtgtcgacgatcgtactgccagagaaacaaagcgacgcgtacaagtttgtacgagaagcggttcaggcattccctgaggtttatttcgcacgcttggttgtactcggtgaaggagacagcgaagaaattgtactgccgcgcattcttcaagccaagggtgcacccgtcgatgaatttgccgttgccatagctccattggggggccggcacgtcaatcatttctggcggctactgactgctctaggcacccctcatatcactctgctcgacctcgacgtgggccgtcatcaaggtggttggggtcgagtgaattacgttcgtgaccagcttgataagtttgatcccgcacgcaatattcccggtggctggacaagatacgcttgggatgatgcggaaataccagtaagaacacatcactggttcgaaaacgggacagataaccgtgtcgacctattcgatgagttggaaaagcgagatgtttttttctcagagcccctggatctggatttcgccatgctcaaatcatttcccaatgcatttggcgctactccatctgcaccgacattacacgaccatgtggccgtcctaggcaaaagccacttcaaccctgaccagtatggcgatggagaacaacaactctttgctgcctatcacaagctattcaagttaagcagcaagccagcagctcacttggacgccttgggcaggctcactgacgcggagctattggcctcactgccctcctctctaaatcgcttagctgatagggtcatagccaagctggaggagtcgcccgaatga

SEQ ID NO: 79005 - DNA, 1683 bp, Pseudomonas coronafaciens pv. atropurpurea
atgatctcgcacgatcagtgggctccttctccaggcgtgcgcctagaaaaaaatgcatggagcgttgtacgcggtcttgatcgatccatcttactgacagcaggcccaggcgcaggcaaaactgaggtgcttgctcaacgcgctgattaccttctgcgcaccaatagttgccgttatccgaagcgaatccttgccgtgtcgttcaaaactgatgccagtcggaatttgaaggaaaggattcagcttcgttgtggatgggacttcgcatctcgttttgacagcgtgacctttcacggtttcgctaaacggatcatcgacaaattccttcccattcttgcggaagagcgcctgagcccggactacgctattggccccgaggccattccgggcaagcaaatcaccttcaagcagctcctccctctcgccatcaagatcattcaacgcagtgaggtagcacgaaacacaatccgcaagacctatgcccatgtgtttctcgacgagtttcaggactgcaccgctgatcaatacgagctcatcaaacttctgttcctcggcacagggatatgcctcacggcggtcggggatcagaagcaaatgatcatgggatgggctggtgctttggagggcatattcaaaacttatgcagttgacttcaatgccctcccgctccacctgtacgccaatttcagatcaaagcccaacctacttcgcgtgcagaacgaaatcattcgagaaatcgacccaatcgcggtgactccaacagagctgatcataggccaagggggcgagatcctggccgctaatttcccgaactcagcgcaagaagcaatagtgttggcggacaacattcgcaaatggattgaggctgggctcccaccaaatgaaatagcagtgctcgtacctcgccaagtggaggactacggttccgtgttgatggccgaactgggtagccgaggtatcccctccaggaacgacagcgagcttcaagaccttttaaaagaaccagcagcccggctggtaatcgactacctcacctgtttgtatggaaagggtgagtcagaggcttggtcacgccttatggatctgttcacaccatacgaagagggcagccgcgaccaccttcacaggttatttgaaaccacttatcgagcccatattcgccaagtaaagacggccagcaaaacagcctctccctacgaggattggtggacactcacaggtggttttctgaaagacgtaggctatccgattctcaccacgttatcgggagactatgactcgaagcctcgcttacatgaggtagtgcgggacatccgagatcggatttgcgcattgcttgcgagtgaaaccaccatcggtcgcgcgctcgcccgtctttcagatgaccgggcggtgcgcttcctgacgatgcacaagagcaaaggattggagtttcataccgtgattcttttgggtgtggaaacccaagcattttggggccggctcgcggaagaacggtgtgtctatttcgtgggggtatcgcgtgcaaaggaacggttgctgatcacaacggctgagtaccggccaaaacctaagggagcctcaggccgatgggtagagtaccgcacaccccacggagaattcgttgcccatgtaacaaggcatatgacaggacgactatcaggccgtgggcagccgctctga

SEQ ID NO: 79006 - DNA, 2016 bp, Pseudomonas syringae pv. broussonetiae
atgtacctttcaaaaacaacgttagtaaactaccgaaattttgaaagagcgcggtttgtttttggaaaaggcgttaacaccataatcggtgaaaacggttcgggaaaaagcaatctattccgggcgataaggttgctattagacgccaacatttatagatcagcatacgcaatggaggaaacagatttcttcagaaggaaagaatgctggaaaggacattggataataataagtttagaattcgatgaaattgatcaaaatgaggcaattcagtctctatttttgcatcggggcgcagttgttgatggtagtaaagtaggtaaagcaacctataatttgatatttcgcccaaatcaatctatcagaatgagactctcagagttagctccaggggataatgattcgctaagggaacttcaggcgcaaatttcaataactgattatgagtcctattttacgggtcgaagcattgctgactttgctgatgtagcggtatatcgaaatatagtgggagattttaagaaggtaacgttcccagcagtttcatcgcacctcatcggttcgccaataccaaatcagctatctgtagcaaaagaagtttcgttcacttttgttaaggctttaagagacgtggtctcagatttctctggaaatagacaaaatccgttgcttaatttgctgaaacgtaaaagtgaagagattaatattgaaaaatacaagctgataactgataaagtcaaggctctaaattctgacattgaaattttacccgatgttcaagatgttcgttttgatattatagatacgatagccgaaacggcaggtgaggcgtatgcacccgcagcgcttcatataaaatcagatctaccgactgaagccgaaaagttattccagtcgctcaagctatttgttggtgaaaatgacgaaagctactctggcgatatttcggaattaagtttgggcggtgcaaacttaatatatttgaccctgaaactattagagttcaagtatcaacgaaaaaaagaggcagtagctaattttttaataatcgaagagcctgaagcgcatatccacacgcacatacaaaagactttgttcggcaatatacaatacgaaaacactcaaattatttattcgacacattcgactcatatatcagaagctagcaatatagaaaaagtaaacgtccttgctagaaagggtagattgtgcgagtcgtatcaacccgctacagggcttgatccaaaggaaattagaaacctacaacggtatctggatgcaaccagaagtagtttgctcttcgccaagggtgtaatactcatagaaggcgatgccgaagaaattatgatcccggcccttgtgagggaagtgctaggtatcagtttggacgagctgggaatcagtttaattaacatcagaagtactgggtttgaaaacgtagcgtgtgtctttcataagtccagaattaggcgctactgtagtattatcactgatcttgatgcagctatcgcgaacacggataaagacgatcttgatagccctgcactggtaagatataagaaaaaaatggctgcctctcaaaaagctgggatggcacgtaaagtccgtctggacaatttttgtaaaggtaatatttatttaagtgttcactatgcaagccatacgtttgaagtcgactttataaaaagcggcaatgaggaagaggtccatgatgttgttgatgaaatttaccaggacgatgacaccaaggttctttccagagaagagattatgtccggaagggtctctgtctatggcaagcgcgctctaactatggcgacttacgctggcaagggctggtttgccattcaacttgccgataaagtcagcccttgtactaccatcccagactatatcctaaatgctatatttgatgcgcagccaagtatatctgacagcttgaggcttcgaattttacagtacagaattagcacttttaaacggtttaactactttcaggactttgggagccgctga

SEQ ID NO: 79007 - DNA, 1158 bp, Pseudomonas syringae pv. broussonetiae
atggaccagttcagcctcttgaaactgaatgacgagcaaattctcgcggcaaattatccaggaagtgtttttctaacggcatgccccggaagcggtaaaacaaggactcttacatacaagattgccgtcgaattacaaaaaatttcctcgcaccgagaatttttagtcgccattacttatacccatagggctgctgatgagataatggaacgcgtagaaaatttaggcctggaaaccaagcagctatgggtgggcactatccattcattttgtctggagtggatcttgaagccgtactcaatatatgtgcctcgtttgcaatcaggattcaatcttataaatcagccagatgctgatgcgatacttgatgatatttgcaaagattttaatggacctaaaatcacttctttagactgtggctatttttttcaaaatgacaagcccgtccctatcagttccgacaaggaaaagcatgagaatataaagctggttttgaaaaaatatttcaggactttgcgcaaaactagaaaaatagattttgagttgattctatattttgccgctaaacttttgagagagcacccgccgatagcttcagcactgtcagcattatttcgtttagtacttatagatgagtaccaagatactaaagaaattcagtatcaaatagtttgttctatttttagagctggcttgggcaaaacaaaggcattcattgtaggagacccaaatcaagcaattttcaaaacacttggcgggtatccaatcgaagttcagcacttccgtgaattatccggattggcgattacagagctttcattggttcagaattacaggtcatccagtaagattattgattattacgcgcacttcagtttgagcaacgtcaatgtggtcgctgcttctgacgacaaggattacccgagtctgattacgtacaacactacgatttcagcgaaattcgttgaagacgagatagtcagacttgttaggtacagtatggatgatttaaatattcaacaaagccagatctgtatcgtaggtccccaatggcagtctctagcccaattaactcgcagattaatggctcgccttccacaatgcgattttgacggtccgggcatggtgccatttggacgggaattagggaggcgctga

SEQ ID NO: 79008 - DNA, 2313 bp, Pseudomonas caricapapayae
atgcgcatccagcatctggagcttgcgaatttccgcaagcttaaatccgttagaatcgacttggcggccgaaaccactcttctggtaggcgccaacaacagcggcaaatcatcagcaatgctggcactgcgcaaattcctggttaagccgacgacgttccggctgcaggatctcaccctttgccatatcgccacgctcgatgcgattggtcaggagtgggaacaggccgatgacagcttcgctattccagcatccaacgcttgggctgactggctgccaacgctcgacgtgtggatacaggcagctcagggtgagctccatcacattcgcgatctgattcccaatttttcctggtctggtggaatggtcgggatgcggtttcgattggaaccggacgatctacccacgctctacgccgattatcgaaaagagcgtgctcgtgtggccactctccttcaggagatccagaatcaggctgagcaaggacaacagcgccctaccctaaagctatggccgcagagtcttcatgactatttaaaccggcgcttggtcaagtcgttcaaggtgcactggtatcggcttaacccggatatgctttctgccccgtgtaccgaaaaccggacagcgatcctacaagcgctggctgacactgcagtgccacttgagcgtaatccactcctcagtctgatccgggttcatgagatcaatgctcagcgcggtttcggagacagcgccgatgaggggcaagatgacagtaaaacgggaagtggcaggaagttgtctgagcagctgcgaacctattatcgccgccacctcgaccctggcgacagcccagacgtatcggatcttgaagcgctcagggccattgaagctgcccaaagcgcttttgacactaggctaacaacgagctttgcgcccgcgcttagagaggttgcaggccttgggtacccgaacaacagcgatcccagcatcaaagtggcaacccgcctcggcccaactgatggcttagatcatgaggcagcagttctgtttgagttggactcggttgcaggtgcgcctggagaacctcgcttaacgcttccagagacatcgaacggcttgggttaccagaatctgatctccatgatcttccggctcatggcatttcgtgacaactggctgaggaagtcccgaatccccgaagaacgcaccactgcgaacgtcgagcccatacaccttgtgctggttgaggagcccgaggcgcacctgcacgttcaagtccagcaagcgtttataaagcatgcgtaccacgtgctctgcaacgacccggtgcttgaggaatttcctaacctgaagacccaactggtcgtcagctcccactcaagccacgtcgctcacgaaatcgaatatgaacacctgcgctacttccggcggctcccatccggcatggcaggcatacccatccctgtttcgaccgtttccaacctgagcaccgtatttggccaaacaggcaaaactaaagagttcgtcacacggtacctgcgagcgcaccacgccgacctgtttttcgctgatgctgtgatcttggtggaaggcgctgcagagcgaatgatcctgccccatttcctgcggcagcatttcaagttcctcgaccaatgctacatcaccatcctagatattggtgggagccatgcacaccgactgaggccattggtggatgcgttgggtatcgcgacgctggtcatcaccgatctcgacgcggggaaagacaaagcggctcaaccagtggctaggggcgcagaacagattactaacaacccgactgtccgccattggatgagagtgaaaggactcggccatgatgtggacacgctgctcgacctagaggatgcgcataaagtcgaagagatcgactccctatactcaatcagaatcgcgtatcagacccctatctctgttcagttgccgaagaccggtgcgcaaggcgaagcgttgccaaatacgttcgaagacagcttggcattaaccaatatccagtgcttctcgggtaatcgccgacgtggattgatgcgtgctttcagccaggctatccaggagtctgaaacaggacaagctttggcctcggcgctgttcgatacgctgcgcacgggcgacaaagccgaattcgcacttgaggtgctcggtgatccggcgttcggtcagcttgcagtacccgcctacatccatgagggcctgacgtggctgcagtccaagctggagctcaaacgcaaggatctactggtcgttcctgccgcgatcgttgaggtaacagagatcgttgaggtagcagaatga

SEQ ID NO: 79009 - DNA, 1875 bp, Pseudomonas caricapapayae
atgagccccgcgacgactgagtacgccgaaggtgcccgtgatgccgatgaggtgatccgagagtgcttggacttggatcacccgaagagcttttttctttacgccggcgcaggatcagggaaaacgcattccttggttacagcggtgagtgagctgaagtcccgagagcacaaacggttgacgttcgaagggcgtcaggtggcaatcatcacctacaccaacgcggcgtgcgaggagattgcccgtcgtctggagagtgaccccttggtagtcgtttcaaccatccatgcgttttcatggcgaatgatccggggcttcaatgacgacatccgcgagtggcttcggatcaagcttggcgaaagtattgaagagctgaacgcaaagctcctcaaagcccgagatctgaataacaaaacggctcgtgccaatcgtgcatcgcttgatagtaaaacgcggcggctggctgccttgaatgaagtcgtcagtttcacttacagccccaccggagagaaccgagggcgccaagcgctgaatcacgcggaggttatccagatggcggctgcatttattcagcgcccgcctctgctggacgttatggccgatcagtacccggtgcttctgatcgatgaaagccaggataccaatggcgctctcatggacgcgtttctgaccgctcaatcgcttatccctgcacggttttgcctgggccttctcggcgacaccatgcaacgaatttacaacgacgggaaagagcacctggagcgggctattcccgatgactgggctatccctgaaaaacccgtaaaccgccgatgccccacgagggtcgttgagctcatcaatgtcattcgcagcgctgccgatgatcatcaacagactccaaaacctgacgcgttccgaggtgccgtccgcctgttctgcactcatcaagctgcgggcactggctttgagttggaaagtcgggttgccgagcgtatggcgcaaatcacaggcgatcagcaatgggctgctggaacctcagagcgcaaaactctaatccttgagcacaaaatggccgggagacgccttggcttcgagggggtcttcacgcccctttatgcggtagagcatctgcgcaccggtttgctggatgggacgctaccagtactcaaaatgttcttcgagggcgtcatgcctatcctggccgctgccaacgagagcgaatttgctctgatggaagctgtacggttgatttcgcctctgctggaaagtgatcggatgaaagcggcccctgatcagttggcattgcttcagcaggcaggtatgggctgtcaaacgctgtgcggactattcgccgacaacaatccatccttggccgatgtcgtgtgggcactagtagaaacaggtctgctcgaaataccggaacggctactgatggcagttgcacaaggtgtgaccgacgaggagccgccggataccatcgaccgtgaggcgcttgaagtgcacgcgtaccgtgtgctcctggggcggccttactctgaaatggccgcattcgccggatacgcagaaggcctgtctcccttcgatacacaccagggggtgaaaggcttggagtttccaagggtcatggtgattctcaacgatgaagaggccggaggattcctgttcagctacgacaagctgttaggcgttaaggcgccctcagacaacgacatcaagaaccagcaagcaggcaaggacgatgccctttctcggacgcgaagattgctgtacgtcacttgcagccgggctgaggaaagcttagccatcgtcgtgtacacctcacagccaagaactgccatacagcgcgcaatcgaggccggttggtttaccgctgaggaagtcgagattacgtga

SEQ ID NO: 79010 - DNA, 1995 bp, Pseudomonas syringae pv. cunninghamiae
atgaacctcgtgcgtattgagtctgtaagcttatctggattccgctgctttggcccgaatcccatcaccgtagatgtttcggcagaaattacgaccattgtaggcccgaacgcagcgggaaaaaccgcactcttgcacgccatgctgaagttgtttggggtgactcgagcacagcgcacaattctaaggtcagatttccatttagggcctgatgatgaccctgagaatcgtgattccaagtacctcttcattgaggtttcgatcgcttttccagaattaaaaaatggcaccgcaaccgcagaaacgatcgcaccgtcgtttaagcatatgctgattgatcgcgcagaaaagccgcctatatgtcgtatgcgcctagaagcgcagtgggatgacgacgggacggttgagggcgaggtctcacaagagctcttctgggtcgatacgctcgatgaacaaccggaaaatgacaaacgccaccccgtcgcggtggcagaccgtggtctgatccagctttactacacgccggccagtcgtgatgcggccgcgcagaccagagcgactaccggtgcattagctgctcgtttgttacgtgcgattgaatggtcatccgatacggaggatgcagttcaagaaaccacagaaagcctaacggctgctttcgaagatgaatctgcaatcgccgctataactaaagcgcttcaaactcgatggtctgatcttcacgatgaagttgttgatactaatcctaggcttagcctagtgagccgtcgctttgaggacgtcgtcaacaagatcgctgtagtgtttgaacaaggagccgatgggcgtgagcgcgggattgaggccctcagtgacggtcagcaatcactcttctatttcgcgctggcagcagctgtatttgacttggagcgagaggtcgtcgctggttcagttgagggcttccgtgacaatgcattgcgtattcccgcactctctattttcgcattggaggagcctgaaaaccacctttctccctatttcttagcgcgcatcattcgtcaggtccgatctttaaccgaccaaagccgcgcgcaggccatcatcaccagccactcaccagcagtgctcagtcgtgtgaacccgcgtgaggtgcgttactgccgatgtgagcctaagacacgggtctcgactgtcaaaaagattaggtttccagtcaacgaggtagatgcgagcaaatttgttcggggagccatgctggcgtatccggagctctatttcgctcgatttgtactgcttgttgagggagattctgaaaggatcgttctgccaattctggccgaagcgctcgatttgctgattgatccggccttcgttgccatcgtccccttgggagggcgccatgtgcagtatttctggcgtttgctaaaacacctgggtatccctcatgccaccttgctcgatctagaccttggccgtgatggcggagggtttggtcggattaaaaccgccattcaaaagctaattgagtttgacgtgccaaaaaccgcagtacttgggattgataaaggcattttgagtgatacagatcttgaaaaaatgcacgagtggtcaactactggtgatcacgcaaacctccaggcatggattagcaacaacttgagaccgcatggtgtgtttttctctgcgcctttggacctcgacctagccatgcttcaggcattccctgacgcgtatgcgggaatcattccaaaaggaggcggaccgcgcatggctgaggaaaaggccgccgatgctgtactaggcaccgcaggtccgggactcggcgcttacactggtccgttcgaggtgtataaagcgctgttaccggcttaccgataccactttctcaccaatagtaagccggccacccatttggcagcactatcgcggttaaagcagaaggacctacgtgaaaaaatgccggcagttctagctgaggtgctcaagcacatagaagcttcattgaggcgcgactag

SEQ ID NO: 79011 - DNA, 1281 bp, Pseudomonas syringae pv. cunninghamiae
atggccgtttcgtcacttcgagttcgaccagaagattggacgccgattggggtaaaatctcttgaagccaatgctcttaaagtcgtcagagcgggcataaatcaatccgtcatagctggcccaggggcaggtaaaaccgagctactggcacagcgtgctgcctttttactccagacggaggccgcaccaacgccccggcggatcctcgcgattagtttcaaacgcgacgcagcctccaatctagctgctcgcgtccgtaaacgttgccatagcagtcacgccagccgattcgactctatgacttttgacgcatttgcaaaagggcttctggaccgcttcggccaagcgttacccgaattctggcggccacgcccaggttacgagataactacatactacgagagagattatagaaattttctagatctaattgcgggatctcctccaggggatataggtacgaaagcctctctgcgcgcgattggggcgaagtcgttcgagcgaaagcacctgctgggagcccccctacccgttgcggcttggcctaagcccgacgtcgctcaatgggcgatggcgcgtttttggcactattcactacacgaaggcaagaagagtgtattgacgttccctatgatcggccgactagtagagctcctacttcgaatcaaccctatggtgcgggacgcactgcgactcacgtattcgcacttattcatggatgaatttcaagacacaactcaggttcaatacgatcttgtgcatacaattttctgtggcactgacacagtggttacagctgtaggtgacaacaagcagcagatcatgcgctgggcattggccatggatgatcccttctccgagtttgacgcagattttgggggacttcgaacgacactcttcaacaactatcgatcatcccctgacttggttcgtatccagcacgtgctagctcaggcattagattcaggtgcgatggagccgatatcccaaaccgaaggtacgattgatggggagagctgcgtaatcctcgactttccaagcccaaaaactgaagcgcgacatctggctaaaactatttcagcggccattgctgacaagaaactgctccctcgcgattttgtcgtactcgttcggcagaaggccggggactacgcagatgtattgagaccagcttttgaagctgaaggcctttcactaagaaatgaggctggaactgctggacaaatcatgttgcaggagttgatgaccgaggatctgtctaagcacttagggagacgctga

SEQ ID NO: 79012 - DNA, 1986 bp, Pseudomonas syringae pv. maculicola; identical to SEQ ID NO: 71686

SEQ ID NO: 79013 - DNA, 1905 bp, Pseudomonas syringae pv. maculicola; identical to SEQ ID NO: 71687

SEQ ID NO: 79014 - DNA, 1959 bp, Pseudomonas syringae pv. maculicola; identical to SEQ ID NO: 78366

SEQ ID NO: 79015 - DNA, 1896 bp, Pseudomonas syringae pv. maculicola; identical to SEQ ID NO: 78367

SEQ ID NO: 79016 - DNA, 2370 bp, Pseudomonas syringae pv. ribicola; identical to SEQ ID NO: 72950

SEQ ID NO: 79017 - DNA, 1983 bp, Pseudomonas syringae pv. ribicola; identical to SEQ ID NO: 72951

SEQ ID NO: 79018 - DNA, 696 bp, Pseudomonas syringae pv. solidagae
gtggctcaggcggccgacgataacgtggatgatgaggaagtcgaagagttcgaggttccagccgacgcggaggacgatgccgcagggcaggttcgggacaatgtgcaagatccagccggtgagcctatggtcccagcgcctaagaagaaatatggcaaggcttgtttgcccagtgaaccgggcgctgcaacttcaaatcaaaccctcattaaatggcttccggggaagctcacaatcgaagacttgcgtaacgcatcggaagcggacaaaactcacgtgctcgaagacgatgcgaaggttcgcgttgcctatcagactgaacgggctatcacttggaacggggctagcgaaaccctctgcgggcgtacgctagaagaagacttcggcctcgaaaatccggactggtcccaagccatagcgaggaagcctttagggctgattgtgaagggcgaagccgctggtcctgctgctcttgccaaaggcctccaccagaaggtttcgcggaagagtttcgataaaacgaagttcgcgctcgccgttctcactgaagacgagaaagcgtggcatgtaccgacttacatccgtgatgggcttgtctggctgaaagacgaaatacggatcgaactcgagaccgtgctgcccgacgccatcctcatcgaggaagaagatttagcgataggaggtaagcatgagtag

SEQ ID NO: 79019 - DNA, 1956 bp, Pseudomonas syringae pv. solidagae
atgagtagccgggcgaataagccggacacccaggccgacatcgacctgcgaaactgccttggaaacgttccaccgcgtagcttcatcatgaaggccggtgctggctccggaaaaaccacgtcgctgattaagggcctgtcatcggtcatccaaatgcacggcgataagctgaagaagactcgtcagcgcgttgcctgcattacctacacagagattgcggccggagagatttggagggatgtcggcagcgaccccctggttcacgtctcgacgatccacagcttcatgtggctgttggctaagcctttccagaacgacattcgcgtctgggtgtcgggacgcatagttgaaaaaattgaggcccttgaagaaaagcgggcaacctatggccctagggttcaacagcgcacgaaggataaggacacccgagacttggaacgcctccatcggcagtcggggcggatcgctgcagtcaaaggattccgatacggtacaggtagcaactacgcaaagggtattctgggccatgacgacattctgaaactcgtcccctgtctcattgccgaacgccctctcttccgaacccttattgcgcgccagttcccgttcgtatttgtggatgagagccaagacacgaccagcgaggttgtggaagctttgaagaccgtcgagcgcgaacccggagtcacactttgtctcggcttctttggcgatccgatgcaacgaatctacgctacggggaccgggcaggttgaagcagagcccacttgggctgacattccgaaacctgaaaatttccggtgctcaactaaggttctgaatctcgcgaatgccattcgtagtgatggtgatgacctcgttcaaacccctggccagcggctaggtaatgacggcatcgttccaacccctgaaggttcggcgcaccttttcattttgcctgcagacgatacgcgggacgcgaatctggttcgagtacgcgaatggatggcggcacaaaccggtgatgatcattggcgatcagatgatgatgacagcgcatgggtaaagcttctagtcattgttcatcaaatggccgcaaggcgattaggatttggagacctctacactacgctcaactccaaagccccgtcagcgttcaaagatggttttttagacggctctgcatggcctatttcgccgtgtgtaaagtttttgatcccgatagctatcgctcacacccgtggccgacagcttgaagtgatgcgactgatccgggagtactcacctcttctcgataaagactcccttgtcgaggtgagcatagctgagcgtcttaaagaacttggtcaccttgttgctttaatcgcggcgggcatagtgggaaattccggcgtaacgatcggcgaccttctgaggcaggtacatgtctcagagttactgatcctcgatcctcggttggtatcgtatttggacccaaatgcagtcgtgcctgtgcagcccaagcccgacgaaggagtggacaatgacgacgacgttcaagaagacgatgaatccgacaaagaaatggcttcaatggatgcttttctagcgtgccccgctagccagcttttgccataccatacctacatctcggagcgttctcctttttggactcagcagggtattaagggtgctgagttcgatagggtacttgtggttctagatgacgccgaaagtagccatttccaattctcctacgaaaaatatctaggccttaaggatttctcagataacgaccggaaacatatagatgctggtgaggaaacaactgtggatcgaacgcgccgtcttttctatgtgagctgcacaagggcgttaaaagatctggcggttgttctttttacggccaatcctgagcaggcagaggctcacatacgtcagcttgatctttttgaagataacgcgatccacactggagccgtcttcgaggttgcgtag

SEQ ID NO: 79020 - DNA, 2136 bp, Pseudomonas syringae pv. spinaceae
gtgcatatttcaaggttacagctcgtcaactaccgcaatttcaagtgtgcgaatgtcgtattcaacaagggggtaaacacgatcataggcgagaacggatcaggcaagaccaacctgttccgggcgttgcgtctcttgctcgacgacacgctgctgcgcgcggcatataggctcgacgagaaggacttccaccggggccttggcgactggcgcggtcactgggtagtcattagtctcgagttcgatgaggtatcccaagacgaagcgattcaatccctctttctccatgggaccggtaacatcgccgacggcgcgatcggcaaggcgacctacaaccttatttttcgccccaaggcggcagttcggcggaccctggccgacgttgccgtcggggataccgtaggactcgccgaggcacgttcgaagatcaccatttcggattatgaaacgatcttcaccggcaagagcaccgcaaacttcctcgatcctgaaacctacaggcaactggttggcgacttcgatgcggtaatatttccccaagaactgacgaaccctgctattggaggcgtcatcccgggcatgctctcgatctcgcgcgaagtgtgcttcaccttcgtgcaagcactgcgcgatgtggtcgccgacttccagaacaaccgcaccaaccccctcctaactctgctcaagtgtcgaagcggtgagatcgatccgcagagcttcgagccgatcaccgcgctcgtcaaagggctcaacgatgcaatcgagggcctaccagatgtagaaaccatccgcaccgatatccgcgacaccatcaccgatgcggcaggcgaaacctactctccgcgatcgctttcgatccgctcagatctgtccgacgaggccgaccgcctgttccagtcgctcaagctgtttgtgggcgagagcgaggaagaatatgagggcgcgattcacgagttgagcctgggcggtgcaaacctcatctacctgactttgaagctgctcgagttcaaataccagaagcagaaagagtccttcgccaatttcctcgtgatcgaggagccggaggcgcacatccacacccatatccaaaaaacgctgttcgaccggctgaactttgatgacacccagataatttattcgacccattcgacccacatatccgaagtgaacaacgtagtgaacatcaacatcctcggccggcaggacggacgatgcgaggtgtttcagccatctgcgggacttgacgccggccagattggcaatatccagcgctacctcgatgcggtccgcagcaatctgctcttcgccaagagcgtggtcctggtcgagggcgacgccgaggagatcctcatcccaatcctcgttaaaaaagtgttcgggctcagcctggacgagttggggatcagcttgatcaacatccgcagcaccggcttcaagaacgttgcggtgcttttccacaacgagcgcatccgcaagcgctgcgcgatcatcaccgaccttgaccgcgcgtttatcgatacgaccacggacatactagacagtgacgataaggcggccgccaagaagaaagcactggggtcacagatcgctggactccagcgcgaggcagcgctcaaggagttgtgtgccgggaatccctggctgacggcgcacttcgccgaccacacttttgaggtcgatttcgtctccgtcggcaatgtcggcaccgtcgtttcggtgctgggcgacgtctataaggatggcgggaccatcgcgacgtctaagatggagctggaatcgggcgacattgcacttttcgggacgcgcgtgctgacgatggcacgttacgccggaaaggggtggttcgccatcatcctagggcgaatgattacgcctgaaacttccattccggattacatcctcgacgccatcttccaagcgcatatcccggtatccatccagacatgggcgcgtgtgctggactatcgagtctcgatccttgcggcgtcgcaactacacgcgccaggagacatcgacgcgatgcgcgcgcacatcagacgttaccatcgcgccgagatcgactttgcaggtgtccgcgccgaaatgctacaggcctttcctgcagacggcatcaacaccatcctggcggatttctag

SEQ ID NO: 79021 - DNA, 1797 bp, Pseudomonas syringae pv. spinaceae
atgtttgtctgggacaggaaggatctgaacgacgcccaagtcgcagccatcgagcacccaggcagcgtcttcctcgttgcttgcccagggagcggtaaaacgaggaccctcacctacaagatcgcccgactgttgtcggagcttaagtcggacaaaaaacgcgtcgtcgcgatcacctacacgcaccgggctgcggatgagattcaggaacggatagagcagcttggcgtcgatacgagccagctttggattggcacgatccactccttctgtctcgaatggatcttaaagccctatggaatctatcactcggagctcatgcacggtttccgggtgatcaatgcccatgacaccgaacgaatgcacgaggagctctgcagcgcggcgcagggcactaagctcagcagcttcgactgcgcacattatttcacgccgaacggctatgtcctgacatgcaacaagaccaacaaacatgaagcaattggggaagttttgcaggcatattggaaggcgcttcgtgccgagcggcagctcgattttgaactgatccttttctacgcctatcaactcatcgagaataatccgtcgatcagcgtgctgctgggttcgatcttcgaatgcgtgctcctcgatgagtttcaggacacgcgggaaatccaatatacaatcctcgcatcgatcctgaaagcgtctaaaggcggtacgtccgccttcgtcgtaggcgatcctaatcaggcaatctatggctcgcttggcggctatgcgatcacggcgtccgactttgggacgcagtgcggcatcgccttcaaggaaatggagctatcacacaattaccggtcgtcatcgcgcattgtgagctatttcggcaattacaaggtcttgccttcgaagatcgaggcagtgggaaaggacaaggactgcgcgagcgtagtgtcgttcgatcaccagacgcaccgcgatgcgctggaggaagagcttgtaagactcatcagattcaacgtcgaaacgctcgggatcgctcagcatgaggtctgcatcgttgcgccttggtgggtccatctcgcaagcatgacacgccggctggtcgcggcgcttccggcctattcattcgatggcccgggcatggtgcccttcgcgcgcgacgtcgacaatttctggtacaagctcgcccggattattctgacggaggcgtccccacagctttatgtacgccggatgcgatgggcgggagaggtaatcgccgacctcagcgacgcgggcgtagaggttccaggtttggaccgcaagacactgctgcgcgcctgcaacgccatcatcatcaccgagaacgacggcctggcgttcctccgagcgttcttcgaccagctatgttccactttcgggatcgatcgccatacctacgcggcgcttcaagagcatcacgacgctttctttgaatcctcgcagaagcgcatcgataagctcatcaaggaaggcgctgaggcgattgctgaattggggatgttcaggaaggtctttgcggaccgaactggtgtgaccgtgtcgacgatccacggggtcaagggcgccgagtatgacgcagtgatcgcctatggcctactagagggaatggttccccacttcagcgatccgaaccaggccgagacagctaagaagctcatgtatgtggtgtcgtcgcgggccagaaaaaacctacatctgatctctgaacgcggtcgcagtcgaggctggagcggagattatcaaccaaccgacgtacttactggatgtgcattccagtacaaccagctttcttga

SEQ ID NO: 79022 - DNA, 2325 bp, Pseudomonas syringae pv. spinaceae
ttgagaggaaccacaatgccagaagctgtcgtcaccacgccggtagccggaaacatcacacttcgattcgtagaactttgtcagttccgtcgacttggtaaggtccaactcgatgtcgacaagaagactactattcttgtcggtgccaacaatagcggcaaaacatcggttcttgcagcgctacgccacttcctttcagatggctctccatttggggctttcgatatcagtctctcgcagtggccaaagttacgagcgcttggtaacgcttgggaggtgctaaaggaagacccgtcgacagtgaccgggtccgaagagcaatggatggagcagctcggaatcatccaatcggctatgccgacgttggacctctggttcgatgcggaggctggcatgttccactatgtcgccccgtttctctccaaattcagctggaaaggcggagccgttggggtacggttgcgtttggagcccgctgcaagcgttgacgagttgaagcagttggcttgggcatatcacacggcgcgactgccggtgaaggatatgggtgcggattcgcttgcctggcccattgacctcctcgacttttggttgcgcgagccgcacaagttgggtcaagtccgagcatacaaactggatgccgataacaaccctcttgaagggctacagacctatgcgactcagactctgccagcagactccagtccaattgagcgcaaaaatttacaaaaactgattcgcgttgacttcgttgccgcgcagcggggtcttggcagtgaggaagctgattctcggtctgcttctggtccccaccgtgtcggcatgttctccaatcaacttctcaagtttgctcgacagcatctaaatgttgctacaacaggtcatgggcatcgcgcagatcttattaaggcggtcgctgaggcgcagcaggcgctggacaagaagattcacgaggcgatcgctccgtcggtggaagaggttaaagagctcggatatccagggttgcacgatccccaagagattcgcttccgcacgcgcatacagacagctgatttgctcgaccatgggaccgctgttcaatacagcatgcagaaggactcactggaagagcttcttcccgaatactccattgggctcggataccaaaatctccaatcgctcagctatcaactggtttctttcaaagccgcccgactcaagcctgaaaagggcgccccggtacccgttcatctggtattgattgaggagcctgaggcgcatcttcatgtccaagtgcagcgcatcttcccagataaagcccacaagctgatcagcccgaacgacaaagacgcatcagggcttaaaagccagttaattattagtactcattccagccatctcgcgcatgcggagagttttgaccgattacggtacgtccgccgcatagcgaagagcgcggaaaatctcatgccgaccaccgaggtggtcaatcttgggcaaattttcgatgatgacaaaaagacccgtcaattcgcagagcggtatttccgcgttcagcatactgaccttttgtttgccaacgctgcaattttcgttgaaggcgttgctgagcgcatgctggtaccgcttttcatcgaacgagatttcaaaatgctcaacagccgctatctgtccttcctggacattggcggtagtcacgctcatcggcttaagccgctcgtggaaaaacttcgtattcccacggtcatcatcaccgacgtcgaccccgttgaagagagagctggcaagccaactaaggatggtgagccgaccaccacactagttgcagtggctaatactggccaagccgggctgcaatgcggtaacccgactctgcgcggatggcacccgaaactgcaacagctcgaagatttcaagaacccggcagaggtacagcttgtttggaaagaagtcgctgaatgcctagtgcgtttcgcttggcaactgcccgtggctgaagcgggtgaccattggcctagcacctttgaggactctcttattctcaagaacattccttggttcaaaggccttatggatgagaaggtcgacggtgatggcaacaaaataaagccgccaaaaggcgcgcttggctccgtagctcgacgggttgccgaccatgaaaatatttcggacttgctcgcagctctgcataaactcatgcacggctcgttcaaaaaaggagacttcgccgcaagcatctttgagatggtcgcgacggacgaaccaattgcctgccctaagtacattgcggatgccttggaatggcttcaaacacagctggatcccaacccggaattgatgtcatga

SEQ ID NO: 79023 - DNA, 1950 bp, Pseudomonas syringae pv. spinaceae
atgaccgcggtgccgatccttggcgacaacgaccgcgatgccgacgtagttgaggaaatctgcggctatctcactgaagagccacggcgtagctatttcctttttgcgggtgccggttccggtaaaacgcgtactctggttgaagttcttcggcggcttaccggcgtcatcgagcacgataaaggcgagcagttagcacgacgtctgcgaatgtacgggcgttcgattagggtggtgacatacaccaagaatgccgtctcggtcatcaacggacgcctcggcgacaacgacttagtcagcgtatcgacgatccactcgttttgctgggaactcatcaacgggttcaacgatgacattcgagaggcccttattgccgtaaaagaagctcaactcgcgaaagagaccgccgaggcgcaagcgaagccgaaaggcatcacgccagctaaacagagagatcttgacgaaatcaaggatgatatcgaggccttcagagcgaccgatgtgttcatctaccatcccgatcgcaacacttacggccccggcgcgcttgcgcacaactacgtcctcgacgcgacagcgtggctactccgaaataaacctacgctccaaaccattctcaaagatcgtcaccccatagttctcattgatgagtcgcaggacacaatgaaaggcatgctggacgccttgatggggcttgcagagcagggggggagcgacttgactcttgggctgctcggtgatcaccgacaacgcatttatgcgcacgggcacgccgatcttccaagtcttgtcccgcagaactgggcaacgccagagctgcagatgaaccatcgcagccagcgccgaatcgtcacgctcattaacaaagtctgggaagctgagcttgaaggtcggacgcagcctacaaacggtgtggagcagcatcctagaactgaaaaggccggaggcgtggttcggctcttcgtgggggatacctcacgttctcctgaggacaaagtgctcggcgaacgttggtgctcagatcggatgcacgaagctactggggcagccgcctggaatcaaggtcaataccaattgctcgcgctggagcacaagctcgttgccactcgcggctcgtttctcgatgtatatgaggcaatggtcctgctagatcctgacgccgcagcgccttctggcagtggtgataacaaggggccttctgccgtacaggttctcctcaacgagcttgctcaattagaggcgtgcgtaggtatctacggtgcagtgaacgagttcaaggccacagaggtatttcgtcggtatggaagcctcgacaacatgccggaggaatgtgccgcgcgagcgagtcgcgtggaggagatgctgaaggccatcacagcgtttgccaccgcctgcgccaatccgaagtcaactgttgcggacgttctcgcaccggtattgagcgcaaatttgtttgaaatcgatcatcgcctctcggaagcttatgccgacaagtcgccacatcttccggcgccgggtcgaggtgaggaggaatccaaacaggccaggatgcgtcgcgggtggtgtgcgctgttcgccgcaccctggaagcaactcagactgtaccgaacttacctcgcaggggattcagttctcgcaacgcatcaggtggtcaagggttccgagtttatacacgtcatggttgtgatggatgacgcccttgccggtgggtttcttatttcctacgacaagatttttggtggtgtggagcttagcaagcgggacaaagagaacgtagcgctgggcaaagagacgactatcgaccgcaccttgcggctgctttacgtaacctgcagccgcgcgcaggagtcgcttgcccttgtgctctggtcgtccgaccctgcagcggcactggctagaatcaaggagagcaactggtttgccaaaggcgagtttcaggcaatcccatag

SEQ ID NO: 79024 - DNA, 1956 bp, Pseudomonas amygdali pv. tabaci; identical to SEQ ID NO: 72702

SEQ ID NO: 79025 - DNA, 1671 bp, Pseudomonas amygdali pv. tabaci; identical to SEQ ID NO: 72703

SEQ ID NO: 79026 - DNA, 1905 bp, Pseudomonas amygdali pv. tabaci; identical to SEQ ID NO: 72704

SEQ ID NO: 79027 - DNA, 1752 bp, Pseudomonas amygdali pv. tabaci; identical to SEQ ID NO: 72705

SEQ ID NO: 79028 - DNA, 2049 bp, Pseudomonas syringae pv. tomato
ctgcctacgctatgtcagcccgcgataaacccatatccgtcgcggcatagaggaagggatcctgtgctaatcgaatctgccgtcctatctggtttccgttgctttgcgccccgtcctatcagcgtaacaatctcgccaaagatcacgaccatcgtcggccccaacgcggcagggaaaactgcgcttctacacgcgttggcgaagctgtttggagtgactcgggcacaacgcaccgtacgtcgctcggactttcacttgggacctgatgacgatcccaccagtcttgaatcaaagcacctctacattgaggttttgatcgcccttcccgaactgattgatggaactgcaacgccagaaacgatcgcaccttcatttcggcatatgctaatcgagcgaccagacgatgctcccgtctgtcgtcttcggcttgacgctcagtgggaggacgatggaaccgtggaaggcgaggtttcgcaaaccctgcactgggtcgacacgctcgacgatgcaccgccagaagacaagtgccaccccgtctccgtagccgatcggggattaattcagttgtattacacaccggcaagcagagacgctgctgctcagacccgggcgactgccggagcattggcggctcgtttgttacgcgcgatcgagtggtcgtccgataccgaagaggcggttcatgacgctaccgaaaatcttgcctctgccttcgaggaagaagcggcaattgccgcaatcacagaagctctacagacgcggtggtcggcacttcatgatgacgtcgtcgacactaatccgcgcctgagtctggtaagtcgcaggttcgaggaggtcgtcaacaaaattgcagtcatgttcgagcagggacctgacggtcaggagcgcggtatcgaggcgctcagcgacggtcaacaatcgctcttttacttcgctctggctgcggccgtcttcgacctagagcgtgaggttgtagcgggatcaattgagggcttccgaagtgacgctctgcggatacctgcgttgacgatcttcgctttggaggaaccagagaaccacctttcgccatatttccttgctcgcatcatccgccaagtccgatcactcacaaccgatggcagcgcgcaagccattgtcaccagtcactcacccgcagtacttagccgcgtcaatccgacggaagttcgatactgtagatgcgaccccaaaacgcgcgtgtctacggtcaagcggattaagcttccagtcaacgacgtggaggctagcaagtttgtaaggggtgcgatgttggcctacccagagctttattttgcgcggtttgttttgctggttgagggagattcggaaagaattgttttaccgcgactcgcagaggcgctgaatttgctgatcgatccagcctttgtcgctattgtcccattgggtggacgtcatgttcagcatttttggcgcttgcttaaacatctgggtattcctcacgccacgctgttggatcttgacctagggcgcgatggaggcggttttggacgagtcaaaacggcgatcgaaaagctgatcgagttcggtgcaccgaaagccgaagtgctgagaattacaactggcatcttatccgatgccgacttagcgaacatgcataattggcctgattcggtcgatcatagcggcctcctgtcatggatcaacaacaacctaaaagctcatggagtgtatttctcctcaccgctggatttagatctagcaatgctggaagcattccctgccgcctatgcagccatcgtccccgagcgcgggggttctcgcatggccgctgacaaagccgccgaagtggtattgggaacggcaggtcccggattaaaagcctacacagggccctttgttggttatccccctcaattcccgagttaccgctaccactttctcactaacagtaagcctgcaacccaccttgcagcgttgactcatatcacaaaggcgcaactggtagcgcacatgccagttgtgcttgcttcagtgctcaaacacatttccgcgtcgttgaggcgggactga

SEQ ID NO: 79029 - DNA, 1905 bp, Pseudomonas syringae pv. tomato; identical to SEQ ID NO: 71687

SEQ ID NO: 79030 - DNA, 2310 bp, Pseudomonas tremae
atgccagaagcgctcgtcaccacgccgatagccggaaacatcacacttcgattcgtagaaatttgtcagttccgtcgacttggtaaggtccaactcgatgtcgacaagaagactactattcttgtcggtgccaacaatagcggcaaaacatcggttcttgcagcgctacgccacttcctttcagatggctctccatttggtgctttcgatatcagtctctcgcagtggccaaagttacgagcgcttggtaaatcttgggaggtgctagaggaagacccgtcgacagtgaccgggtccgaagagcaatggatgcagcagctcggaatcatccactcggctatgccgacgttggacctctggttcgatgcggaggctggcatgttccactatgtcgccccgtttctctccaagttcagctggaaaggcggagccgttgggttacggttgcgtttggagcccgctgcaagcgctgacgagttgaagcagttggcttgggcatatcacacggcgcgactgccggtgaaggatatgggtgcggattcgcttgcctggcccattgacctcctcgacttttggttgcgcgagccgcacaagttgggtcaagtccgtgcatacaaactggatgccgataacaaccctctggaagggctacagacctatgcgactcagactctgccggcagactccagtccaattgagcgcaaaaatttacagaaactgattcgcgctgacttcgttgccgcgcagcggggtcttggcagtgaggaagctgattctcggtctgcttctggtccccaccgtgtcggtatgttctccaatcaacttctcaagtttgctcgacagcatctaaatgttgctacaacaggtcatgggcatcgcgcagatcttattaaggcggtcgctgaggcgcagcaggcgctggacaagaagattcacgaggcgatcgctccgtcggtggaagaggttaaagagctcgggtatccagggttgcacgatccccaagagattcgcttccgcacgcgcatacagacagctgatttgctcgaccacgggaccgctgttcaatacagcatgcagaaggactcactggaagagcttcttcccgaatactccattgggctcggataccaaaatctccaatcgctcagctatcaactggtttctttcaaagccgcccgactcaagcctgaaaagggcgccccggtacccgttcatctggtattgattgaggagcctgaggcgcatctccatgtccaagtgcagcgcatcttcccagataaagcccacaagctgatcagcccgaacgacaaagacgcatcagggcttaaaagccagttaattattagtactcattccagccatctcgcgcatgcggagagttttgaccgattacggtacgtccgtcgcatagcgaagagcgcggaaaatctcatgccgaccaccgaggtggtcaatcttgggcaaattttcggtgatgacaaaaagacccgtcaattcgcagagcggtatttccgcgttcagcatactgaccttttgtttgccaacgctgcaattttcgttgaaggcgttgctgagcgcatgctggtaccgcttttcatcgaacgagatttcaaaatgctcaacagccgctatctgtccttcctggacattggcggtagtcacgctcatcggcttaagccgctcgtggaaaagcttcgtattcccacggtcatcatcaccgacgtcgaccccgttgaagagagagctggcaagccaactaaggatggtgagccgaccaccactctagttgcagtcgctaatactggccaagccgggctgcaatgcgggaatccgactctgcgcggatggcaccctaaactgcaacagctcgaagatttcaagaacccggcagaggtacaacttgtttggaaagaagtcgctgaatgcctagtgcgtttcgcttggcaactgcccgtggctgaagcgggtgaccattggcctagcacctttgaggactctcttattctcaagaacattccttggttcaaaggccttatggatgagaaggtcgacgatgatggcaacaaaacaaagccgccaaaaggcacgcttggctccgtagctcgacgggttgcccaccatggaaatatttcggacttgctcgcagctctgcacaaactcatgcacggctcgttcaaaaaaggagacttcgccgcaagcatctttgagatggtcgcgacggacgaaccaattgcctgtcctaagtacattgcggatgccttggaatggcttcaaacacagctggatcccaacccggaattgatgtcatga

SEQ ID NO: 79031 - DNA, 1950 bp, Pseudomonas tremae
atgaccgcggtgccgatccttggcgacaacgaccgcgatgccggcgtagttgaggaaatctgcggctatctcactgaagagccaccgcgtagctatttcctttttgcgggtgccggttccggtaaaacgcgtactctggttgaagttcttcggcggcttaccggcgtcattgagcacgataaaggcgagcagttagcacgacgtctgcgaatgtacgggcgttcgattagggtggtgacatacaccaagaatgccgtctcggtcatcaacggacgcctcggcgacaacgacttagtcagcgtatcgacgatccactcgttttgctgggaactcatcaacgggttcaacgatgacattcgagaggcccttattgccgttaaagaagctcaactcgcgaaagagaccgccgaggcgcaagcgaagccgaaaggcatcacgccagctaaacagagagatcttgacgaaatcaaggatgatatcgaggccttcagagcgaccgatgtgttcatctaccatcccgatcgcaacacgtacggccctggcgcgcttgcacacaactacgtcctcgacgcgacagcgtggctactccgaaataaacctacgctccaaaccattctcaaagatcgtcaccccatagttctcattgatgagtcgcaggacacaatgaaaggcatgctgaacgccttgatggggcttgcagagcagggggtgagcgacttgactcttgggctgctcggtgatcaccgacaacgcatttatgcgcacgggcacgccgatcttccaagtcttgtcccgcagaactgggcaacgccagagttgcagatgaaccatcgcagccagcgccgaatcgtcacgctcattaacaaagtctgggaagctgagcttgaaggtcggacgcaacctacaaacggtgtggagcagtatcctagaactgaaaaggccggaggcgtggttcggctcttcgtgggggatacctcgcgttctcctgaggacaaagtgctcggcgaaggttggtgctcagatcggatgcacgaagctactggggcagccgcctggaatcaaggtcaataccaattgctcgcgctggagcacaagctcgttgccactcgcggctcgtttctcgatgtatatgaggcaatggtcctgctagatcctgacgccgcagcgccttctggcagtggtgataacaaggggccttctgccgtacaggttctcctcaacgagcttgctcaattagaggcgtgcgtaggtatcaacggtgcagtgaacgagttcaaggccacagaggtatttcgtcggtatggaagcctcgacaatatgccggaggagtgtgccgcgcgagcgagtcgcgtggaggagatgctgaaggccatcacagcatttgccaccgcctgcgccaatccgaagtcaactgttgcggaagtgctcgcaccggtcttgggcgcaaatttgtttgaaatcgatcatcgcctctcggaagcttatgccgacaagtcgccacatcttccggcaccgggtcgaggtgaggaggaatccaaacaggccaggatgcgtcgcgggtggtgtgcgctgttcgccgcaccctggaagcaactcagactgtaccgaacttacctcgcaggggattcagttctcgcaacgcatcaggtggtcaagggttccgagtttatacacgtcatggttgtgatggatgacgcccttgcaggtgggtttcttatttcctacgacaagatttttggtggtgtggagcttagcaagcgggacaaagagaacgtagaactgggcaaagagacgactatcgaccgcaccttgcggctgctttacgtaacctgcagccgcgcgcaggagtcgcttgcccttgtgctctggtcgtccgaccctgcagcggcactggctagaatcaaggagagcaactggtttgccaaaggcgagtttcaggcaatcccatag

SEQ ID NO: 79032 - DNA, 2337 bp, Pseudomonas amygdali pv. ulmi
atgcatattgagaccgtttgggtgcgtaatttccgtcgtctgaaggacactcgcatcgatctggcgtcagatatttcaatatttgtcggggccaacaacagcggtaaaacatctgcggcgcacgctttgcagctttttacctccgcttcgaaagatcggtttaccctccatgatttcagctcagagtgctgggacgtcatcaacgctttcggagaaggagcggacggagtcgaactgccaaccatctccctcgacatctggttttgcgtcacgccagccgatctgcatcgagttgtagatctgctacctagcctagattggcaaggtagccgggttggtattcgagtggagctcgcagcagcagatgccggccttctgagaagcagtttccaagaagcacgggccagcgcacggcatgctcagttgcagcctgcaggggaaggcgtggcacagggatacgtggagccagccattgcgcaagacgggtacaacccgcgaccgcgtgacctttgtgacttcattgcagacaccgtaggtgacaggctacggcgtgatttcgaattgcggtactacatactcgatagcgccggatttgacactgagtttaaacagcttgatggttacgtgcctctacgcctggttcctgataaggggcgcagtggcagggatgtgctgggtagcttggtaaaggtcgactgtttacatgcccagcgtcacctgtccgactccaatgctggatctcgatccgaagatctctcccgctgtttgagtcgtttctatgaacggaaccttgagaagcgcggcgaggattatgacgctcagcgcgcactataccagtccgagagtctactgaatgaccacctggaacgtgtcttcggtcccactttggagcgtttggccgatctgggctatcccggggtaaacaatcctcggctgctgatcaagactgcattgaaccctgcgaccattctgagtagccatgaaggggcacgtgtgcactacgcgctcggcgctctcggagcagcagaggtcacggcaaccttgcctgataggtacaacggcctaggtttcaagaacctgatttatatggttattgaactgcttgatgttcacggtcgatggttggacattgaggaaaaccgcccaccgctccacctgatattcatagaagagccggaggcgcatctccatgctcagctgcagcaggttttcattcggaaagtgttagatatcctcgccgtgcccgaggaagacagcccatattgcaccagccagcttgtagtctcgacgcactcgcctcacgtcctttacgagcgaggctttaaacctattcgatattttcggcgagtagcggatgccggcatacagcaatctcaagtgctcagcatggcagctttttatgaggcggctgtagatcctaacgacccaaatgaccgcaccagggattttcttgagcgatatctcaggctaactcactgcgacatgttcttcgctgatgcggccattttggttgaagggaacgtcgagcggctgctgatgccgcaaatgattgctaaagctgcacctcgacttcaatcgaactatttgagcgttttagaggtgggtggcgcgttcggacatcgattcaaaggcctcattgatttcttggggctcacttctctgatcgtgaccgacattgacagtgtttctccgcccgcagcgggcgctttagccgcaaacggcgagttgcctgttgatgaggatccagcggatgcagagcctgacgacaatgagggcgcggaggaggctgaagcgagacgtaaagggcgcaaggcgtgcatggttcatgaagccggggctcttacttcaaaccagacattgatcaaatggctgcctgggcacaccacgattgacgatctgctggctgcgactgccgaacagcgcactcaactccgagacgaagaaggcggcgcccttgtacgcgtcgcttaccagacaccagtagcggtggtgtggggcggagcgactcaggtgaggacaggcaggacgttggaggaagcgtttgcactgcaaaacctaacctggacgcagcacctggaccgcaaggatctcggcctacgtatcaagggttccaataatctggaaatcgcaggtattgcggagcgcctttaccgtaaggtcaaaagctcaagttttcgtaaaactgatttcgctcttgggctgctggctcaagagccatcggcatggacggtgccaaattacatttcgaacggtcttcgttggttggaggatctggtcgccccgccaccgcccgcagtagctgaggcggaggcgcctctcaacgggggtgaggtatga

SEQ ID NO: 79033 - DNA, 1791 bp, Pseudomonas amygdali pv. ulmi
atgactgcgcgtatcggtcagccggatactcaagcagatatcgaactaaggttgtgcttggaccaacgtcctcaacgcagctttgtcatggttgctggcgcgggttctggaaagacgacgtcgctggtaaaggctcttgcgcacctcggccagacgcgaagactaaagctcaacatgcgggggcatagagtcgcttgcattacctacactgaagtagcggtcaaggagatctggggggacgtaggtaacgatccgctgttccatgtctcgacgattcatagttttctgtggacggtaatcaggccattccaagtgaacttgaaggcttgggtcatcgcaaggatccacgagaaaatcgccgaggcgcagcagcatcacgacaagcctaggactcgggcagcaactcgtgagcggctcgtgaaagatatcgcgcgtcaccagcgtcaccttgaggccgtaaggcatttgactcattttaactacggcgccggaagcgatttcgggcgaggtgtactcgggcacttcgacgttatttcggcggcggtcgagctaatcgagcagagccagttgcttcgtgatgtcatcgccagcaggtatccagtccttttcattgatgaaagccaagacacgcgtccggaagtagtggctgcatttagaaggatcgccgagacgactcctgtggagttctgcctaggattttttggcgatccgatgcaaaaaatctaccttgaaggtgctggagtcattgagacggccgcaggctgggagcaaatcaccaagccagaaaatttcaggtgtccgcagcgagtgctccaggtagtgaatgctatccgggagcccgatgacggtttgtctcaaacacgaggccggatgaactgggtcgacggcaatcctgaacctgttatgggatctgttcaattcttcctactgagagcagatgaccatcgctctatgaagctagctaaagttcgtgaatggatgcggcgtacgaacgatgacgatcattgggtgagtgatgatcctgccgctgacttcagggttttggttgtcgtgcatcggatggcggcagcgaggctcggctttccgaatctttacgctgctttgaatgacaacgatgcaccaccgtccattaaggagggccttaaggacggcaccgcatggccgctgcggccgtttctgaattacttgctacccttggcaacggcggtttcagaaaaccgaaagctcgacgtcatgacttttctgcgttcggaatgtccattactgcagccaacggctctggtcggtagcgatccggtagcggtgcttcgggcattgcaagcatccacaacagagttggccagactcattttttcgagcgatgcattgctgcaggacgtgctcgttcactcccaggcagcaggtctgctacgactggacgaagcgtggacaaaatacttgggcccagaccgcacagcagacgatgaagatcctgagatccccgccgtgtcggctttcctacgttgcggtgtcggtgaattggctggctatcgtcactatctcgaagatctttcaccgtttgcgacccagcagggagtgaagggggcggaattcgaacgcgttttggtgctcatagatgacgaagaaggtagaggacaaaggcagttctcctacgaaaaatacttcggcattgtggagccctcagatactgatctggaaaaccttgcacagggcaaggatagcgtgatggatcgcaccagaaggcttttttacgtgtgttgctcccgagcgactagggagccgctgatttat

SEQ ID NO: 79034 - DNA, 2370 bp, Pseudomonas viridiflava; identical to SEQ ID NO: 72950

SEQ ID NO: 79035 - DNA, 1983 bp, Pseudomonas viridiflava; identical to SEQ ID NO: 72951

SEQ ID NO: 79036 - DNA, 1941 bp, Pseudomonas syringae pv. alisalensis
atcagaaaaggaaagcgagcaatgaagctttgcagtctgcagatatccaatttccagtcctttggccctcaccctactccgatcacatttgaagacataacctatctcttgggcccgaatggctcgggcaaaaccgctgtcctccaatcgctgtgcaggctattcgcatttgaacccggactgcgccgcgtccgcccttctgactttcatgtcccggtgggcctgagcaatgctgagggtggcacgacgttatggctggaggccgagttttcctttccagagacagctgatgatgaggacaacgacacggttgctccgcatttcgatcacatgcgtctccaggctgcgggcgatgtgccgcgggttcgctaccgactgacagccacagtcgacgacgaaggtgatgtggaagagacgcttgtctatgtcactcaggcggatgccgatggaaatccaatcgttagctccatcgtccctaagcatcagcgcaaccagatccaccttcattacatcccggcccgacgtgacccctccgaccacatcgcctatggcgcaaccgcgttgctcggtcgtttgcttcgtgcaacacagtggggtggcgaccgagatacggtcaaggatctaaccgaccaaatcacaagctgcttggccggcaatgcttcggtcacagcgctaggacaaagcctgaacgcctcatggaaaggtcttcataagggagccttcttcgcggagccgaagcttactttcgtcaactctgacatcgagatgctgttgcggcacatgtcggtgtcattcacgcccggccatggtgagaatgaggtcgatttttcacgactgagtgatgggcagaaatccatgctctatctctcgcttgtgttggcagctcactcgattaatcgtgacgtgagatcgggtaaaaacaccgccattgatcctgcgaagttgaaaccgccggcgttcaccatattggccatggaggagcccgagaatagcttgtcgcctcactacctcggccggatcgtgaacgccctgaaagggtcaatcggtgtagacgcgcaggcgctgatcgcgacacatgcgccttcgatgctacgccgggttgatcctgagaacatacgctacctccggctcggcccgaaccggtgctctctcgtcagcggcattgtcctgccagccaaggaagatgtagcccataaattcgttcgagaagctgtccaagcctttcctgaaatctatttctcgcgcttagtcgtgctgggcgaaggtgacagcgaagagattgtccttccgaggattctccaggccaaaggagccccggttgacgaatcggcggtgaccatcgcgccgctgggtggccgtcacgtgaatcacttctggcgtttgctttcccagctcggcacgccgtacatcaccctgcttgacctggatctcgcacggtaccaaggaggctggggccggctgaaatacgtcaatgaccagctgacagagtttgagagtcataaagcattgccctacgggttcccagcttgggacgacgctaatactcgtattagggaaaaaaatgttcccaccactgggtcttctgagacggttttcgatcatctagaggccagaggcatatttttttcggcaccgcttgatctggactttgcaatgctcactgccttcccaaaagcattcaatgccgttcctgtggcgcccacaccagaaagtcaaaaagcggtgcttggcaaaagccacgaaggcgccgatcaatacactccccaagagcaagcgtggttcgatgcctatcaccactatttcaagctcaacagcaaacccgcagctcacctcacggccctgtcgagcctctctgacgccgaacttcttgcaggcctgccaccgtcactggatcgactagccgatgcagtaatagcagcgttagaggagtcacccgagtga

SEQ ID NO: 79037 - DNA, 1683 bp, Pseudomonas syringae pv. alisalensis
gtgattcaccctgaccgttggacgcattcacccgggctcacactggaagcgaatgcatggcacgccatcaaggacaccgagcactcgctcgtccttcttgcggggcctggtgctggtaaaactgagatattggctcagcgtgcagactttctcctgcgcacaggtagttgccggtatcccaagcgaatcctggcgatttccttcaaatccgacgcgagccgcaatctcaaagaacgtgtaagcctgagatgtggctgggaacaggccacccgtttcgacagctttacgttccactctttcgccaatcgaatcgtcagtcgctttcgcgttttattgaccggccctgacgccctcaaacccgactactcgattggcaaagaggctatccctggcgagcagatcaccttcatgcaactgcttcccatcgcgctcaaaattctaaggacgagcaagattgcccggaacactatccgccagacctatgcgcacgtatttctcgacgaattccaggactgcacttctgatcagtaccagctgatcaaactcctgtttgaaggcactccagctcttatgactgccgtcggtgacaccaagcagaccatcatgggatgggctggcgccctgcatggcatattcaagctttacgccgacgacttcgccgcccggccattacggctctaccgaaatttccgatccaagccgcgcctgctccgtatgcagaacagcgttatcagagacatcgacccttcagcccttatgcccgacgaaatgatcgggggagacgatggtgtaatccgggcagggaatttctcctcgagcgccgctgaagccttttccctggcgaaccttattcagaaatggatcgaggtcgaagacttgcgaccagccgaaatcgccgttcttttccgcggcgagatcgatttatatggcgaagaactgatggagcagctgacgcttaggaacataccctttcgcaatgagaacacccttcaggacttgctcaaggagcctgctgccaggctaatgatcgactacttgacctgcctctatacgcgaggctccaacaaagcatggtcacggctgatggatcttttcgcgccgttcgatgacgagggtaacagcgaccggactcacaaatcgttcgagctttgctacaaacagcatcagaagaaggtgaaggcagcagcaaagacaacgaccccctacgccgattggtgggagcttgccaaggcgttcttcgacaccttagggcatgccgtcatgacaaccctttcttcagactacgaaactaagcgacgtctgaaggagatcattcgcgatacgcgtgaccacatctccaccctcctgcagacagaacccgatctgccaagggctcttgcccggttctcagacgacaacgctgttcgcttcctatccatgcataaaagcaaaggtctggagtttcattcggtgatcatatctggggttgagcagcaaacgtttcgcggcaaaattggggaggagcgacaggtgttcttcgtcgcagtctctcgagcgatggagcgccttatcatcaccactgcgaatcagaggcaacggcctgtgagaatatcggcgggcaagagatgggatgttgcgagacagccgcatgtagcctttgtcacttacgtcactgagcatttgtcgcctaaacagccgcagtga

SEQ ID NO: 79038 - DNA, 2403 bp, Pseudomonas syringae pv. alisalensis
atgaagctacaggcatatcggctgcagaactatcgccgactgcgcgacgtcgtcattgagcttgacgatgagatttccatcttcgttggcgccaacaacagcggcaagacgtctgccgtacaaggcctgtactcgatgctccgtggcgaagcgaagaagttcgaactcttcgactttagcgcggcgttgtgggccgagatcgacgccatcggcaggacgcctccaggcgatgaggacgcgcccaagcagttgccgtccattcttttggatctctggttccgggtcggtgaagacgacctcgccactgcaatgtcgcttcttccgagcacggagtgggacggtaagtgcgtcgggatccgggtggcgttcgagcctcaggacgcccatgcactcgtccggaagttccacgaactgcatgaaaagtccaacaacgctgcgagcgcactggtggccagacgcagtgtaggcgcggaggcagatgcggaaaatgcggcggcggtggtagcggatcccggcgagtacaagccctggccggaaagtctgacgaagtacctcaccaaggaactgagcaaagaatatacgttccgctactacgtgctcgatgagcgcgcatttgtcggctatcagccaaaggaagttgattatgcgccgctgcccctaggcaaggagccgggtggcgcggcgattatcaagtctctggtgagggtggacttcctgcgcgcgcagcggcacctcgatgatccggatgctggcagctccgaccgcgccgagagcttgtcgcggcgtctgagccgtttctatcaccgcaatctggagaagcgtggcgacgaccatgcagcgctcaaagcgctcgatacctcggagaaagaactgaacttccacctgaaggaagtcttcagcgacactctcaagcgtctcgccaaactcggctatccaggcgtcaacaaccccgagatcgtgattcgggcggccttggatccgaccaccgtcctggggcaggattccaaggttcactacgtggttcctggtgcgatcaccgcgcaactgcccgacagctacaatggtctggggttcaagaacctagtctatatggtggttgaactcctagacctgcacgagcagtggaaagccgaggaagacaagcgggcgccactgcatctggtcttcatcgaggagcctgaggcgcatctgcacgctcagatccagcaggtcttcattaggaatgttttgcgcctccttgaggatgccaacgatcacgcaacgtttttccacacgcagctcgttgtcaccacgcactccccgcacattctctatgagcgcgggttctctcccattaggtactttcgccgtgttagcgagcagttggaccataacaccgaggtaaggaatctttcgctctttaagacgtgcgcggccgacgctccagcgcgcgaattcttgcagcggtatctgaaactgacacactgcgatctcttcttttccgatgctgtcatcctggtggagggcaatgtcgagcgcctgctcttgccagccatgatcgagacggcggccaagcgcctgcgttcctccgccctaaccatccttgaagtcggtggcgcgttcgcgcatcggttccaggaattgattgccttcgttggacttactacgctggtcatcacggatctggacagcgtagcggtcaagacggatgccgagaatgccgccgagcaagacgcaggagccggtgccgtcgacggaaataacgaggaagacgacctgaagcccttcgagctcgaagacgacgacgaagcagcaccgggcggcaagaagaagtccaagaagcgtggcagcacctgccatgctcacgtggagggtgcgtacacgtccaaccaaacccttatcagttggatccctaagaaacggttggttgccgaactctgggaagtcacggcggagcaaaaaacgctgtcgcttgccgaggggaccagcgctgaggttcgggtggcctatcaaaccaaggttttggtgacggtgggtgccacgacctcgcagctctgcggccgcacgcttgaggaggccttcggtcttgagaactccgactggtgtcaggctgaggctaaccgctcggtcggactcaagctgaagcgcgcaccaaacagccctgaagaactggctgagaagttgcacgaaagggtgatcggcaagaacttcgacaagactcgctttgcgctggaggtcctcgcaagcgggccgctcaactgctggaaagtccccacttacatcgccgagggcttagcctggctcgaaaccaaagtggcccacgagattgaggcggacgcggctattgccaacgaggtcgcgacaattgagccgactgcagccggtgttgtcgccgttattgcaggcgcggggcagacgacatga

SEQ ID NO: 79039 - DNA, 1932 bp, Pseudomonas syringae pv. alisalensis
atgagcagacgaattgatagcccagacaccgacgccgaccgcgagatccacgcgtgtattgccgagacccccccgcagccgttcgtggtccgcgccggcgcaggttccggcaagaccacctcccttatcaaagcgctggactgggtgatctcagagcacggcgccagcatgcgggcgaagaagcagaaggtcgcctgcatcacatatacggacctcgccgccaaagaaatcttggcggatgtcaacgacgacccgctggttcatgtctcgaccatccacagcttctactggtctattaccaagacgtttcaggcagacattaaggtttggctacagaacgacctccgcaggcggatcaccgaactggaagaagaattcaagaactacagctcgcgtgtccggcagactacacgcgacaggaacaaggctgaccaacagcgttatgcccgaagccttgagactattgctggcgtcaagactttcaactacggggtgggcagtgactacgcgaagggcgtcctcggccacgaggacatccttcagctcgccgatttcctgctgcaaaatcgcccgctgttccgacgggtcgtagcgctgaacttcccgtttgtgttcattgacgagagtcaggacacgttcccgagcgtggtgaagtccttcaaggaagtggaagcccagatgcggcgcaagttctgtctcggtttttttggcgacccgatgcaggcgattttcatgagagggtcgggggacatcccgcttgaggaccattggcgggctatcacgaaaccagagaattttcgctgtgcgaagcagatccttgacgttgccaacgccgtgcgcgcgcagggcgacggcatggagcaagtccgcgggctgcacgaaagggttgatggagaactcaagccggtggagggctcggcccggatgttcgtcctgccgaacacgctgaaccgaattgaggccctggcgagaatccgggcgtggagcgcggcgacgaacaacgacgagggttggacgaccccagacatcgcgctcaagattcttgtcatcgtgcaccgcatggccgcaaaccggctcggcttcggtggcatctactcggcgctgaacgataagacatcggagggcatgaagcaggggatgcaggatggcaccggctggcccgttcgaccgctcctaagttttgcgctaccgatcgttgctgccgtgaaagccggtaacgagttcgcggcgatgaacctgctccggaagttcagcccgcgtctggcgccagtggctcttaccggccgacgtgccgcggctgtattgcgagagctgcacgctgctatgtctagacttgtcgccatgttggacgaggcagggaccaccattggtgacatagcactccatctctgtgacacgggtcttttcgagttcgacgatcgctatgtgcgtgttctcggatttgtcagggatgttgcagacgctgcccaggagcccgaggctgctgatgcagttccggccgaaggactatcctcagatgcggcaatggccaagttcttcaagtgctctgcacaagagctttggccctatgagcgctatgtctcagaagggtctccctatgctacacagcacggtgtgaagggcgcgcagttcgaacgcgtcatggttgtgatggacgaggaagaaagcgactaccgaacgtacaactacgaacgtgtcttcgcgagcgctgaggcccgtgctgcagatcgtgcacgagcactaggcggtgatgaaaacacttggagccgaacgctgcgactgctttacgtctgctgcactcgcgcccagcgggggctggtactaacgttctttgtcgccgatccgacgaccaccttggaaaatgtcgtggcgagcgggatcttgccgcgaagcgcagtcttcacacatgaagttttagctggatggccatag

SEQ ID NO: 79040 - DNA, 1944 bp, Pseudomonas syringae pv. apii
ttgatcagaaaaggaaagcgagcaatgaagctgtgcagtctgcggatatccaatttccagtcgtttggccctcaccctactccgatcacatttgaagacataacctatctcttgggcccgaatggcgcgggcaaaaccgctgtcctccaatcgctgtgcaggctatttgcattcgaacccggactgcgccgcgtccgcccttctgactttcacgtcccggtgggcctgaccaatgctgagggtggcacgacgttatggctggaggctgagttttcctttccagagacagctgatgatgaggacaacgacacggttgctccacacttcgatcatatgcgtctccaggctgcgggcgatgtgccgcgggttcgctaccgactgacagccacagtcgacgacgaaggtgatgtggaagagacgctcgtctatgtgacgcaggcggatgctgatggaaatccaatcgttagctccatcgtccctaagcatcagcgcaaccagatccaccttcattacatcccggcgcggcgtgacccctccgaccacatcgcttatggcgcaaccgcgttgctcggtcgtttgcttcgtgcaacacagtggggtggcgaccgaaatacggtcaaggatctcaccgaccagatcaccagctgcttggccggcaatgcttcggtcacagcgctaggacaaagcctgaacgcctcatggaaaggtctccataagggagccttcttcgcggagccgaagctcactttcgtcaactctgacatcgagatgctgttgcggcacatgtcggtatcattcacgccgggccatggtgagaatgaagtcgatttttctcgactgagtgacgggcagaaatcaatgctctatctctcgcttgtgttggcggctcactcgataaatcgtgacgtgagatcgggtaaaaacaccgccattgatcctgcgaagttgaaaccgccggcgttcaccatattggccatggaggaacccgagaatagcttgtcgcctcactacctcggccggatcgtgaatgctctgaaaggatcaattggtgtggatgcgcaagcgctgatcgccacacatgcgccttcgatgctacgccgggttgatcctgagaacatacgctacctccggctcggcccgaaccggtgctctctcgtcagcggcattgtgctgccagccaaggaagatgtagcccataaattcgttcgagaagccgtccaggcctttcctgagatctatttctcccgcttggtcgtgctgggcgaaggtgacagcgaagagattgttcttccgaggattctccaagccaagggagccccggtcgacgagtccgctgtgaccatcgcgcccctaggtggtcgtcacgtgaatcatttctggcgtttgctttcccagctcggcacgccttacatcacgctgcttgacctggatctcgcacggtaccaaggaggctgggggcgcctgaaatacgtcaatgaccagctgacagagtttcagactcataaagctttgccctacggattcccagcttgggacgacgctaatacccgtattagggaaaaaaatattcccaccactgggtcttctgagacggttttcgatcatctagaggccagaggtatatttttttcggcaccgcttgatctggacttcgcgatgctcaccgccttcccaaaggcattcaatgccattcctgtggcgcccacaccagaaagtcaaaaagcggtgcttggcaaaagccacgaaggcgccgatcaatacacccctcaagagcaagcgtggttcgatgcctatcaccactatttcaagctcaacagcaaacccgcagctcacctctcggccctttcgaacctctctgacggcgaactgctcgcaggcctgccaccgtcacttgatcaactagccgatgcagtaatagcagcgttagaggagtcacccgagtga

SEQ ID NO: 79041 - DNA, 1683 bp, Pseudomonas syringae pv. apii
gtgattcaccctgaccgttggatgcactcacctgggctcactctggaagcgaatgcttggcacgccattaaggacaccgagcactcgctcgtccttcttgcggggcctggtgctggcaaaactgagatattggctcagcgtgcagactttctcctgcgcacaggcagttgccggtatcccaagcgaatcctagcgatctccttcaaatccgacgcgagccgcaatctcaaagaacgtgtaagcctgcgatgtggctgggaacaggccacccgtttcgacagctttacgtttcactctttcgccaatcgaatcgtcagtcgctttcgcgttttattgaccggccccgacgccctcaaacccgactactcgatcggcaaagaggccatccctggcgagcagatcaccttcatgcaactgcttcccatcgcgctcaaaattctacgaacgagcaagattgcccgaaacgctatccgtcagacctatgcgcacgtatttctcgacgaattccaggattgcacctctgatcagtaccagctcatcaaactcctgtttgaaggcactccagctcttctgactgccgtcggtgacaccaagcagaccatcatgggatgggctggcgccctggatggcatattcaagctttacgccgacgacttcgccgcccggccattacggctctaccgaaatttccgatccaaaccgcgtctgctccgtatgcagaacagcgttatccgagacatcgacccttcagccctcatgcccgacgaaatgatcgggggagacgatggtgtaatccgggcagggaatttctcgtcgagcgccactgaagccgtttccctggcgaaccttatccagaaatggatcgaggtcgaagacttgcgcccagccaatatcgccgtacttttccgcggcgagatcgatttgtatggcgaagaattgatggagcaactgacgcttcggaacataccctatcgcaatgagaacactctgcaggacttgctcaaggagcctgctgccaggctaatgatcgactacttgacctgcctgtatacgcgaggctccaacaaagcctggtcacggctgatggatcttttcgcgccgttcgacgacgagggtaacagcgaccggactcacaagtcgttccagctttgctacaaacagcatcagaagacggtgaaggcagcagcgaaaacgacgaccccctacgccgattggtgggagctcgccaaggcgttcttcgacaccttgggacatgccgtcatgacaaccctttcttcagactacgaaactaagcgacgtctgaaggagatcattcgcgatacccgtgaccacatcaccaccctactgctgacagaacccgagctgccaagggcacttgcccggttctcggacgacaacgctgtccgcttcctatccatgcacaaaagcaaagggttggagtttcattcggtgatcatcttcggtgtcgagcagcaatccttccgcggcaaaataggtgaagaacggcaggtcttcttcgtcgcggtctctcgagcgatggagcgtcttatcatcaccactgcgaatcagaggccacggcctgtgggaatatcggcgagcaaaagatgggatgttgcgagacagccgcatgtaacctttgtcacgtacgtcactgagcatttgtcgcctaaacagccgcagtga

SEQ ID NO: 79042 - DNA, 2295 bp, Pseudomonas syringae pv. antirrhini
atgcgcattcagcacgtagagatatctaacttccgaaagctgctttctgtgcgaattgacttcgctaatgagaccacgctgcttgtaggtgcaaacaacagcggcaaatcatcggccatgctggcactccggagatttttggtttcgaagggatcttcttttcggctccaggatctgactctttgtcatttcgccaagcttgacgaaattggtaaggagtgggagaccccaccagcaaactttgaaattcctacagccaaggactgggccgactggctccctagtctggatatctgggtgtcggcagatcaaggagaattccacttcatccgcgatctcattcccagctttgcgtggcgcggggggcttgtgggaatgcgtttcctgcttgaaccagatgatatgaatatgctgtacacggactatcgcaaggagcgcgcgagggttgcagagcttgaggatgctttagggaaggaggacccgcttggtagcccgctgacgctatggccacagagcctccatgattacttgaaccgtcggctgggagataaattcaaggttcgttggtatcgcctagatccgcaacaacttaagaagcctcacaagtcgactcgaatggctcaaatgcagcaattgagtcctacctccctgcctctggaaagcaatcccctcagtggattaattcgagtacacgagatcaatgcacagcggggattcggcgaccattcggacgacaatcaaggcgataacactagacccagcggtgcccgaaaactctcggaacaactcagatcctattactcccgacacctagatccaggtgacagcccagatatctcagatctcgaagcgttgcgggcgatagaagcagcccagtcggcattcgataccaggctaagtagcagcttcgaatctgctattaaagaggtcgagggattgggctaccctggccgcaatgacccacgcatcaaagtcgcaagtcgcctagcagcaaccgacggcatgaaccatgaagctgccgtcctttttgagttggattcaattcagggcgccccgggagcccctcctcttcatttacctgagaccgctaacgggttgggatatcaaaacctgatatccatgattttccggctgatgggttttagggatgagtggctaagaaaaaccagggccgccagcgcggaggtaatagaccgcatcgagcccatccacctcgtgctcattgaagagcctgaagcccaccttcatgttcaagtgcagcaagtgttcgtacggcacgcctaccaagttctatgccgagacgctttgcttgaacgctacccaaatctgaagactcagcttttggtgagtacgcactccagccatgtaactcatgaagtggagtaccagaatcttaggtatttcaggcgactcccagcagggatgtatggcatcggcgtaccggtgtcgacggtgtctaacctctctaacgtgttcggcgatggaacaaagacgaaggagttcgtaaccaggtacctacgggcacagcacgcagacatattcttcgccgacgccgtcatcttggtagagggctcagcagagcgaatgatgctgccgcatttcttgcggaataagtttccattccttgaccgctgctacatcacaacccttgatatcggtggcagtcacgcacaccgactaaggcctttaattgacgcgcttggcatcctcactctggttattacagacctcgatgcagggttgaataaagcggcaaaaccggtgcaaagaaacgcagatcagattacgaacaatccgacattgcggagctggatgaaactgatgcatctgggcagtacagtggatgagctgcttgagctgccagcgaatcaaaaagagcaccagatcgacgacctgtactcggtgcgcatcgcctatcaaactcctatttccacccacctgcccgctactggtaaagcaatacaaaccctaccaaatacctttgaagacagctttgtgcttagcaacgccggtcactttgcggaaaaaacaaacggcactggtatgatgaaggccttcgtaaaagttttgaatgaagcgcaaacatcggaagccgtcggagaaggttttttcaacgaattacgcgaaggaaagaaagcagagtttgtgttgctcgttttgggcgacaagaacttccccaaccttgaaatccctgaatacatcagtgaaggcctcaactggcttgagtcgaaattgcgaagcaagcaaatagagctgctggtaattccacccgagtgcgcggaggtgacgccatga

SEQ ID NO: 79043 - DNA, 1848 bp, Pseudomonas syringae pv. antirrhini
atgagcgaggcagttatcgcagatgccgacgacactatgcaggcttgcctgaatctggcagacccgaagagtttttttctatacgcaggtgctggctcaggaaaaacccactcactcgtcgaagctatccgcgaactcaaaggtcgcgagcgagaacgcctgacattcgagggcagacgcattgcggtgatcacctatacaaacgcagcctgtgatgagattcttcggaggctagagtttgatccactcgtggaagtctcaaccattcacgcgttcgcctggcgcctaatccaaggattcgacaatgagatcagagaatggctaaggatcaaacttccccaggacattgagaagatcgagggcgagctagcacgttcgagaggcgacaataaaacatctcgagcaaacagacggaagctacaaagcaagagacgcagacttgagaatctcgacgagattacgaagtttatctacagccccattggcgacaacagagagcggcaagcactcaatcacgatgagatcatcaagttaactgcagcattcgttcctgaacgccctttgctggatgttctagtagaccgctacccagtcgtattgatcgacgaaagtcaggacacccacgctccagtaatggaggcttttctgaaggtccagcaattggcgaagactcgcttctgcttggggctactcggcgacaccatgcaacagatttacggccatggagtaacgcgccttgacaaagcgataccggatgactggttgaaacctgaaaaggtcgttaatcgccgctgtcctcgtagggttgtagaccttatcaacgtgattcgaagcactgcagacactcatcagcagacccccaagcccgatgccattgaaggtgtggtgcgcatgtactgcattagtcaaagccaagaacaggcaccaaatcttgaggaaggcatcgctcagtcgatggctgcaatcactgacgacggcgaatgggctaccggttctgcgggccgaaaaaccttgatcctcgaacataagatggctggacggcggatggggttcgaaaagctgttcacgcccctatacggggttgagcaccttcaaacaggcttgctggatggaacattgcccgcacttcgcgttttcagcgaaggcgttcttcccattcttaccgcaaaggacgatcacttccttgtgcttgaagccgtacgctctcgctctccgttgctcagcaaggatgcaatgcaatcaacaggggatcaatcggcccacatgcaacgtgtagaggacgcgacgcatgccctgctctctcttttcgaaaaaaacgatccaacactgagcgaggtcgcaacgcttctgttgcaaacccaactgcttgatgtgcctgataatctggttggggctatggtgctgggagcccctagtgaggctccagatcctgaagatacgaacgcgatgaccaactacgcctaccagctattccttgagcgtccattttcggagcttgcagcctttgcgagttatgcggatggcctttcaccctacggtacacatcaaggggtaaaggggctggagtttccacgagtcatggtcgtcatcaacgatgaggaggcaggcggcttcttattcagctacgacaaattgctgggtgtaaaagaaccaacaaagactgaccgggacaacgagcgtgacggcaaggacaacgcactagcacgtactcgtaggctgctttacgtgacatgtagtcgggctgaaaagagcctggcgattgtcttatacacaccccaccctgcactcgccaagcgaaacgttgttgctgctggctggcttcaggagagcgaggtcgaaatcctttga

SEQ ID NO: 79044 - DNA, 2136 bp, Pseudomonas syringae pv. berberidis; identical to SEQ ID NO: 79020

SEQ ID NO: 79045 - DNA, 1797 bp, Pseudomonas syringae pv. berberidis
atgtttgtctgggacaggaaggatctgaacgacgcccaagtcgcagccatcgagcacccaggcagcgtcttcctcgttgcttgcccagggagcggtaaaacgaggaccctcacctacaagatcgcccgactgttgtcggagcttaagtcggacaaaaaacgcgtcgtcgcgatcacctacacgcaccgggctgcggatgagattcaggaacggatagagcagcttggcgtcgatacgagccagctttggattggcacgatccactccttctgtctcgaatggatcttaaagccctatggaatctatcactcggagctcatgcacggtttccgggtgatcaatgcccatgacaccgaacgaatgcacgaggagctctgcagcgcggcgcagggcactaagctcagcagcttcgactgcgcatattatttcacgccgaacggctatgtcctgacatgcaacaagaccaacaaacatgaagcaattggggaagttttgcaggcatattggaaggcgcttcgtgccgagcggcagctcgattttgaactgatccttttctacgcctatcaactcatcgagaataatccgtcgatcagcgtgctgctgggttcgatcttcgaatgcgtgctcctcgatgagtttcaggacacgcgggaaatccaatatacaatcctcgcatcgatcctgaaagcgtctaaaggcggtacgtccgccttcgtcgtaggcgatcctaatcaggcaatctatggctcgcttggcggctatgcgatcacggcgtccgactttgggacgcagtgcggcatcgccttcaaggaaatggagctatcacacaattaccggtcgtcatcgcgcattgtgagctatttcggcaattacaaggtcttgccttcgaagatcgaggcagtgggaaaggacaaggactgcgcgagcgtagtgtcattcgatcaccagacgcaccgcgatgcgctggaggaagagcttgtaagactcatcagattcaacgtcgaaacgctcgggatcgctcagcatgaggtctgcatcgttgcgccttggtgggtccatctcgcaagcatgacacgccggctggtcgcggcgcttccggcctattcattcgatggcccgggcatggtgcccttcgcgcgcgacgtcgacaatttctggtacaagctcgcccggattattctgacggaggcgtccccacagctttatgtacgccggatgcgatgggcgggagaggtaatcgccgacctcagcgacgcgggcgtagaggttccaggtttggactgcaagacactgctgcgcgcctgcaacgccatcatcatcaccgagaacgacggcctggcgttcctccgagcgttcttcgaccagctatgttccactttcgggatcgatcgccatacctacgcggcgcttcaagagcatcacgacgctttctttgaatcctcgcagaagcgcatcgataagctcatcaaggaaggcgctgaggcgattgctgaattggggatgttcaggaaggtctttgcggaccgaactggtgtgaccgtgtcgacgatccacggggtcaagggcgccgagtatgacgcagtgatcgcctatggcctactagagggaatggttccccacttcagcgatccgaaccaggccgagacagctaagaagctcatgtatgtggtgtcgtcgcgggccagaaaaaacctacatctgatctctgaacgcggtcgcagtcgaggctggagcggagattatcaaccaaccgacgtacttactggatgtgcattccagtacaaccagctttcttga

SEQ ID NO: 79046 - DNA, 2049 bp, Pseudomonas syringae pv. berberidis
gtgcctacactatgtcagcacgcgataaacccttatccgtcgcggcatagaggaagggatcctgtgctaatcgaatcagtagtcttatctggtttccgctgctttgcccccactcctattagcgtaatgatctcaccaaagatcacgaccatcgtcggccccaacgcggcagggaaaactgcgcttctacacgcgttagcgaagctgtttggagtgactcgggcacaacgcaccgtacgtcgctcggactttcacctgggacctgatgacgatcccaccagtcttgaatcaaagtacctctacattgaggttctgatcacccttcccgaactgattgatggtactgcaacgccagaaacaatcgcaccttcatttcggcatatgctaatcgagcgaccagacgatgcacccgtctgtcgtcttcggcttgatgctcattgggaggacgatggaaccgtggaaggcgaggtttcgcaaaccctgcactgggtcgacacgctcgacgatgaaccgcaagaagacaagtaccaccccgtctccgtggccgataggggactaattcaattgtattacacaccggcaagcagagacgctgctgctcagacccgggcgacagccggagcattggcggctcgtttgttacgcgcgatcgagtggtcttccgataccgaagaggcggttcatgacgctaccgaaaatcttgcctctgccttcgagggagaagccgcaattgccgcaatcacacaagctctgcaggcgcggtggtcggcacttcatgatgacgtcgtcgacactaatccgcgactgagtctggtaagtcgcaggttcgaggaggtcgtcaacaaaattgcagtcatgttcgaacaggggcctgacggtcaggaacgcggtatcgaggcgctcagcgacggtcaacaatcgctcttttacttcgctctggctgcggcagtcttcgacctagagcgtgaggttgtagcggggtcaattgagggcttccgaagtgacgctctgcggataccggcgttgacgattttcgctttggaggaaccagagaatcacctttcgccatatttccttgctcgcatcatccgtcaagtccgatcactcacaaccgatggcagcgcgcaagccattgtcaccagtcactcaccggcagtgcttagccgcgtcaatccgacggaagttcgatactgtagatgcgaccccaaaacgcgcgtgtctacggtcaagcggattaagcttccagtcaacgatgaggaggctagcaagtttgtacggggtgcgatgttggcctacccagagctttattttgcgcggtttgttttgctggttgagggagattcggaaagaattgttttaccgcgactcgcagaggcgctgaatttgctaatcgatccagcctttgtcgctattgtcccattgggtggacgtcatgttcagcatttttggcgcttgcttaaacatctgggtattcctcacgccacgctgttggatcttgacctggggcgcgatggaggcggttttggacgagtcaaaacggcgatcgaaaagctgatcgagttcggtgcaccgaaagccgaagtgctgagaattacaactggcatcttgtccgatgccgacttagcgaacatgcataattggtctgattcggtcgatcatagcagcctcctgtcatggatcaacaacaacctaaaagctcatggagtgtatttctcctcaccgctggatttagatctagcaatgctggaagcattccctgccgcctatgcagccatcgttcccgagcgcgggggttctcgcatggccgctgacaaagccgccgaagtggtattgggaacggcaggtcccggattaaaagtctacacagggccctttgttggttatccccctcaattcccgagttaccgctaccactttctcactaacagcaagcctgcaacccaccttgcagcgttgactcatatcacaaaggcgcaactggtagcgcacatgccagttgtgcttgcttcagtgctcaaacacatttccgcgtcgttgaggcgggactga

SEQ ID NO: 79047 - DNA, 1911 bp, Pseudomonas syringae pv. berberidis
ctgaacatgaccttatcgtcgcgaagagtcagctcagagaactggaaaccggtaggggtaaaatctcttgaaaagcacgcgcttgaggtggtttgttcacacgtaaaccgatccgtcatcgcaggtcccggcgcgggcaagactgaattactcgcgcagcgtgccgcctatttgttacaaaccggtgcagcacctgcgcctagacgtattcttgcgatcagtttcaaaagagatgctgcctccaacctcgccagccgcgtgcgaaaacgctgtcaccctgaccatgccggtcgtttggactccatgacgtttgatgcgtttgcaaagagcctggtcgatcgcttcggccaatcactgcccgagcgttggcgtccccgacccgattacgaaatcacaagctactatgagcgcgactacaaagactttctctttcaagacgttggcttgcctccaacgacaattggcacaagggcggatctacgcgcagtcggaccgaaaatattcgagcgcaactatgtactcggccaaccgctcccgattgatggatggctgtgtccgaccgtcggccaatgggctgcggatttattctggcgggcatccctccacggtggtgaaaaaagtgtcttgtctttccccatgataggcagactcgcagagcttttactgcgagttaattccatggcacgtgacgcgcttcggctgacttactctcatcttttcatggacgagttccaagacacgacgcaggtccaatacgatcttatgagtaccattttccgaggtactgacaccgtattaaccgccgtcggtgataacaaacagcaaatcatgcgctgggctatggcaatggatgaccctttctccgaattcgacgcagatttttcggctaagcggacgtccctctacaacaactaccgctcctcgcctgacttggtacgtatccagcatattttggctcaggccttggacatcgcagcggttgaacccatttcacagacggcaggtacgattagcgaagaaagctgcacggttttcgacttccccagcccacatgcagaagcacacaatctagccgtatctgttgcgtcgaacatcgcgtcgggcaaactcacaccacgcgatttcgttctccttgtccgccagaaggcgggggaatatgccgaggtgctagagccggcttttacggctcagggcctcagcttacgcaatgaggcagggctggtaggagcgattatgttgcaggagttgctcgtcgaggaggtctcggtacttctggtttcgctacttcgcctatccatgacaccgcgggcaggacgctactggtctgaatgccaaaaatggctggcatcgttgcggggagtcgagttcgacgatgaaatcgggcactccaaactcacacgcgaactggacgcctgcgcgatttggcttggtgcgaaccggtcaagtttaccgactacgctgaaagccgcacgatcactagttgatgaggtcatgggctttgttggacttgaccacctcaagagccaacaccctgcttacgcgcaaggagaatggctcgaaaaggtgctcgacgctgctgcaacacatctatttaactgtgcaatcaaatgtgcagattggccttcggcactcgacacctatgaaggcgtcaatgccattccactgatgaccattcacaaaagcaaagggctggagtatcacactgtcatctttgttggcttggacgacggagcatggtggagtttttccaacgatgagattgaagcaaccgccggattctttgtcgccttcacccgagccaagcagcgcgtgattttcacatattgtgccaaacgcgggggccgcacgaaaattgccaccttgtaccgcttactccagacagcaggcgttcaaataaaacaaatatcctga

SEQ ID NO: 79048 - DNA, 1881 bp, Xanthomonas axonopodis pv. dieffenbachiae; identical to SEQ ID NO: 75058

SEQ ID NO: 79049 - DNA, 1713 bp, Xanthomonas axonopodis pv. dieffenbachiae
atgacgaaagtgtggagcgatcagaagcgcgactttctggagtgcgccaggcacgccctggcgctaggtggccctggtgccggcaaaacacacgtcgcgctggtcaaagctcgcaatgagattcgctcaggaatactcaagccaggccagaaggtcctcttcttgagcttcgccagaccgaccgtagcgcgcgtcatcgaaaaggcttctgagctgatctcgcgcgaggatctgaagcaactagaggtcagcacgtaccacggtttcgcatggagcattctccgaagccatgcctatctattgaatggcagaccgaacctgcagcttctgccaccgcccgaagcagcagcgcatttggcagatatcgataaggcccagcacgaaaatgagaagcgacgccttttcgaacaggagggccgcctgcatttcgacttgttcgcaagcttggccagcgaactgctgacccgcagtgatcggttaagcgccatcttctccgacacctatcccatcatcatcctcgacgagtttcaggatacaaatagtgatgaatgggcgctgatccagcagcttggaaagcgcagtcgcctcattgcactggccgaccccgaacagcggatctatgagtttcgaggtgctgatcccaggcgggtgggagactttctggagaacttcggcgccgcccatttcgatttcgcgggtgaaaatcatcgcagcagcggtaccgatatcacgtcctatggaaatgacctgctcactggcgcaaacaagggcaaagtctaccagcaggtcaaaatcacgcgttacgacttcatgtatggcaagagcctgcacttcaccgccaaggccgcggtgttctcggcgttggatcgcctcaaaaaagtacctgacaaatcgatcgcgatcctggtgccatccaggcggctgatgctcgagttttctgactacctttcttctgcagctgatggtctaccagcactaaatcacgacgtcgcaatggatgctgaaccgccggctctagccgctggcgttatcgccacgttactggcgggaggtaccgctggcgatgtggcgagccgcatgctcggcgcacttcactcacacattcgcgggcggcgcgggggcaggcctaccccacagaccgagcttgacctggcgggtgcgcttagcgggttcatctcctcgggaaagatccgcggctccaagcgcctgttgattgtcagcgaagttcagcgcatctcagaattgcggcggcaactgcaattaacgggcgaccctgcggaagactggttacacctgcgcggcctgttggcatcgtccactgcggaagccttgaagcaagtagcaacagatgctcgctacctacgactgctgcaccgaggctcagtattgcgaaccaatttgggtgcgttgtggcgcgcccagggagagtacatgggggctgaagaggcagtccgaagtgccttgatgcaggagcatttcgctgcagctcagaaggactggcgtggcatccatctgatgacgatacataagtctaaagggaaggagttcgatgaggtcatcatctacgatggcctttaccagcgcgttgccaaagccccgcaggatccaaaaatctgcgcccaggatcttttagtactgcgggtgggcgtgactcgggcgatacgtcggaccacaattgtgactccgaagcgcgatccctgccctttactgtga

SEQ ID NO: 79050 - DNA, 2040 bp, Pseudoalteromonas sp. P1-25
atggctattacaaatgttcgtgttgaaggctttcgtttattgaaagatgttaatctttctctagagaaagaaactactgttatcgtgggcaggaataatagtggaaaaacatctctaacctctatattcgagcgttttttgagagatcaaggtaagtcagttcgactagaagatttttcaagtgaaaatcagagtaggttttttgatgctaaaaaagccttagataatcaagcagaggtagctgaagttttaagtatactccctcgtattacattaacgtgtaccttagaatatgacactgaagcattagatatcggcccgttatctccttttgtaattgacgtagatgaagcatcacatgaagctattgtttgtatggtatataagcccaaattagactctatttctaagcttcttactcctttagatacaagtgagaaagttgataccacggtacattttgttaagcacctcaaggaaaatattaattcttgttacgacctaagtgtattggctttagatccaactgataattctaacactagggcattttcgggctctgttgagtttaatcctctgattatgtgtaatgttatccgagctcaacgaaccctagagcatgcaaaagatggagaaacaaacgtaattggtaagctactgaacaatatgttccaaactgcatcttctcccaatgcaataaatagtgatcaagtgctagcatcacagttaagagcttctgtagagggagtggagcatgatattcagaaaagctttgacatgatgctacaaaagcttatgcctgcaatgggattacttgggttccccggaatggatggaactgtaattcagccacaaacattgctgaatgtagagtccttgctctctgaacatacaaagatatgctacaagggggaaggtaacgtacatttgcctgagggctacaacggtctggggacaaggcacttgatctatatgttactccatttggagtcttatcataaggaatatagatctttggaggttcgacctgcaacgcatgtaatttttgtagaagaaccggaagctcacctccatcctcaaatgcaagaggtctttataagtcagttacaaaaaattgttaaaaagttatctgaggcatacccagatgacccagaatggaatgtacagtttgtaattacgacccactcgtctcatatagcaaatactgcaaactttgatgcaattcggtattttttaaagtacccaaatatatctaatccatacaccattattaaggatcttaagaaaggtttaaagaagattagtccaaacgataagaaatttttgcacaaatacatgacattaacgaagtgtgatttgtacttcgcagataaagctatattggtcgaaggtactacagaaagaatcttgatgccaaaactgattcaactagtcgaagaagaaattgaagagaatagtaaactgtcttctcaatacgtttctacaatcgaagttggtggagcatacgcccatcttttttaccccctattggactttttagaagtaaagtctctaataattacggacttagactctgtaaagcaagttaaaagaaaaacaaggcttgttagagttaaatgtcctgtagccgaaggggagtggacatccaatgtttcgatcaaaaattggtttaaagaagaagagtgtgcatttttgcagctattaatgaataagactgatacagagaaggttattgagaatagaagaattgcttaccaggttcctgaagaggacaatcaggctgcatgtggtagaagctttgaagatgctttaattttagcaaatatgaagatgtttaaaatgcgtaaaagcgggaattatgcgaatcgagcttggctggaggcaaaaaaattagccaagtctgatactgcatttcgctttgcaatattggaagagaattggaatgttccaaggtacatcgttgaagggttaacatggctttcagcgcctaagctcacagtagaaaccgttacttctgaggtggagaaaaattgcttatga

SEQ ID NO: 79051 - DNA, 1734 bp, Pseudoalteromonas sp. P1-25
atgagtgataaagctattttagcagccgaaaaagcacaacaagaagtgaacgactgtattaaacagggtgttagttttagactcgaagcaggtgctggagcaggtaaaacatattcattagtcaaggcgttacaagcaattatctttgatcgaggggctcggcttattaaagctaaccagaggatagcatgtataacatatactgaagttgcaaagaacgagattattcaagaaattgatagtcatgaagctatagttgttgagactattcattccttttgctggtctttcatgaggcactttcaaagttcgatgagagatattattaatgaatttgaaggatacaaagaagaaattgaggctcaaggtggaatagaagggaagctcatagaatataagagaggttattttaaagcttactcagataagatttctatcaagcatgatgacgtccctttattaatggctaggatattgaagctaccgaaggtacagcgtttgttttttcagcagtaccctattttgttcatagatgagtaccaagatacaaatgtccaatttatggatgctttgaacgaagtattcatctcaactaagtttggccctttgataggcttctttggtgatcattggcaaacaatacactctacggattttgaactaaagaattatgatttacatgctatcgataaaggatctaatttccgttcaactaaaaagattgttgatgtacttaataagctgagacctaatctcacacaaagtgagcgtcaacaaagtttcatgggcgaagcgtgcttttatcatacgaactctttcaaaggagctcgaagaacggatagccataataaaggggacttacccattgagtctgttatcgctctgaaagacactttgctagaagacttaaaaaaaaatggatgggatctaaaagagacaaaagttcttatgctgacgcataacttgattgcttcgcaacaaggttacggtcaattagcaaaagtattcggtagatataaggactcctttacaaagaaggaggatcctgtcgttcagtatttggcagatacaatagagccaatgtgtgaagctttcaaaatgaaaaagtacggggagatgttccgtatcctcggtaaatggcccacaataacttgccatatggataagttgaagtggaaaaacgaaattaatcaacttaatgagctcagagaaacaaaagatattggaagtgttatctctttccttctatcttcagaaaagcttccgaagagtaagaaggttctaaaactagagaaagagttgaaggaaggtttagctaatatagaaaataccccattatcaaatagcttggttaaatatcaaagactattaaaaattccgtattcagaattaattaaccttgtgtttttcttgggtggtggaacgccgctggccacacagcatggtgtaaaaggcgctgaatatgacaatgtcttagtcatactcagtggaggctggaatcattacaattggcctagatttttagatttattaaagacaaaaaaaataaataaagatcatcacgatggattctatagatctaggaacttgttttatgtgtctatatctaggccgaagcagcgattagcggttttaacgacacaagcactatcagctaatgctatattggcagctgaagagctttttggtgtggataatgtagtcgatattgaagtcccagtcatagatagttaa

SEQ ID NO: 79052 - DNA, 1776 bp, Pseudoalteromonas sp. P1-13-1a
atgaatattttagttgatcaagttcggattgctggatttagagggattgctaatttagaaatttctttacccagagtggcagtgcttattggtacaaataactcaggtaaaacttcaatcataaaagcgctacaactcgccttgggcgattattcgcgctctttaactgaggaagactttcatattgatggggaagatcatggcagtgaatctattattgtcgatgtcagaattgtcgcaacagacgaacatggtaatagagttcaagcatttgaagctgaatggatagaagagtttgaagacattattcaatctgaagctgacggccatcaatttgttattattagaacaaaatgtgagagagacaaagtaaaaggcggatttttaacctctcgattctggatgggaacatggcccgattttgaaggttgggcagatgtaaaagtgatatctaaacgacaaattagaaaacgttacgatgcactgccttttatttccattgatgcccagcgcgatatccatcaagagttaagagagaaaacatcttacataggcaaagtactttcaagtattgagtatgatgagaaagatgttgaagaacttgaaaagatggtcgctgacattaatgaaaaggcagttgctaaaagtgaacctttatctgaacttaaaactcacctcgactcattgagtcagtcatttgaaggcaatggtcaaacagaaattacgcctttccctaaaaaaattagagacttgtctaagcgttttacagtccactttggagaacatgcaagtaactctttctcaatggaataccacggcatgggcacgcgaagctgggcatcaatgctaacggttaaagcatttaccgagctttcggctaaaaagcatgcggaagaagttgaaccgttttttccaatcattgcagcggaagagccagaagcgcacttgcacccgaatgcacaaagaactctttatcagcagttagcagattctaggggacaggtcctcgttagcactcattcgccatttcttgcagctatggcgaaccttccagaccttcgttctatggtgaaagttgatggaaaaaattgcgttaagcagctttccaacgcctttgaccctgaggacctactgatacttcaacgcgaagttatgagatttcggggggaagtattatttgcaagagcaattgtactatttgaaggtgtcacagaagaacaaattgttcctgctatgtttgagcactatttcggtttttcatcctttgttgctggcgtcacatgtatcagcgttgcaggtaaaaactatgctccattcattaagttggggtgtagtttaggtatacctgtatgtgttgttagtgacaatgacggcaataccaagtcttctgttgaatcgcaaattgctaatattaagaaagatactgggttagaactaaacgcccaagagttccaaatttacttcttatccgatggtaatgatgttgaggctgagttagttaatattctaaaaatcaaccctgagttgattgaagccttagttctttccgaaacaaaaggttcaaataaccccagatatgtagaggcgaagcagaaggagctttctactcttgatagtgaagccttgttggaaaaacttaggggtgccaaagcatcttatgcaggttttcttgctgatgttatttttaggaatccacagaaaagagaaaaagatactctcgtaccaaatgcttttaaagcagcatttgagcaagttaaaggttggatatcagtatga

SEQ ID NO: 79053 - DNA, 1893 bp, Pseudoalteromonas sp. P1-13-1a
atgataagtctttcaccagcacaagcgaatattgtcaaatctccaataggcactcctatacaaatactagcatctgctggttcaggtaaaacaagagtattgactgagcgaattcggtttattctggaaaacaccaaaaaagatagagtgattgcccttacttttactaataaagctgctgaagaaatgcaggagcgcttagttgaagtggatgacattgaagatcgaacttggatttctaccgttcattccgttgctcagagaatactggagcaatatgggcataccctaggcttaccttctgagttacacatttacgacagagataaagaccgcatggaagtgtttcttcaatcactaagagatgaaggtgtcgatattgacacgtatctcaacattgaagattcgaaagaaaagaaaaaccgccaacaagtcatgcaaaattatatggatactttttccataataaaaagagaactgttaagccaaggggaagcagatgaacgctttggtgtagaaagtggcgtttggaaaatttatcaggattaccaaaatgcattgttagcaagcggtggtattgattacgatgatatcctcatctatgcccataaactactactgacccaagagtggattgctgacttataccgcacaaagtataaacatatttgtgtggatgaagcgcaagaccttaacaaagctcaatacgaatttataaatgcgttttgtggtgaaaaaattaaaagcatcttaatggtgggtgatcctaatcaaatgatttatgggtttaatggctcatcggaaaagtatctcttaacgcgatttgttgaagactatcagcccactcaatatcaacttacagaaaattatcgaagcacaaaagcggtaattaatgttgctaataagatcaaaccgctttcacaaacagaacatgaaatggcgttaaatggcgtgtttcataagcaatcgtgtgatgatgaatatgttgaagcgctatgggtcgttaatcaaattaatgagttgttaaagctgggcatacacccagagattgaaggaaaaatatctcttaagaatatggttgtaatagcaagaaaccgattcgtatttaaagctattactgaggaacttgagcaaaagaatataccttaccatttcaaaaaaggtgaacgccaaacagaaccaacgtcgctatttggcaaagtgctcgattttgcacttcgtctaaaactaaaccctaaagattgggttgatggtaaaaagctatgcgccattctcaaagtaaccccacctgaagattggggtaatgaaaactatttgagtgtatgggcaaacgatgtactaaattcagaaatactgttttctgatcttcaatcaaagctgttgactcaaatccagaatctagatgctgatgaaccaaacattccaaagtttcacaaagagttagtggctgaacttaatgtattagccaacgatgaagccttagaagataaaaaaccagaaattgaacgtagcttagctgagctagaagaatttagaaattcttggactcgcttcaaatcaaaggggcttggtaattcactacaagcatttagaaatgcgcttgctttagggcaattggcagaaacagctcagggagaaggaataacactgagcacagttcatacgatgaagggactagaaaaggacattgtattcctaattggtatggttgagggcgttttccctgactatagagccaagacagcgcaagaaatagaagaagagaaaaacagcgcttttgtagcagtaacaagagctaaaaggtggctttatatcacttatcctcaaaaaaggacgatgccttggggtgatattaaatttcagtcgccatctcgatttataagggaattataa

SEQ ID NO: 79054 - DNA, 1947 bp, Vibrio cholerae
atgtatttaagtaacttaaaagctgaaggttttcggtgttttggcaaagaattcaatattcaactaacagatgggctaaacgtgatagtgggtgaaaacggagcaggtaaaaccgccgtcataagtgcaattcgacagctatttcacgactctgaatcaggcatatacagcgttactagcgatgacttttttagcccttttgttgctcgcggaaaaagcgcaccatctttctcaattagcgctgagtttgatggactagatgtgggggataaagtagcttttcttccatgggttggagcttccagtacagcactattaaacctacaggccgaaaacaaggaaatacgagggcgattcaagaaagtcatttggggaggaaaatgcaaaagttccttgtttgatcctgagttactagatctaatccagtgtatttatttgccaccactaagggatgctgaatcaaaactgtcgaacgggcgtcagtccagactatccaaacttcttaaagccctaaatcgtaaacagctaaaacagtgtaaaaaagacaatgaactacacccacttgaatccaagctgaaagaattcaacgaatccttggctggtgacgaaaaattgggtatcaaggatgccaataaactcattacaaaaaacctaacaaatgcaattggacactacttcgggcaaaacaccagcatccaatttgcagaaagtgattttactaaaatcgctgaaagcctaaccttgcttttctttcctgacttatctgtagaagaccaggaactattccgtgagctaagccaaaatagcttgggctataataacctactttatattgcttcaattttggcggaacttacactagatgataaagatgaagagcaaccccatttcaaattgctgcttatagaagaaccagaagctcatttgcatccacaattgcaaattagactgctaaatcatctcaaatccgtagctaatgaaaacaaaagtgttcaggtcattgtgacaacacactcgacggttttagcctcttcagttgaacttgagtcaataattcatttatcgaagtcaccagagccaatagcgacacctttacgtacctgcgggttgcctacagctagcagccaattcatcaatcgatggctagatgtgacaaagtcaaacctactatttgcaggtggtgtaatccttgtcgaagggattgcagaacaaatgataattccgactttggcaagaatagctctaaaagggcaaaaggaagggcgaaaaagccttgaagatcttgggatctcgacaattaacctaaacgggatctactttaagcatttcatgcaattgtattgcaacattcacaatgtggatgatgctaaaggagaactcgtaagtaatagcattccaataaggtgtgcggggctcaccgatctagacccacccaaagtaaccaaaaaacacgttccagaccctgaaaataagggggtaactaaagaaatagaagaaaacttcatcccatacgaaggcaatatgaaagctgggactaaccatgctatcaacctggttgattccatcaataaatcaactaatgcacggctatatgtgagcaagtacaagacattagagtatgacttagccatggagggaaacaatgcagcattaatgtccaaaataattgcttctctgtggcctgagcccacaaaaggagaaagccctataatcaaggattttacagcaatgtccaaagtagattggactaaaaaaacaccgcaggaaattgccgaagcagcccataaaattcttacaagaattgatgatgacaatattggaaaaggtatgttcgctcaagtgttgaccgatgagatccaatgtgatggttctaattttactgttcctgaatatatcaaaaatgcaattttctgggcttcatcgatcgatgttgcaaaggaagagtga

SEQ ID NO: 79055 - DNA, 1758 bp, Vibrio cholerae
atgaaagtcgaatttacccatgaacaacttgattatgtgaactccagcattgatgagcacactttcttggaagcctgccccggaagcggcaaaactgaggtggttgcagcgaaagtagctaaagaaatcgattcttggaagaagtgccccggcgggttagcagcactctcatttgccaatagtgctactgacgaattaacgtcccgagtgtcaaagcacttgcccaacggacgagaaatgtttcctcatttcttaggtacatttgatagtttcatttacaagaacatcgtctcccccttatctatagagctaacgggatatgcaggggaaggcggtgacgcttctattcgcattatcgaacacacagcacacatgggctatagaacgaaatatagttatgccaaaagagggaaagttaaagcacaccactactctttcgatctaattaaacacagtgtggttttcgatacaggagactctatattaaatagaacccttagctctatttcattaaaagattggcaacttgatgacctcatagcaactaaaagcaagatgcttgaaggtggtttcgcaacttaccgagatattgaatatttggctatcaaggcaattgcggacaagaagtatgagcactttgttcatttactcgtaaaacgctatccattaatcattattgatgaatgccaagacctttcagaagagcagttggcgattcttcaagcacttgctgataaaggaaccaagctacatttcgtcggggatctccatcaagctatctatggctttcgtgatgttgaacccgccaaagttaaacaattcgtagaggataataacttcaccacattgcagctaactcgaaactttagaagctgccaaaacatcgtcagtctgtgtggcaaactaacaggtcgtactggtattgttggaaatgtatcttggttagaacctagatgtatagttcttcaatacaataattgcccgactgaactaacagacactcttgaggataagtgcgatggatttagcaataatgttgtggtctcgagaggccattctattcttcgtaaacttcaaacttctgttaccgagccaaacaatattcagaagctagccctcgctgttaagctattcactcccaaagatatggaagctctcaatcaatctttacagtacttctccgaatttcttcgctaccacttaaaggaaagctataaacccaatagtttcaattcccctcagtccataaccaccaacctttcatggcgtaagtttttgtatgaatctttaaattacttgatttgcaatgacctacagaagattgatattaagtggtcagattggactaaaattgcaaaatcgttaattcgggcgctcccgaagcagagcttttgctcggaagatatctcaagcatattagctccactggaagtggtaaatttaacctctccatctggttcagcaaaactcgaagttgctttatcgctaggagatactacgacctcattgctttcgtacaaaaaatcaacaattcatggtgcgaaaggggaaacccatgatgtcactatagttatatcatcagctagtgcgggaaatgattctcactggcaaagctggcttaaagaccccgatagtgaagctgcaagatttgcatatgttgcgtcatcccgaccaaaagaacgtctgatttgggctgtaaaaactcttaagctaccagaaaggaagcaattagaagctattgggtttaccattatttga

SEQ ID NO: 79056 - DNA, 2313 bp, Vibrio cholerae
gtgcatttagaaagtctgacaataaaaaactatcgtaagtttcgtgcttcacacaacactgtttgtttcgtagaaccagagataatcgagcttggtacggaagaaactagacctgcttctgtaattgccccctcaactactttgataattggtaagaataatgtgggaaaaacaaccatcgctaatgctttaaagctactgtgcaacaatgagcaaccatcagcatcagactttaaccttacttacttaaatgagttgtttaatcaatataagtcagcttttgaaatagatgaaacaactaactttcccagtttagatacacctagtatagagttctgtttgagcatcaaagtgaactttaatgatgaggatttgatgactcatctagctcctttcatcgcaataagtgaagatgggaatgaaggacctgtctgtgtaaagataaaggtgcgaattgagctagcagaagagcctaagtttaaagaggaagtcagtagaatttttaaagaagcagacaccgaagagaaaaagaaacagcgatttgagaagttctactcactactttccaagacaacgagtagcgttagcaaggaaggcaatttataccaaacttcatttattgatcgtttaggagatgcaactgaatcgttctctttaaaaaaattaataaaaatcaaagaaataaaggcaaatagacaccttaaggaaggcgttctaagtgatgtgtttaataagattgttgcatttcagctaacaaacgacattagttcacgagaagcacttgaaaagaatatagaggatataaacgctctcatcacaggaaatgtcagcccaaagagcagtgatatatcaaaggtactgggacagattgaaagctccgataaggtagatctaaatctatcaggaaacgtcacttatgatgatatagtaaggcgtctgattaaatacaattttatggatggtgaggactatatacctgaagaccagtttggattaggctacataaacctactaaatataattggtgagataatacattttgtagatagctatgaggataaaagccactttagtagaatcaatctactctttatagaggaacctgaagcatttatgcatccacaaatgcaagagttctttataaaacgtattgatgatgcagtgaagaaagcattagagatagctaacacttcctctgagatatcaaagacccttcagtgtcagattgcaatcacaacccactcctcacatattgttaatagtaagattcatagtagtaacactttcaataatattaactatctaacatcgatcgataaatgtacaaaatcaataaacctatcagatgaagcgatagtttcaagcactgaggatgataacggaaagatacttaatttcatcaagaaacatataaagtataaagtttcagagttatttttttctgacgcaataattttcgtggaaggagtcacagaagaaacattgctgaactacttcttggaaatacatcctaaattaagtcatcactacatttccgtattcaacattaacggtgctcatggcaagctgtatctaccacttgcgaaaaaactaagtatccctagcttaattgtcaccgacctggacattaagagagaaaaatgtgaaaaaggtgaaaaacacaaagagacagaaagttgcagtgtttgtgggcaaatcgcaaaaagtgatgacgcagagtgtgtaaaaggaacccctccatcttttgtacaaattactagcctagctgacagaacgactactaataccactctaaaagagctgaataaacaacttagaggaaaatcagattccgaagccgacaagctcgactgtatagagtattttgaagatgaaaacctctacgtagtttttcaaaaggattcgatagagtcgcaacacgcatctagcttagaagaagctttgatattgaccaattatgataatgatcttatcaataacgtaattgagatatgtaaaccaaatatttataacagcattataaagcttggggcggatccaggtggatctcgaagtaatctgattgatcactcttataaactacaaaagaaactgtcagatagtaagagtgacttctcaaataacctgatctttgaattactcgctttagaagaaggtgatgctctacctaaattgccaaactatctagaacatggctttgcatggctcgaagctaagttggaacttaatgatatttctgttgcgccagaggatggcaacgaaagttctgacaatgttgtatttcaggaggaagtgttagatgacgccgaatga

SEQ ID NO: 79057 - DNA, 2127 bp, Vibrio cholerae
atgacgccgaatgagataagagaaaaagagatccaacagagcatatttgagcaagtcgataacttcagaagttttcgtttcaacgctggtgcaggttcaggaaaaacatatgccttaattgaaacgttaaaatacgtatctgttcataagattttagccaagaaaagccctcagaaaatagcatgtgttacatataccaacgtagctgttaatgaaattaaagctcgcctcggtaactcagatttagtgcacgtatctacaatccatgaaagagtttgggatgtaatcaaacgttctcagccagagctattgaaatgccacaaagagaaaattgaagaaacgctagaacatattgatcaggaattacaaaattcagataaatccaggttctttaatggtctttcagaaggcgatcaaagaagcctagttgagtttgtgtttgaaaataaggatatctattacagggtaaaaaaccttaatgctgcaggctttcgaggtgcttatattcagcactctagtggtgaagtgcaaaatatcttaagaggatgcttaagtaatatagccaacttcaagtatgtaatagcccttttgtacaagaaagacaatctacaaaaatgctttgaaaggataattgaaggcagagagaaacgcgtcacttacgatagtaaaacaaacaccgatagacttcactatatgaagtttagtcatgatacgttgttagagtacgggttgaagctagtaacaaaccataaaacactctgtcggattattatagatacttatccgtatttctttatagacgaatatcaagacacaaatgaaaatgtagttaatttattaagaactatacatgagtacgcagagcaaaagagtaaaaactggatggttggctattttggcgatgctgctcagaatatatacgaagatggagttggagaacgaataatcgacttgcacggtgggttatttgatatttataaggaattcaatcgacgttctcacgtgcaaataattgaaattgcaaataagattcgagatgacttgatagtccaagagcctatttacgaagataaaaaccatggctcagttagtttttttcatcacaattcagaaaataaaattgaaacagcaaagcagtttctctcgttctatagtgacgagcttgaagggagccctgacctcgataaccatagttcatgtaaaataaactgttttgtactaactaatcagttaatggctgagcttaatgaatttaaagatgtttacgatgcttttaaagcatcaacgatttactatgatcaattaagcacgcttgtgttatcacaacaattagaaaaactacacccaacagttttaaatatatatcacttggtcaagctatatcatgaggtgacaaaatcagaagcatcttattatgatatttttggtgcgcacagtaaaaatatgaccttttcggaagcaagtttaataataagagagattaaaggtgaaaaaattgaaactcttgatgattggtgcaacttaattataacaaagcttgaaaatgaagatttgaggaaaaatatattccgagctcttgataactgcacaaactttgacagaagtgcgatagaaacatcagaagctttcagagccactttgatagatagcattcactctcttatgctagatggtgctgaacaacaagatgaggttgaacagaaaacaaaaatgattcttgagctacgaattagatctctagtttgttggctaaatttcattgatgggtttgaaaatgataaatttagctatcatacataccatggaactaaaggcgaagagtacgacaatgttgcaataattctagagcataattttggaagcaggaataggaacaagtttaaaaactattttgatttgttgcaaaaaactggagaagaaaggaacacattgctatcggatcaggattttaaaaataggcatactaacactaaaaacttactgtatgtcgcatgctcaagagccgtcaaaaacctcaaagttctatacctagatgatatatccgagataaagaatggtatagagcatatttttggggtagttaacccgtggttatatgacgatattgaaaatattacatcgacttga

SEQ ID NO: 79058 - DNA, 1947 bp, Vibrio cholerae; identical to SEQ ID NO: 79054

SEQ ID NO: 79059 - DNA, 1758 bp, Vibrio cholerae; identical to SEQ ID NO: 79055

SEQ ID NO: 79060 - DNA, 2016 bp, Vibrio cholerae
atgcacataagcaatatacgaatacaaaatttcaggttacttaaagacacaacactagatctggaagatgagttaaataacgaactctctcttctgataggaaaaaataattctggcaagacatctttcattgtactgtttgaaaaattcctgaagtcaaggaagttttactacgatgacttcccattgagtctgcgtgaagacattcttaagctcagtgaaaagactgatgagtattcgctagcaataagactatccctaagcattaaatatggcgaagaagataatcttcagaacctttctgaatttattgtagatcttgacccgaaatgcaacacggcacgtatttccttcgaggcaacgatcaacaaatcaaaactgttgaaggatcttgatactgttaccaaaagaaaaaatgagttcatcaaaaagaacctttctgattacattcaagttagttactacatctttaatgaatacagtgattttgaaccgcaacatcgttcgaatctaattccaaaagatgcatctgatgttcataacctaatcaatttgaagataattcaagcaaatagaaatgtgacgagttcggatgcaaagcctcaagaacgaaagattctttcgcacctaacgacactgttctacaacagtaaagtcaagatttctcacgatgagttagacgggatcaactcatcaattattgaagcagacagccaacttagcagtaactacaaaaccttctttgagcctttccttcataacgcaaagtcctttcttgggcttaccgatctaaacgttgtatccgatcttcagtccaaggaaattatggcaagtcattctaagatcacctatggaaagaatgacaccgaacttcctgaatatcagaatggtttgggatacatgaacatactctatcttcttttgaatatagagattgagaaggctgattttgaagaggctggacgggatataaacctcctgtttattgaagagcctgaagctcacactcatccacaactacagtatgtctttattgaccaaatcacaaaaactttaaaaggtattaaaggacttcaaactttcatctccactcactctgctcatatcgtcaagaaatgcaatttcaaagatattcgttactttcaggctcaaaaggacaaagctaatacagagatacgaaatttctatatagagttacaagcaaggtatgctgatgaaaagaatgttgaggtagacaaggtagagaaggagaatttcaagtttctcaaccaatacttaacaattgagtcgtcagaactattctttgcagaaaagataatctttatcgaaggaacttctgaaaaattgctccttccatacttcatcaatcaatttgataaagatggcataggtgatgaaggtgatgttgcactgacctctcaaaacatatcaatcctcgaagttggggcgaatgcaaaagcattcaagcattttctcgatttccttgaaataaagacactcatcattacagacctagacacgacagagaagagaattaaaaaagaaaaaggtaagaaagacagcattagttatcctgcatgccctgccaaagttggtacacatactagtaatgcaaccctacgacattactataaatcaccagacttcaatgatcagaacttctctgaatggatggacaagctaaaagcacataatcatggtgacccatcaccattgatcaaggttgcttatcaggatgttcaagacggataccaaggtagaagctttgaagaagcatttgtgagtgtgaatatggacgctataggcattaatctagacgatgtcgatggactaaaaaacaaggataggtttgatgactgtaagtctgaccctgataagtttgtagaggaaatgcttgatagcaaagggaagtccagttttgcctcatctatactctacctcgctctttcaaaggataacctcaagtggaatcccccgtcatatatcaaggagggattaaagtggctcgccaagtaa

SEQ ID NO: 79061 - DNA, 2025 bp, Vibrio cholerae
gtggctcgccaagtaacaccacagcaaagaattcaagaatgcattgccgataagtcgagttttgttttgcagggaggagctggttgtgggaagaccgaaacactaaaacaaacactacagtacctgtccaaagattatcccaagaagagaattgcgtgtataacccacaccaacttggcggtcaatgaaatcatcaatcgtgtaggagaaggatacaacgtatccactatacattcgtttcttggctccctaatcaagaaccataccaaagcaattcacaaagttatacatgagatatttatagtcgctaatgcagaagttgagactgaggagagttccggtttaactggtaatgacctcaaaaaagctaatcatgaaaactacaagagagcttataagaagtatgcaaagttaaaatatattgtcaaagctgaaacctcacccaaagagcttggtaaaagagaatatgacaaagcaccagatgaatacagccagacactcaatgaaaaaatagctgaactgaatactgaagttcggcagatcattgatgataaggatcatagaagaataaaatacaatgattcacgttttgacaggttcaatgacctgtcgtttgggcatgatagcctactcaagattacaaccttgctatttagactctatccaaagttaggaaggattttgagtgataagtacgatttcatcttaatagatgaataccaagatacacacgaagacgtggttgaagtgttcttaaagcatctccctaaaggtaggaaaactacaataggactatttggtgatgcaatgcaaagcatatactcagatggtattggagatgttcgtgcctatattgactcaggtgatattgtagagataccaaaagaagataacttccgatgttcagagcaggtgatcaactttgtgaattctcttagagaggatgctcttaagcaagaaccagcattcaagattaaagaagatggcaaccaagaaaccttaaaagataggcaaggtcaggttaggttgctttatgcaatctgggataatagcaaacctcattctaggagttctacggaagaaaagcaggcataccttgatttcgtcgacaagttaattgacttagctgatggtgaagaactctctcataagaagttaatgcttacaaacaagtccattgcaggcaaagttggatttgcttctttgtataaggtgtttgccgatagatatacggaagtcaaagatgagatcgaaaaggttctttctagtattcaggctcttgatctagcagaactatgtgatgcttacagtggatcaaaaaagaggtacaacttcatactatctgaactgaagaagtcgggatttgtacttaataatcttaaggccaaagagaaggttgtcgctgcatttgagaagataactacgggtgagctgagcattgctaaaactcttgaggttgcttttgaagaaaatgttatcagcaagtcagacagttaccttgcatatgttgatcgtaaggacgccttcttagctgagttgaaaggtgacaaggaataccagaatttcaaagcgatattcaattcaggagccaatagcttaacagcgatggcaaaagaaatccctgaattgactgaagaaacattcaatgagtttagatccaattttaatagagagagattctacgagttgctgttctctgaatcgacgccctttagtgaggtaattaggtactacagatacctaaatgaagagtgcgattatattacaatgcataagaccaaagggtctggtattgagaacgttttagttgtccttgatgaatatttctggaatcaatacaattttcagttcagccatgatagcacagaacctagttgcgccttcacatcccctaacatgaagctgttttatgtagcatgctcacgaacaataaagaatctgactgttgtcaaagtggtaaccagtgatgaggaagagtatctgctggcagcattccccgaatttaaaagggtagttattgattag

SEQ ID NO: 79062 - DNA, 2313 bp, Vibrio cholerae; identical to SEQ ID NO: 79056

SEQ ID NO: 79063 - DNA, 2127 bp, Vibrio cholerae; identical to SEQ ID NO: 79057

SEQ ID NO: 79064 - DNA, 1947 bp, Vibrio cholerae; identical to SEQ ID NO: 79054

SEQ ID NO: 79065 - DNA, 1758 bp, Vibrio cholerae; identical to SEQ ID NO: 79055

SEQ ID NO: 79066 - DNA, 2313 bp, Vibrio cholerae; identical to SEQ ID NO: 79056

SEQ ID NO: 79067 - DNA, 2127 bp, Vibrio cholerae; identical to SEQ ID NO: 79057

SEQ ID NO: 79068 - DNA, 2313 bp, Vibrio cholerae; identical to SEQ ID NO: 79056

SEQ ID NO: 79069 - DNA, 2127 bp, Vibrio cholerae; identical to SEQ ID NO: 79057

SEQ ID NO: 79070 - DNA, 2313 bp, Vibrio cholerae; identical to SEQ ID NO: 79056

SEQ ID NO: 79071 - DNA, 2127 bp, Vibrio cholerae; identical to SEQ ID NO: 79057

SEQ ID NO: 79072 - DNA, 2016 bp, Vibrio cholerae; identical to SEQ ID NO: 79060

SEQ ID NO: 79073 - DNA, 2025 bp, Vibrio cholerae; identical to SEQ ID NO: 79061

SEQ ID NO: 79074 - DNA, 1947 bp, Vibrio cholerae; identical to SEQ ID NO: 79054

SEQ ID NO: 79075 - DNA, 1758 bp, Vibrio cholerae; identical to SEQ ID NO: 79055

SEQ ID NO: 79076 - DNA, 2313 bp, Vibrio cholerae; identical to SEQ ID NO: 79056

SEQ ID NO: 79077 - DNA, 2127 bp, Vibrio cholerae; identical to SEQ ID NO: 79057

SEQ ID NO: 79078 - DNA, 2016 bp, Vibrio cholerae; identical to SEQ ID NO: 79060

SEQ ID NO: 79079 - DNA, 2025 bp, Vibrio cholerae; identical to SEQ ID NO: 79061

SEQ ID NO: 79080 - DNA, 1626 bp, Streptococcus pneumoniae
ttggataaaattagggtactttatgtaccagcttcaagaacgcctgagaaggagttgggtaatgcttcaggtagtatgttaagtaggttggtaaatagtataaattggactgaagatgagataaaagaaattaaagataaaattgatgagttgaataacacttttttatctgaaaatggagcattaactcagatcaacaatgagattcagaaatcatgggaattatatcatgaagataaccgtttttctcaagcagagttgattattaattcttctgagatggcggcagcacttagacagattgccttaaaattttcaccaacaaccactgaagaagcatttacagtttcagatctaggagatggactgagatctattttttatttttcacttgttgattcgatacttgatattgagttagaaattaccaaagatcgtgaagagaatcctgataatccaagatttaagttggtacctccaatactaactatcttagcaatagaggaaccagaaaatcatattgctccacatcacattggaaaactgataaaaaggtttaagcaattaggcaataatgacaactctcaattaattttaacttcacattctccagttattgtaaaaagaattgacccagaagatttgaggtatttaagaatagaaaataatgacagtgttcttcaaaccattgtttctgatatacagttacctcaatcgaatgatgagtcttataaatacattaagggagcaattcaagcctatcctgaactatattttgcaaagttagtagtactgggtgaaggtgatagtgaggaactgctattaccaaagttttttgatttacttggactggaaattgatagttctcagatttcagtagttcctttaggaggtaggcatgttaattatttttggaaattattgaacgctctcaggattcctcatattaccttattagatttcgataacgaaagatatggaggtggctggggaagaattcaatatgcaataaaacaattgatactaaatggggttgctaaagaaaaacttgttactgtaacagccgaatctcaaaaatcacgagttctagatgatgatgagattgataaaataaaggactggaagattgatagacctgataatcagttgcttgaggggtggattaaaatgttagaaaaattcaatgttttcttttctgcaccacttgatattgatttcttaatgttacagtattataaagaacattatctggaaactttatctaccaatgagggacctgttgtttcttatactgatgaaaatagtgacaataaaaaaataaaattaactaaaatggatagaacaaatgattatcaattaattggttttaaaaatcgcatcagtgaagctatacaagcaactttaaaagataagagcggacccggtgatagcttcactgaagaggaaaaggaactaatgatttggtatcaatatttctttttaggtagaggaaagccaacaactcatatgcaatttttatcatctattagtgatgatgaattaacaagaaatctaccccctgtatttaaaaaaatagttaaccgtgctgaagaattacttggagatattgaacatggtaaagagtga

SEQ ID NO: 79081 - DNA, 1818 bp, Streptococcus pneumoniae; identical to SEQ ID NO: 73329

SEQ ID NO: 79082 - DNA, 1998 bp, Labrenzia aggregata
atgcgccttgagaacgtaagtattcgaaacttcagattgctgcggcgcgtgtcgatcgacctcgcagaggacaagacgacaaccattttcgtcgggcccaataacagcggtaagacctctgtcatggaagcacttcgactctttatcgggcctggaggcgaggctccgaaaatctcttttcacgacctttcccagtttcgccatcgtgatctgaagcgcatcgaagttctgctcacggccgaagcggacccggaaaaaaggatcgcactcctaaagcggttcgccccgcgcatgcggctcgacctgactttcgcctatagtgaagatcaggccgaccttgtggctgcgacacagcttctgatggacctatcgcccggcacgaacaaagtgcggatgaggatcgactacacgctggagaacgcgaagaagcttctcgatgattttgaggcacgaccgcgcaaagacctgtcgctttgcgactttctaaaagacaccttccggaatcacttcaaacgcatgttcttcaaggtctccccggacggcaaagaggtcgaaaaactcgatgacggcggcctgctgaaatccctgctccgcattgacctcgtgcccgcccagcggcacgtcgatgacgatgaaggaagtcgctcggcaaagctctcaaaactcctgcacgatcattatgagcgcttctatcaggtagatgatgctgccgggtatcaggcaatcgaagatgcccttgcgcagagtgcgggcgatctgacgggaaaatacggcaaggcctttggccgtctcacgaagcgccttcaaaattttggctatccgccaggccagaaagcgccggacctaagagtacgcgccgaattgagcgcggagacaatctaccgcgacaacgcgcggatttattacgccagtgaacacgccgggaagggaggtgcgatggaagaattcgagcttcccgaaaaatataacgggcttggctataaaaatctgatttacatcgtcctccagttggaatctttccgggccgcaatcgatgcggtcaagggcgacaagccgcgagtccatatcatcgcgatcgaagagcccgaagctcacctgcatccccagatgcagacggtctttatcagcgaaatctcaaaggctctggaaacggacggggtcacgaccgcgcaggttctgctgtccacccattcatcccacatgatcgcccagtctgagtttgagccagtgcggtatttccggcgggtaggccgtcaggtcgtcatgcaggatttatcgaagctaccattgcccgaaaatgatcccgatcttcttgacttcctgcgccgctacatccggttgacgcactgcgacctattttttgcggacaaagccatcttcgtcgaagggcaagtggagcgactgctgcttccaatgatgatggaagagcaggctaaggtggagggctgcgagacgctcggcagccagtatatcagtatctctgaggtcggcggagcctatgcgcacaaatttaagccaatcatcgaattcctcggcattccgagcctgatcatcaccgacctcgattccgtggatgacaacaatgagaagtgcccggtcgcggagggcataggcactagcaacgtttgcctccggacctggattccagcgaaagcaaatatcgacgaattgatggtttgtgacgaggcggcaaagacgcaaggctgcatccgcatcgcctatcaagtcagtcagaacgggcgatgcggtaggtcttttgaagaagcgtttatttatgccaacgtcccctggctgacggcgaaccacgccaaactcagcacgaccaaagctgccgttaaaaaggcggttgatgccggactcgtggctcaggcgtgggcgctgagtgccaagctggcaaaggtcgatttcgcactcgatcttatcaacgcgccagggtggggcattcccctctatattcagcaaggccttaaatggctggcggaacatccggcaaaatga

SEQ ID NO: 79083 - DNA, 1701 bp, Labrenzia aggregata
atggctggcggaacatccggcaaaatgatgaccgaagcggacgaaaaaatcctggaatgcctaaaggcgcggcagagcttcctgattgatgccggggcaggatcgggtaagacatcctcgctcatccgcgcactagacttcattcgcggccccgaccgaacgagtatcatgggcgaggggcagcgagttgcctgcattacctttacgaatgttgcgaagaacgagatcatcgagcgcacagagcacgaccccctgtttgtcgtgtcgacaatccacgacttcctttgggcctcgattaagcagtttcagaaagagctgaagcccgccctgctggccttcaatgacagcctaccagcaacgagccggagaaagcatagtcaggccgagcttgaggtcgcgctggagacagtaccgacgatcatctactcggatcggggtgcaaattttccagaaggacgcatctttcatgatgaccttctgggcgtggcgtacttcatgttccgcgatcatcccttgctgtccaaggtcgtcgccgcccggttcccgtttatattcgtggacgaatatcaggacacagatccactcgtcgtaacgacgcttttggatcacctgttgaaaacggaccaaccgccgctgatcggattcttcggtgacaagatgcagagcatttatcaaggcggggtcggcgagctttcagccgggcataaggcgcttctcgttcagatcaaaaaagaagaaaattatcgctgctcgagggcggtgatcgaactgctcaacaaaatccggacggatattcagcaacaacccgcaggcgctaatctgccgggcgcggctgggtatgtcagcttggttggagtcgatcccgatttagatttgtcagctctggccgtgcaaaaggctcgtgatgcttttggctgggacatcgagggcgagttgaaggtgcttttcctcacacaccgtcttatcgcccgcaaagctggttatgccgacctatgggccgcatataacagccgaggcggcttcacccaggacagattccagagcggcgaagacccaatcgcatcgttcttcgtcaacaaggttgaacccttcattctggcttggcgcgaaggaaaagtagggcgcgccattagctatctgaaagaacgaccaattcagatcgccggggcggccgagaaagcccgcgtcaaagaagcccttaatggattgctcgctctcatcgatgccggtggtaccattgaagcagtgctgaaacatctgcgcgatgcgcagttggtcactctcttggatgacctcgaaagcgccattgcggggccggtcgctccagccgaccctggttcccctgaagccgcacaccaagccttcatggcgctgctgctggccgtgccctatgtcgaggtcagccgctaccgagcggttctggaaaacagcatgccattctccaccaagcatggggtgaagggagatgagtttaagaatgtaatcgtgatcttggatgacgcaggcgcgaactggaatcaatactcattcggtaaacttctagcgggaaccgataccagccaaagccgggaaaaacgcacgcgcaacctgctctatgtctgctgctccagagccaaggacaagctgatcgtcgtcgatcttggcgccggggctcaggcgaaaatagaggaattattcggtgttggcgcggtcgcaatgtga

SEQ ID NO: 79084 - DNA, 2043 bp, Flavobacterium daejeonense
atgaaaattaaggacatcgctataagtaattttagacttttagaagaagttaagctgaatattgaagacgacttaactttaattgttggcaaaaacaacacaggaaagacatcactttttgaagtaataaatatgttctttagcgaaaagaacaattttagttttcacgacttctctcaaacgacatactccaaatttgaagatagtttcaaaatttatgaagcatcagtaaaagaaactgacgaagaaaaaaaggaagcattagaaatctctttaatttcatcaatgccgaacattcaacttcaaatccaaattgaatatgacaaagcaaaagacagtttaattaatctttcagagttcataagcgacctagacgattcaaaaaatattgcaacgataaaattacaataccaatcaaaagatagtttaagactatttggtgcatttgaagcccgaaaggaaaaatcacagaaactgattgaatggttaaatgaaaacatcacatcgtattatgacatcaaatgctatggtggagataatgtgattgaagaaaactttaaacgcaaactgttcaccgttttatattttgagaccattcaagcatcaagaaaactagacgatacaaagtcagataaaaacaaaacattagccgttggcttttctgactattaccgagaaacaaataaagataataatgaagatgttgaaaatttagaaaagcaacttaaattaacttcatcagaccttgagaaaaaatatgaaaagatacttaatgaactacttgaaaaactgaaattatttggagttgaaccacatctgacaattccagaaattgttcttcaagcaggttttgaccctgaaaatattcttaaaaacaatataaaatatttctataaacaagacggtgttcaacttcctgaaaactttaatggtttaggatatagcaacttaatctatctcgtcttaaaagttgtgagtttcatagaaaaattcaagaaggctgcacctttaaataaatctgaaactcttacaattttaattgaagaacctgaagcacacttgcacccacaaatgcaacaagtttttatttctcaaatcaaacgaacattaaaagaaacaaaagaaaaagaaaacttgtcggttcaagtcataataagcactcactcatcacacattgtgacggaagcgggaatagacgttgacagaagttttgaaagaatcagatacttctcaaaactatatgacaataaagaaaaacgttacaaagttgaagtaaaagattttaatgagtttcgtaaagaaagcgataaggaaacattccgttttctaaaacaatatatgacacttcaccgttgtgacatattttttgcagacaaaataattcttgttgaaggaacaactgaaagaattttgcttccattaatgattaacaaagctgcgaaaagtctgaacaatgaatatgtctcaataattgaggttggcggtgcttacacagtaaaatttaaagaactattgaaatttattaacgctaagtgtctagtaattaccgatattgattcagttaatccttcgaacagtcgcaaagcttgtcaaaccgacactgcgaacgctgaaacatcaaattcaacattacttaattggctaccccaaaagaaattaattagtgaacttatatcttgtcccgacaaagacaaattcgatactgatttgattcgtgtagcttatcaatgcaaagaagattcttcaacttatgtggcaagaagtctcgaagaagctatcataaatagaaacaaagatttttttgcatcaaaatataagattgaagaagatgaaaaattagttcaagattatttctatctactaaaaggtaaagacattgccaaaagtctaccatatagtttagctccagcgtcaggtgaaaaaactgattttacgtttgatttaatgacctttagcgaaaccgaaacaaaattagagtggaaaattccgaagtatattgaagaaggtttagtgtggttggcaaacaatgaaattgcgaaataa

SEQ ID NO: 79085 - DNA, 1848 bp, Flavobacterium daejeonense
atgacagcttttgaacaaatccaaaaacttattgaagaaggaaaaagttttgtattagaagcaggtgcaggctccggcaaaacatatacgctaatacaaacattaaattatcttattctaaataaaggtgacgaattaatcaaatcaaatcagaagattgtttgtataacctacactaacgtagctaaaaacgaaattattgatagaattgaacataatgaattagttcttgtatcaacgattcacgagtttttatggaattctattaaacaatatcagaagcaactgaaaattgaactctgcaagctaaatgaaataaatttagaaaaggacaaagaaaaggctaaagaaaaaggaaaagaagttaattctagatacatagaaaacttagcagaaagaattgaattagttgataaggttgaatacaacgatacatcttttaatgattttgaaaaaggaataattcaacacgatgatgtaattgagattgcaaaaatgatgtatgaaaattatcctcttttgacggatattgtttctacaaaatatccttacattttcgttgatgaatatcaagatacagcatcagaaaccattttctgtttaattgattgtcttttaaaacggaacattaataagtgtgtaattggcttttatggtgattcacatcaaaaaatttatgattacggcattggagacttagagaaatactatacttccaatgggggcataatagaattagtaaagaaagaagaaaattatcgttcttctaaatcggttgtagagttactaaacaatttcagaaaaaacattcaacagaaaccacagagagaaatacaaggaagtgcaaaatttctttattggtcaaaacatccaatagaaccagcaaaggacaaattgaaatttagagcaggtttattgggaataaaaaataaattctatgatgatgttataaaaaaactatctgaatcgggatggatttttgaaggggacgcaaacgcaaaagtattagttcttgccaatagtagagttgctcaaagagcaggttttggcagtctatattctattttttcaacacgttttcatcaaagcacaaaagaaaggttgcttgacagaacacatcatttaattactttttttgttggttctattgacaaaaaaacctcgcaagaaagaaaaactggtgtagaacatttaattggtttttggaataatgggaatcaaaatgaagtaatcagatttattaaaaaaaatggctctattttcaatgatgaatttaagcacaaccataaaaaacaagttgctgagttgcttgaaacactatctacaaatagaaaggattggaaaataaaagacgtttatgaatttgcttccaaaaatggtctcatctcaaataggaagattattgaattcattgagagaatatctgttgaccccgagaaactgaatgatgaagaaaaagaaaggcaagtaagagataaaaaactatttgactcttttatggatttgtcatactcagaacttttaaccttttggaagcacgtccaaaacaatacagttttttcaactaaacacggtacaaaaggtgacgaatttgataatgttctaacagtaattgacgacacagagtgggttcaagaatataatttcaaaaatttcttcaataacacagaagaaaaacccgagagaaaattaagaacaagaaacttgttttatgttgaatgttcaagagtaatagacaacttaatggttttatgtttatccgagcttgattcgacagcactagcaaacattaaaacttggtttggtaatgacaatgtaatagacatagaagaatatttaaaaaactaa

SEQ ID NO: 79086 - DNA, 2202 bp, Flavobacterium aquidurense
atgaaaatagaatctgtattaattagaaattttagactcctaaaagatttaaaattagatttagagaaggatttatctcttgtcttgggaaaaaataattcaggaaaaacttcaatattgagtgctttagataagtttataaatcaatctgagaataaaaaaatttcggctgatgatttcaacttatcttataaagaagaaattaaaaatttgatagaatcatcaaatgaattgagtgaagaagattttaataaagatattcaaggaattactttaagaataatagcttcttactctgatgaagatgattttgaaaatatttcaaaattaatgatggatttagatcctaataataattatttgattttaggatatgattattctatgcattttaatgaatatcaaattttcagatctgattttaaagctttcaaaattgatgagaaaagaaaattaaatgaatctataaaaaaagaaaaaggcaagcccgaaaatgaaagaaaattatataaagagaaaggatttgatattttctttaagttatatcaagataaatattttcgttacaaaagaaagtctatagcatgcgattatacaagtagagttatacttgagaacaaatttattgatttagataatagttcaacaaaagtaaatttaaagaatgttataaattttaaatatataagtgcgagaagaaatgtcactaataaagaggcggataaaactctctcttctcagacatcacaaatttatgaaagaagtgaaaagaatgaagaagacagtaaaagtatagaagaatttaaggaaacattgattgaaacagacgaaactcttaccaatgtttatacaactctttttgagaagatagttgacaaagttggacaatttggaggaattaaaaaaggagaatctgtaataaaagtaatttcctcattggagagacgagaattgcttaaaggaaatactaccgtagtttatgaacatgatgcgtctaattctttaccggaattttataatggtttaggttatatgaatcttattagtatgatttttgaaattgaaattcttcttcaggaattcaagagagctaaagatgaaaaaccggcagatataaatttactatttattgaagaaccagaagcacatacgcacccacaaatgcaatatgtatttattactaatatacaatcacttttagaagaaggtattataaagggtggatgtacaaataaaaaactgcaatatataatatcaacacattcatcacacattgtttctaattgtaaagattttaacgcgattaaatatttgaaaaaagaaagtcagaatagtataaaagcaaaaaatcttaaagacttagagaaagactatttaaaagcaggagaggaaaaaaattacagattcctaaaacaatatttaacattaaatagatctgagttgttttttgcagataaggctatttttatagaaggagatacagaaagaatccttttacctgcaatgatgaaaaaacttgatttggaagaagcgttacttgccgatgaacttgaattactttcgcaaaatatatcaattgtagaagttggaaattatgcaaatatttttgaacgttttataaattttattgaagtaaaaagtttagttataacagatttagattctgtaaaaagagattttattagagataataaaggagaaataaaaaaaactaaaaatggtatagatagacaagctgattttagttgtagagttatagaagggcaaaagacaactaatcctactttaaatttcttttttccaagtttacttttttctgatttattgtccaaatctgtagaagaaaaaagatttttaaaagagtcaacttggacaaataataagaacggttttttacagatagcttttcaaataaaagatgtgaaagattattgtcctcgaagttttgaagatgcattttttaatattgatgagaatattaatttcataaaaaagaatagaagtaaattcaatggattaaaaaacatgaaattattttatgatacttcaaaggatgcatatgatttaggagaaaaatgtattgaaagtaaaggttcctttgctatagatattcttctaaatagcgatgaaaattatactgaatggaaaattcctgcatatataaaacaaggattattatggttacgaaaagagcagatttag

SEQ ID NO: 79087 - DNA, 2151 bp, Flavobacterium aquidurense
atggttacgaaaagagcagatttagaactagaggttcaaaaaatatttgaacatatagacaacggaaacaattttttgttgagtgggggtgcggggagtggtaaaacatattctttagttcaagttattagacagataattgaagagaatccctttgtaaaagttgcttgtatgacttacactaattccgctgtaaaagagattgaagagagggttaatcataaaaacttaaatgtaacaacgattcacgactttctttgggattgtattagtaattatcaaaaagatttaaaggaaaatttgattgaattaataaatgagagtagttcaaaaataagtacgataaataatgagaaagttggactagattattatgataatttagaaaaaatcaaatatgataattttttaaggatagcggatggaataatttcacacgatgaggttattctattagctgaaaaaatgtttaaaaattcaataaagttatgttctatagttaaagataaatttccctttatttttattgatgaatatcaagatacccaaaaagaagtaattgagatatttttacatcatttaaaaaatagtaaaaaaaaatccatcgttgggttttttggagatgcaatgcaatctatttatgaaggtggaattggtaatatagatgaatatattggagaacatgataaagtaagagaagtgcaaaaaactcagaatagaagaaatccaaaacgagtttatgatctagcaaatgaattgcgaacagatggattagttcaaactcattcaaatgacaagaatgcaccaaatatggataaaaattctggagaagtaaaagagggaaaagtgattttttattatagccaagacgaaaaaaatgacattgtgaaacaaaatttaatagaggattttttatgggattttaaagacaataaagaaacaaaagaattaaatcttacacataatttaatagcaaaaaaggctggatttccaaatcttatcgaaatttatgataaagatccgattgtgaaatttttacaatcaattaggaagtatataaggcttactaatttttctcacgatgaaatgattacagtcgataatttagttatttcattaaaatcagatattgatagtaaagtaaaaagtttaggtttgagatctttcacggttcaaaaatttattgagaatttaataattaaatatccattacatgctttaactacacaaaatttattggataaaataaaaccaatagacaataatactattaaacaagaagataggtctgtaatttttaaatttaaagaacaaacgggaattattgatattgattttatttatcaaattaaagttatgaaggaaattgagaaaggtattgatcctagatttgctcatttatatgataccataaagaaagaaaaataccaaaaggttagatctcttttttttgataaagacaatttaattgatgataaaaaacaaaatgaagaagacgaaagtaaaaaaggttcaaaaagagatatattaattaaatttttgtataaaattcaattttcaattgatctttatgaggaaaataaattcaatgaatttttgcaaataattgatttaaagaaaaaagaaggagaaggtattatcacttttaaaaatagattaaaaaaaataattgatgatttaaaatcaaaatctaccgaaaaaatagaaaatatactagattttgttaatgaatcaggactgttaaatcttaataaagatgatagatttaataagtttaaaatagaaaaaaaatatctttatgacaaagttaaagaagttggttttacagagtttataaatttgtacaattacttagaaggcaaaacaccattttctactcaacataaaactaaaggagatgaatttgataatgtgctagttgtacttgataatggaaaatggaatgattacaattttaaatatctttttgaaaaaaaaggaagtgaaaatgttttagaaagaacgcaaaagatattttatgtatgttgtacaagagcaaaagaagatttagcaatatattattacggtataaataaaacggaaaatgctttgatatttgagactgctaaagaatggtttggagataatttaattgatgttgataagttataa

SEQ ID NO: 79088 - DNA, 1998 bp, Flavobacterium aquidurense
atggcacagcataaaaacccatacatatctagagttcaaataaaaaacttccgaaattttctgaatgttgatgtagaattagatcataaacaggtaatcataggcgaaaataatgttggaaaaaccaattttttaagagctatacaactcattttggacaaagactactctgattcagatagacaattaacccccgaagatttccacgatagtattgataaaccaatggaaaatggggaagaaattgagattaatttggagataaaaggctatgagcataacagtaaacttaaagcacaatttgttgatgctgtcatatcagcagatcctccaacattacgatttacttacaagtttgtagctaacagagatgagttcggaaagataatcaattataaatatataatttttaaaggtagtagtgaagataacagattcacgaatgaagatcgaagttacattaacatttatgttataaaagcattgagagatgttgaaagagaacttaaatcaaataagaattctcctttatataaactggttaaacaatacgaagtatctacacaggatttggaagaaatatctgaggctctgaaagaagccgcagaaggaattctagaattggatgaaattgttcatattaaagagattctttccaatcgctttgcctctttatcaggaattcaaacggaccataaaataacattaaggacttttgatattgatactgaaagactactctatacattgcaggtctatatgggattaaaggaaaggcctgtatccgaattaagtttaggactagctaatattctatacatctctttgatgctcattttattaaaagacaaaacaattttgcctataataaaggctgaacaatttgagttgctactaactgaggatgaaaaaggaatactgtcaaaattatatgaattaagcgataaaggaaatcatgtcctaaaaaaagaaatagaagagagtgatatagaatctttgtacgatttcatggatgaacataactataggcaccaagcatttacaattttagcagtagaagagccagaagcacatttgcatcctacattacaacgattgatttatcgagaagttcttcatagtagtaatacatcggtaatatttacttcacattcaacctatatcacatccgtaactccactcaattatattgtgcatattcgaaagatagacgacagcagtaaagttttctccacagtcaacttatcattatcgcgtaaagagaaaaaagatattgaacgttatattgatgctaaacgaggggagatttattttggtaaaggaattattctggcagaaggcataacagaagaatattttatttctgctgctgcagagttgatagaaaaaaacttagataatttcggaattgtagtttgtaatattgattccacgaattttaagccttatattcaattgctagaagctctttatattccttgggtattatttactgatggtgattattatgaggttgaagaatatgttgatgaaaaaggtaattataagaccaagcgaatttaccatataatggataaaaatacaggtcgagaatttggatacaaagggaatgaaaatgttttaaaaattctttctacacttggaatcatagcagaagatgacgaattggatgaagacgaaattagagctaaaggatgttttataggggaatatactcttgaagttgatatgatgaatgatgcagatgatactggaattgaaatactcaaaaaagtttacaaggagttgaaatcaggaggagatgaaatgcaggagaattttgaagaagctatcgatgcagaagattattggttagcacttaaaaaaattgagggtaatattagtaagggacgctttgcgcaacgtcttgctgataacttaactactgaactagttcctagttatattattgaaggtattgaagcaatagttgaaaaagttaaagattcctatgaataa

SEQ ID NO: 79089 - DNA, 1848 bp, Flavobacterium aquidurense
atgaataatttattttttgaagatttagaactaataaaaaaagatgataagcaatatgaagcttatcaatcaatgagcaactccgtaattattgcgggtcccggtagtggtaaaacacgggtattaaccctaaaggcagtaactcttgcaaagagtcacattcataagccttgtggactagcatgtatcagttacagtagagaatctgttagagaacttaaaaaacgattaaagagttatggttacaccgcaagcaacaaagattttataggaacagttcacagttttagtttattacatgtaattcaaccttttgcacatttatatcctgaatacaatgtaatatatcctatcaaaatccttcctaatgatatagaaaataaactttatcattctacacttaaggatttaagcattgaagatccatataaattatctctgtctgatatcaataagcatagatctctttccctacaaggacgcagtttagtcaatatggagtcgtccgagttaattataaaggctgctaaaatttatgaagcaaaaattagtgaaactgaatacattgattttaccaatattatcaatctttctgctaaaataataaatgaacaagaatatgtccgagaaactttaagaagtcaattcccttggttattagtagacgagtatcaagatttaggaaaagcacttcacgaaatggttctcgaattagtattttacgcaggaataaaactatatgcagttggagatacgaatcagtcgatttatggatttaatggaggttacccagattttttattagagcttaccgataatgacaacctaaagacaattgaacttgtgtctaattatagaagttctcaacacattatcgatgcttcgattgaagctcttaaacccgttcccccttatccaaaatatgtggctggtaagagaaaagatgatattgcagatttcacctttattagttgcgataatggaatggaacctcaatatgaggttatcgcaaaaaaaataattcctaatttgttagctagggaaattgctttaaatgagattggaattatagccagctctaattcgcaaattcagcacatggctattttcatgaaacaagaagaaataccttcttttattgtcaaatggagctttgaaaatagtgcagttgttgtatggttacaagattgcgcgcaatggtgcatagacaaagaaacgcaatcatttgagaaattatttattttttggagaaatttaataaatatccataatgattcaagaaaaaacaatgtcgatatttatctaaaaactatatttcataaagtacttaccaatagcttagaaagtaatgattgttatgaatggttacgtcatattacagatgaattgaaacttagggatacacttataaactcagaaatttatcctaatgaaattgataatttagataaattattaagtgaagcaaaactgcgtaatctaaaagattcaaaaattaaaagatttgcaaatcttggatcgcccgaaaatgaagtaactattactactaggcatagctcaaaaggtcttgagtttgaagttgtaattttgttaggaatggaagaaggaaattttccgtattatttaaatttaaatgatgagattgcactgagtgaggatcaaagactttgttacgtatgtatcagtcgagcaaagaaagcatgtattcttttaaggtcagaatcgtttacaaaacaaacaagatggggagaaaaaacattttcgtaccctccctcacgattttgggttagcttacacgaaaaatttggaaatgatcaaaatactttcacccagaataattatgaataa

SEQ ID NO: 79090 - DNA, 2202 bp, Labrenzia alexandrii
atgcatttgagcaagatcagaattaggaattatcgtcgcctcgcagacgtcaagattgatctagatcgcgaaatatcgatcttcgtaggtgcgaataacagcggcaagacctccgttgcacacgcaatccacttcttcataagcggtgcccgcgaccgtgtcagctttcatgacttaagcgcttgccgatggagcaacatcgatgcgttcgaagccgatcaagccgattcagcgcttccggtcttgtcgcttgatttgtggttcggcgtggaccaagcggacctacatcgtgtcatcgatcttcttcccaatcttgaatggcaaggagcgatggtcggcgttcgtatcgccttcgctccgcgtaacgaagttgagactttgacgcgctttcaggagcgacacgcacaagcacaggaagcggtcgcctcccttgagcacccggaaggtgaggaaccgtatgttgctccgccgcgaacgctgcgcgaatatctcgaagacgagctccagcgagagtatgagttcaagtatttcatacttgatgaagcccaattcaacgaagattttgagccaaacggaggttacgagccgcaagaactgctgcgggatcaaggacgcacgggaaaggacatcatcaactcactgatcacagtcgatttcctgcacgcacaacgccatctttcagacaatgagggaggcagccgcgccgaggaactatcacggcaccttagccgctactaccaaaggaacctcgagcgccatggcgacgattacaatgcgatcagggcgttagcggattcggagatactgctgaaccagcatctcgaacaggtcttcgcggatacactccagcggctagcccaattgggatatccggggctgacaaatccgcgcctgatgatcaaatccgcgcttaatcctgcgaccgtaatgaacagccaggacggtgcccatgttcactacgccctgaacgatgaaggcctgacgctccccgacaaatataacgggctcggtttcaaaaacctgatctatatggtggttgaacttcttgatcttcatgcacagtggctggcaattgaagagaagcgcccgcctctgcatctagtgtttgtcgaagagccggaagcccatttgcacgcccagttgcagcaagtcttcgtcaacaaggtattggaaattctagcggcggaagatgacgcgccggatggtttccacacgcaactcgcgctgacgacgcattctccgcacatcctatatgagcgcggtttccagccaattcgttatttcaggcgtgaaggtacaggcactgcacaagcgtccaaggtcctaaatctgtctgagttctaccgtaccacggccaacccgagtcgggattttctggaacgctatttgaagctaacgcactgtgaccttttctttgccgacgcggcagtgctcgtcgagggtaatgtcgaacggctggtcatgccgttgatgatcgcaaaagccgcgcccggtttgcgttcctgctaccttagcgttctcgaaatcggtggagcctatgctcacctcttccggacactcattgagttcctcgggttaacaactctcgtcgttaccgatctggacagtgtaaacggagctgccgacgaggaagaagatgctgatgccgaaccggtggacggcgacgatcaagaggatgaagttgtggggggcagcacttgcactcctgaaacaccggacgcggtgacgtcgaaccagatgcttgcccaatggttgcctggcagaaataggatcgacgagctcttgggggccgatgccgcagccaaaacaattgcggcagatgattttgggttaggcgctatccgtatcacctatccctgcaccgtcaatcttgcgcgtggcgacgaacagatagagcgcgccggtcgcacgctcgaagtcgccttcgcattcgacaatctggagtggacacaggatgccgccaatcgggaattgaggctccgggtgcgcgcaccgcaaaatctggaacatcttgcgcagcgactgcacgagaaagtgcatagtaagagatacaagaagacggacttcgcgctcgcattgctcgccaaggaccccgacgcctggaacgtccctcaatacattgccgaaggcttggaatggctcgaagcgactctgggcgtagcagttgaagaggtcgagcagcaagaaggtgacgccgcatga

SEQ ID NO: 79091 - DNA, 1884 bp, Labrenzia alexandrii
atgacaagccgtatcggcaagcccaataccgataccgatacggcacttcacgagcggctcgcgggtgaaggcaaccgacattttgtgatggtcgcgggagcgggttccggaaagaccacatcgctcgtgaaagcattagcacaaatcgaacgcacccaaaggcctgccctgcgccgcaacgggcaacaagtcgcctgcattacttacaccgaagtggccgtggaagaaattcgcggagacgtcggaaatgacgaactattccatgtctctacgatccatagcttcctctggactgtcataaagccatttcagaacaatcttcgggaatgggtgagcaatcggttgcgagagaaaattggcgaagaacaagaaaaaatcgacaaaccgcgaactagggaagccacgaaggcccgggccgcggataacatcgaacggtacaatcggcagctaacggatgttaatgcggtgaagagcttccggtacgggaccggtagcgactacgcgaacggcgttctcggtcatagtgatatcctgaagatcggtcccgaatttatcggcgaacacgcattgatgcagacccttctgacacgtcgctttccggtcatctttgtcgatgagagtcaggatacagacccggcttttgtggatgccctccgcgaagtggcacgggcggttccactaggcttctgtctcggcttcttcggcgatccggtacagaaaatttacttgcaaggcgccggccccattccgccagaagagggatgggagacatttgaaaagccggaaaatttccgatgtccgcaggccgtgcttcgcgtcatcaatcggatcagggcggaagacgaccagcttcagcaaacgcgcggacgccacattgtggtgaacggggaagacgctcccgtcgaagggtcagccagagtattgatcctgcccgccgatgatcggcgacaggaacgtctggaagaggcacgccgctggctggccgatcaagacggtgatgaaggctggttggaggaagaagatgaggaagcgttgcggctcctcgtgttggtccacagaatggcagcagcccgcttgggatttcggaatctctatggagcgctcaatgacaaggcccccgaggaattgaagtcaggcctgattgacgggaccgcctgggtggtacgtcccttcctgtcttacgtccttccagtcgtgctatcgcgtcacgaagggcgggagttcgagattatgcgcctgctccgcaaacactgtccgcggttgcagccggatgcgctggctggtgtcgacaccgcaggacttctgaatggcctgcaaggacagatcggtgaactcgtggcgaagttggaagccgggggtgacgcgcgcgtcggcgatatcgtccgtttcatgagagacaacagcttgttggcgttcgatgatcggtacgtcgagctcatcgacctgtacgcgggtacggctgaacctgttgccgagccagcgatagacaatgccgctcttcgtttcatgcagtgcgatgcatcggaactatgggggtatcgaaaatacatcgaaaaaatgtcgccattcgctacgcagcaaggcatcaagggggcggagttcgacaaggtgattgtcgtcgttgacgatcaggaaggacaaaccaacaccttctcctacggaaagtatttcggtgtggccccgccgtcggataccgacagcgcaaatattgctgccggaaaagattcggtgatcgatcgtacgcgtcgcttgttctacgtatgttgctctcgggcgttatccgacttggctgtcgttatcttcacagaagaaacggcacagatgcgtgaggctctgcttgcaaaggggttcttcgaggccgaaggggtgcacgttctcgcgtaa

SEQ ID NO: 79092 - DNA, 1947 bp, Vibrio cholerae; identical to SEQ ID NO: 79054

SEQ ID NO: 79093 - DNA, 1758 bp, Vibrio cholerae; identical to SEQ ID NO: 79055

SEQ ID NO: 79094 - DNA, 2064 bp, Staphylococcus aureus; identical to SEQ ID NO: 72502

SEQ ID NO: 79095 - DNA, 1749 bp, Staphylococcus aureus; identical to SEQ ID NO: 72503

SEQ ID NO: 79096 - DNA, 1344 bp, Bacteroides vulgatus
ttgcaagaaatcttttatacctatttaagtccactaagagatgccgtaagttgtctgcgaccttattcatatgacaataaaacatcgcagttattcaaccaacttacaaaatatgacaaaggcgacgaaagcatacctctgaatgaagaaaagaaaaaatcacttgcaaaaaatctataccaaatcttcgaggatgatgcttatgattggaaacatattttaactacgggaaagagcaaagttaatgagcatcttgaaggtacaggaataactctaaaacatcctgatatagaaatgcgctatgtaggcagagagttctcggatgttgtacgtggtatcgaattaaaatgtccggtttataaaacagtcgaagccggacaagaacagaaatactttactctatctcaaaatgggttaggtgaaaacaatcttattttcacatccgttgtcttaggagatcttatcaacagatgcgaagaccatgctttagagatctacaacgctttacttgtggaagagcccgaagcacacttgcatccacagtatcagaatactttcttcgagtatctaaatgaattacaaagcaaaggacttcaagtatttgtaacatcgcactcaccgacaattacggctaaatcggatgtcaataatatttccattttgcaacgtaaacaaagtattatacagtcattttcatttgatgaattatcggaagatgattatccgaaagaaagtaaacggcatttgcgaaaattcttggacacgacaaaagcccaattgttttttgctaatggtgtattgttagtggaaggtgtcgcagaagcgattattataccgattctcgcaaagaaattcttgactgaaaaaatcgacttgtgtaaaagtggcattgaattagttaatatcggaggggtcgcattcaatcattttgggttattattcaacaatgatgatgagagaaagcgactattgtcaaaatgtgcgattattacagacagcgatcccgaagaagataaagacaaatccgacagagcgcaaaaagcaaaggatttagagaaacataacctgaaagtatgtttggctacacacactcttgagcatgatttattcgaacaatctgagcgtaacaaagctataatgagagatgtatatcggaaaatgcacgctcaaacagatgatttaagaggtgcttttaatgcctctactttaatgaaaaagctcaaatccaataaagataaagcggaatttgcattacaactctgtgatagattagaaactgaagtagcgttcgatgtacctgattatataaaggatgctattttgttcgtatcaccctcagaataa

SEQ ID NO: 79097 - DNA, 1755 bp, Bacteroides vulgatus
atggatattcaattatcagcacaacaacaagctgttgtagattgcaacgagccgagaattgtcgtgaaagcctgcccgggaagtggaaagactttctctgttgctgcacggatgtcaaaacttttgcgagataataaattgtcacgacaccaaggaatcgcagtcatatcttttaccaacaccgcatgtgaggttatacaaaaagaacttaaagaaacattcgattgtcggaatataggttatccttcatttattggaacaatcgatagttttataaatacgtacatatttctgccttatgcccatttagttatgggatgtgattgtcgtcctgaaatagtagggacagagttcaataaatggtatgattatgatgcttcaaaaaggggatataaaggaaaaatcaccgatcctaattattttatagataaagtttctttcgacataaatggggaacctatctcattagttccagaaaaagaatttaatttctcatggcgcaaaatgagaaataaaaacggacaatataggaaagatgttgcagggattattgaggctaaacgtattcattttgcacaaggaaaggctaatcaggctgatgcaacatattttgcgttcagaatattggatgaatatccctcagtagcacaaaatattgttcgtcggtttccgatattgataattgatgaagctcaagacacaacagagttgcaaatggctataattgataaattatctcaatatgaagcggaatctattatgttgattggggatcctgaccaagctatttttgaatggaatactgccaatccacatttatttatgaagaaatacaatagttcggattggcattcattggatttgtcggaaaatagacgtagctccgaaaaaatatgtcaattagctaatcgtttctcaggaaatgaaatgtgttcaatagcaagcgacaaggattacatagacgagccatgtattaaagggcatctcgacacgccggaatctgtcaatcaaattacgaatcatttcatcgaaaaatgcaatgagatgggattggatgaatctgaatatgcagttgtatttcgaggacaaagttttggggcgacatactttgggttagcaaataatgataattcagatgctgtaagacaaaatagtccgtggaagaatggatactatagtgttcgagatattgtgtatgggaaatacctgattgatcaggggaaatattcggatggattggctcttattgaaaaaggctgttacaaaacaaaaaagcaagtacgatatgtttctgcaagtacaatacgaagtagaatagcagaaataggctttagaattcatagagaaaatttattaaaatttattcaaaaactacctccaacgaacaaaacgttgtcagagtggattacagaactccaacaaaagggaataaatctaacagttgagctggataaagccaatgttagtatcgaattgctttttaggacatcgaataatcaattacaacgagtacgcccctatctgaaaacaattcattcggtaaaaggcatgacattggaggctattttagtatttctatctaaaaaagctgtcagcacgaactatgcaacgattttgaataatcctgcaaagtattctgttaacaataatgaagaactccgcattgtgtatgttgcatgtacacgacctaaaaaattgttatggatagccgttccatcagacgatatcgattgttggagaaataaattgttctaa

SEQ ID NO: 79098 - DNA, 2217 bp, Escherichia coli
atgtttataaaaaaactcactttggtaaactatcgaaatttcaaaaaagccaatttttactttgataaaggcataaacacgattattggtgagaatgcttctgggaaaacaaatatatttagagcgataaggttattacttgatagctcaatgcctaggtattctctgaaattaaatgaaggggattttaatcgttcgataggaaactggcggggacattggataataatcagtgtcgaatttgacgatatagccgcagatgaaactagtcaatccttatttcttcatggtattggtaatgctgaagatgaaattgttagtagggcaacatatagtttaatattcaggcctaaatcttttattaggcaggatttgtcaaaaataaatcctggtgatataaatgctcttaacgaagtacttaataacataacaattgatgattatgaaactattctagttggtaaaggtgcccttgatctaagcgatagttccaattataaaaaaatagtaggtgattttgatggtgtttcattccctaaaattttaaaccatcctgaacttggagtaaaattaccaaatatacttaatatcccaaatgaagtttctttgactttcatcaaagctcttagggatgttgtatctgactttcataataataaaacaaatcctttactaaccctcctaaaacgaaaatctggtgaaataagctcaactgactttaaaccgattgctgacctagtgcgaagtttaaattctgagatagagcaatttccagatatctgtactgtaagtagtgatatagcaacgactatcaaagatgctgtcggggatacctattctccaaaagggatgtcgattaaatcaagtttaagtgatgagtctgacgaactatttcagtcacttaaactctttgttgcagaatctgttgatggctatgagggggcgatacatgaaatgagtcttggaggagccaacttactatatcttacattaaaattattagagtttaagtaccagcacgcgaatcaatcaatagccaactttctattaatagaagagccagaagcacatattcatacacatattcaaaaatcattattcgaaaacataaagtatgacaacactcaaataatatactcaacacactcatctaatatctctgaaattagcaacataaaaaacatgaatataattggcttcgttaacggtaactgcgaagtttttcaaccttcaactgggttggctgatgaacagtgtgaatttatccaacgatatttggatgcaataagaagtaatttattatttgctcgcagtgttgttttagttgaaggtgatgcagaagaactattgattcctacattaatcaagaaggtcacggggttaagtttagatgagattggtataagcctaataaatataagaagcactgggtttgagaatgtagcattgttatttagtgatgagcggataaaaaagaagtgcagcataataactgacctcgacgaggctttttttgatattactattcctgaagatgccgataataatgatgttgaaataaagaccaagaaaaaggcagctgcatctcaaaagtctggagcagaaagaaaaaaaaggctgcaagatttttgtaataacaatgattgggttgaggtatttttcgcagaccatacatttgaagtggacttcataaaatcaggtaatagcaattatctagcaaacatcgttagagatatttacaaacaagaagcaataatcaccaactccataaatgaattaaattctggagatataaaaatatcaggagtcagagcgttggccatggctaattatcagggtaaaggatggttcgcacttacactggggaaagtcatagatttcaaaacagctatcccagattatatattaaatgcgatccaatttgctcacggtgattttaatagacagcttaaatataaagttttagaacatcgttacaattctgttattaaacatgtggcttatgcacaactacagataagtaagcttaatgaagctaaagatttagtcttaaaaaatagttggattaagtatataaaagcatatgaggatgggctaagtgttttcagccctaagtgggatttatttgatatatcaaaagatgatattgatattctgaaagcggaaatgatgaaagatctacccatcgaaaataatgatattttggggagattataa

SEQ ID NO: 79099 - DNA, 1788 bp, Escherichia coli
atgtttgtatgggaaaaggaagaaataaataaagatcaagaagatgcaatcaatgcgcaaggtagtgtattattgatcgcatgtccgggaagtggtaaaacgagaacattgacttataaaatagctttagagctatcaaagcttaatgatgataaaaagtttgtactagcgatcacttatacccataaagctgctgatgaaattaaagagcgaattgagttattaggagtagatacatcacgtttatggattggaacaatccattcattttgttatgaatggctgctaaaaccttactctatttatcatgaaaatcttagggacggttttaaaatactgaacacctatgattctgaagcgttaattacaacgatttgttcaaattacaaaactgaaaaagttaattattatgactgcaatcattactacacatcgaaaggcttaaaattatctggttatatcaaaaagcatggagcaatcaagaatatccttgacgaataccacattcaactaagaaaaaacaaccaaattgattttgagcaaatgctatacttttcataccaattgataagtaaagatgccatatcgaaaatattaagtggtgttttttcctatattttcatagatgagtttcaggacactaaagaaattcaatatgctatagttgccaaaataattcaatctagcgaaggtacaattaatgcatttgtagttggcgatccaaaccaagccatttacggttcattaggagggtatgcaatctcgcaagctgagctggagaaaataactaattctcgattttcatatatgactttagataagaattatagaagctcaaagagaataatagatttctatatcaacttcaatgtattagctagcaaaacaacttcggaaagtaagttccagaattaccaaagtgttgtaacatataatcaaaaagtttataaggataatttagttgagcacataagcaagtatattgaatataatgttaatcaactaggaattgagcagaaagaaatttgcattctggccccatggtggatgcatcttgcagctttaacaaggactttagttacaagattaccaaatttcagttttgatggtccaggtcttgttcccttttccagagacattgacaatttctggtataaaatcactcaggtaattcttactgaaccatctccaaatatgtatgtcaaacgaatgcgttgggtttctgatatattttcagaaatgcatttttgccatgttgatattcaaagattaaaccctcgactatttttaaatattattaacgatatcaaaattgatgaggtagatggtttgatttatctaagaaaattttttgatgaactatttagaagaatcaatgtagatatttcctcttaccctcaactacaagagcactatgactcttttttcaaaagctcacaagatagaattcatcgcctaaaaaaagataatgaacattttgccacagacataaatgcatttcgtaatgcatttaaaccaagaacaggtatcaaagtgtcaacgatacatggagtaaaaggtggagagtatgacactgttatatcattcggattattacaagacatggttccaaactttaatgactcaagtgatgaaagtgcaaaaaaactgttatatgtcatcggttcgagggccagaaaaaacctacatcttatttctgaaagagggagaagaagcaaatataaagattatgagtctacaaaggttctatctggaacaaaatttaactacgacgcagaccctttttaa

SEQ ID NO: 79100 - DNA, 2100 bp, Acinetobacter pittii; identical to SEQ ID NO: 73278

SEQ ID NO: 79101 - DNA, 1734 bp, Acinetobacter pittii
atgagtgagattctagacaatccagcaataattgcagctcaactagctgaagcaaaaattaatgcagctataaaagcaggacgaagtttccggctagaagctggcgcaggtgcgggaaaaacattttctttagttcatgctctaaaatccattattaaggagcgtggtagatcattaacgcaaacaggtaaaaaagtagcttgtattacttatacggaagttgcaagaaatgagattgcccaagaaattgaagaccatccagcaattttagtcgatactatacatggattctcatgggcttttatgcgccaatttcaaaaagccataagagagattcttattgaagatgattcaagaaaagaaaaagttgaacaaggtggtggcattgggtctaaatcagtggaatacgagttgggcttttttggtgttaatgatcagaaaattacactgagtcatgatgatatcccaacgatgatggctaaattactaagtaaagaaaagtttcggaaaatatttagcaatcagtttccggtagtttttattgatgaatatcaagataccaatcgccaatttatggaggctattacagagtatttcttaaaaccaaaggtgggaccactttttggtctttttggagaccattggcagactatttatggtagtgaatatgaattggcagagtatccaatcgaagagattgcaaagggatcaaattttcgatcagttccagcaattgtagatatattaaataatttaagactagacttaccacaagctgtcagttcgccagatgcaaaaggtgaagctagattttttcatactaattcttataaggggaaacgaacagatgagagaagttctaaagatgatttaccaatagatatagctcgatctactcgtacaagtttgatacagaggctacaaaatgaggggtgggatattgaaaaaactaagatactgatgttaagccataatgttttagcatctgaacaaggataccctcaattaattaaagtatttgacggacgtaatgatcaatttgctaaaaaagaagaccctgtaataaaattttttgcagaaatagttgaaccaatgagtgttagctatagcttatcaaattatggtgagatgtttaaaatctttggctcaaggcctgcaataacgaagcatgaagataaatcttgttggcgacgggatatggatcaattattaaaactaagacaagaggggactatagggcaagtgatagatcatcttaagcagacaaaacgtccctcccccccagatagagtgcttagacgagacgatgagcttatttctctaagaaattcacctgacacggaaatgtcttcaacactacttcgttataataaattaagagaaattccatataaagaagtaatcgaagttacaaagtttattgaaaagcaaactccatttgcaactcagcacagtgttaagggggcagagtttgagaatgtattagtagttttaggtggtggatggaataattataaatggccacagcttctcgagttgcttgagactaaaaagttgactaatgcaaacacaaaaggtttttatagagctcgtaatcttttctatgtatcgatttctcgcccaatgacgagactggctgtgttagctactcagacattatctgatacagcacttgtaacagtgaataatctatttggaagtgagaatgtaatagaattaagtttagatacatag

SEQ ID NO: 79102 - DNA, 1926 bp, Acinetobacter baumannii; identical to SEQ ID NO: 72956

SEQ ID NO: 79103 - DNA, 1659 bp, Acinetobacter baumannii; identical to SEQ ID NO: 72957

SEQ ID NO: 79104 - DNA, 1926 bp, Acinetobacter baumannii; identical to SEQ ID NO: 72956

SEQ ID NO: 79105 - DNA, 1659 bp, Acinetobacter baumannii; identical to SEQ ID NO: 72957

SEQ ID NO: 79106 - DNA, 1818 bp, Acinetobacter pittii
atgcatattgttagtatagaaattcaaaatttccgaggcatacggaaaacaaaactgctacttcctgaacacgcggtacttataggagataataatacgggtaaaacaactttgcttgaagctttagaccttgttcttggtcctgatagactcggtagacaacccgtaattgatgagcatgatttttttagggggatttatacaggagttataaatagttcatcacccatagaacaaggggaaaatgaatccagccaacccgatgttagctctgagaatgaagcaccaaaaattattattgaagtagtagttataaatcttactgctgaacagaaaagagagtttaatgatgtaattgaattttgggattctataactaatcagattgttcaagatgctgatattgcaagaattgataataaaaatattacagaagcattacgtgttacttttcatggttggtatgatgtggaggaggatgattttaagggggcgacttattttagtcgtagtctgattgaagatccaaaaccgatgctttttacaaagaaacataagtatttatgtggttttttatttcttcgaacgatacgaactggttcacgtgcactaagtttagaaaggggaagtttgcttgatattatacttcgattaaaagaagttagaccacagatgtgggaatctactttacagacattgatggaggtttctgttgcagatgatccaagtttaggaatctcaccaatattggagagtattaataccgcattaaataaatatgtccctaaggagtggggggtaagacctcatctaaaagtttcaaatttaacacgtgaacatctaagaaaagtcattaccgcatttattgctactggagatggaacacatgctgctccattttacagacagggaacaggtacaattaatatgcttgttctagctatgttatctcaaattgcggaatcgcgtcagaatgtaatattcgcaatggaggaacctgaaactgcaatacctccatatgctcagaaaagaatagttcatgaactatgtaaattagcttctcaaacaatttttacttctcattcaccttatgttttagaagagtttgatgcatctcaaacaattgttcttaccaatgatcctgagggaacattattacaaagacctatagaactaccaagcagtataaaattaaaaagatatcgccaagaatttcgcactcgtttctgtgaggggttattagctcgacgagttctcattgctgaaggggcaacggaatatacagcattttcagttgtatgcagacgtttagctgaacttgatcctgaaaactactcgtctttagaagctttaggtatttgtataattgatgctgatggtgagactaatatccctagcgtggctgagctttataaatcattaggtaaaaaaacttttgcgatttgtgataggcaaaatagtaataataaggacctaattgaagctcaggtagagatgcttttaatgcatgaagaggttgggatcgaggacctaattcttaatggtgctaaggaagaagcattaaatcgatttgctaagcaactagatattcctcaacatttacaaagatttaatttagaaacacagaccaaagatctgttgaaagaatatttctgttggtctaaagcaaattgggggattgctgatttccttgctcagtgttctaaagatgaaattccactatggctttgtcaagcagcttcaaggttaaaagaggcttgtatgccatcaatttctgatgaaaatcttacatctattaatacagagcatggacgttga

SEQ ID NO: 79107 - DNA, 1815 bp, Acinetobacter pittii
ataatggacttaacagatggacaactggatgtaataaaagctgaaggacatttactggtaataggtggtccaggttctgggaaaactactatttcaattataaaggcagcacaaataattgagtcatctctagagcctagccaaaaaatattattccttagctttgctcgtgcaacggtttctcgtgttgtagaagcaattgaatacgagcaacgaattcctctttctattaaaaatcgaattattgttgacacttatcatgctttcttttggagaattttaaagacccatgggtatttacttgggcttcctcgcaaattagaaattcttacgccatcgcatgaagctattgctctatcaacaattagatcaaagtttcctaataaaaatctttcgaatgaacagaaagaaaacaagaaaaaggacgagcttgaagaaaaaaatagattggcaattgaagaggggaaagtttgttttgatatgttcggatcatttgttgtttctcttattcaaggcagtgagcgtataagaaatctgatagctagtacatatcctgttattattttagatgagtttcaagatactaatcatattcaatgggagatagttaaggctttaggtcttagcagtagattaattgcattagctgatccagaacagaggatttatgattggataggtgctgatccagcacgacttacccattttcaagaaaattttagttcagtaatggtggatcttactacagacaatcatagaagttcaggcacagagatagcaatttttggtaatgatttactagttgggaagttccgtcaggaagcatatataggaatggattttgattgttttgaatcttttccatcgccagccatgacaaaattagtaaccactatttattcagcgcgcaaacgactaatggatgcaaatattgataactggtcattagctatacttgtacctactaaaaagttaatgcgtttggtgtctgatactttacgtcaaccaccttcgggaatggccgaaataccacatatcgcggcaattgatatggatgcagctattttaggagcggaaataatttcttttcttatgcatcccataaaaaataaccagcatttttcatattttattgatttattatgtaactattttcaaggcaaaaatggtgatgcgcctactcaaagtggtttgcaagaggctgaaagtatccgtaaagcatattttgattttttagaaaaaaaggcgcaaggaaaagaaataagaagatcaagtattttggtgaaaatactagatacttacaatgaagtaaatgctgttgttttaatggggaatccagatgaagattggaaaaatattagatctattttagagagtagtgcttgtaagcgactaaaagaaattgcaactgaagttagaaatatacgtatattgaatagagggtcacaattgcgtcaacagcttaccgaagattggcaagataatagatatagcaatgcattagcaattattcgtcaggcttttgttcaggaacatttttcaagaaactcgaaacctgaaactggtgttgttgtgatgaatatgcataaggcaaaagggaaacagtttgatgaggtaatcatttttgaaggatggcctaattatgtaaaaggagaaattgtggcaaatcctaatcggattgtaaggtctaatttaaaagaaaatattgatagccaagcaagacaaaatatgagggttagtgttacaagagctaaaagtagaaccacaattttgacaccaaaaccagatatatgcgtgttacttagagatatttaa

SEQ ID NO: 79108 - DNA, 2100 bp, Acinetobacter baumannii; identical to SEQ ID NO: 73278

SEQ ID NO: 79109 - DNA, 1734 bp, Acinetobacter baumannii; identical to SEQ ID NO: 73279

SEQ ID NO: 79110 - DNA, 1851 bp, Mycobacterium gordonae
gtggtggtctgttttgccgaggatctgacggtgctcgtcggggagaacgcctcgggcaagagcgcggtcatcgacgcgatccggttggcgacgacggccgcgaccgagggccccggcgtgagcttctccgccgaaaccgacccgacccgcggaaccgacgacaccactgaggtgaggatcgccgctgcctacgacgagctgagcaccgccgaaaaggcgatttttctcgcccaactcgtcgattccgatgacgtgctcacctacaacgtgacctactcgcgcgacgtcgatctgccacagtggcgttcggcccgacactcgaccggacgctcgagtgtcgaggatcccgaaccgatcaaccgcaagcggatcgcgcatgtgtacctgccaccgctgcgcgacgcgatccgcgaactggattccggtagcggcgagcgcatcgctgacgtgctcaaggtgctcacttcagcagacaacgacaagcccaagcgagaggaattccgctctgcggccaacgcggcgctgcgctccatcgcgacacttccgctacccgaaaccgcgcgcaaccggatctccgagcacatggagcaaatcaccccgccatcgcgacgccacgacctgcagcttgtcggcaaggaccaggacctgcgccgccttgccggcctgctgcgcatccaactcgccgacgagcacatcgaccccatccgtttggcgtcctccggactcggctacgcgaaccttgcctacatcgccacgatcatcgtgcaactcgtaaacgccaagaactacgacctgaccctgctgttggtggaggagcccgaggcgcatctccacccgcaactgcaatcggtgctgctgaaatacctcgaagaccaagcggctcagtcacgcaggaaagccgccaccgacgacagcctcaatcccgccggccgcgtacaggtagtcgtgtcgacgcattcacccaacctcgccagcagcgtatcggtggacaaactcgtggtctcctcgcgcacgaaacgtgccgtcgcgggaaccggcggagcgagcgaccgcgcaggatggcgcaccgaggtcaccgccctccgcaaacttgggctgacgccagcggaagtccgcaaactcgatcgctacctctccgtcacccggtcggcggtgttgttcgcgcggcacgtcgtgctcattgaggggatcgccgaagcgatcgtgctgcccgaactggcgcggctagcatgcgacggggacgagatcagactccgccatctggccgcagcgtcgttcgtcgccatcgacggcgtggacttcgagccgtacgtgaagctgctcctaaatgggcccgcacaccgcgtcgacaaggtcattgtcgtcaccgacggtgatcccgtcaccaagccgacaccgcggcgcctcggagatcagcgcaggaaacggtatttggagttgtttcccgacgagccccggttggaggtgttcgtcggcgggacgacactggaggccgagttgttctcgatggtcgccaacgaggaactgctcaagcgcgcctacctcaagatgcacccacagtcggaggacaaatgggacgagctattcagtaacttggccaaggacataccaacgcgtgccacggcgttcgcaaaggcaatcaaacgcgagaccggcgacatcgacttggggaaaggcgatttcgcgcaactcgtctgcgaggccatcgccgaacgacgcgagcaagacgattctgcttccttcgacattccggcctacctaaagggtgccatcaactccctaatggcagacgtcgcctacctggtcgccgaccccgagaacgcggatgcggatgcacacgaacctcagtga

SEQ ID NO: 79111 - DNA, 1788 bp, Mycobacterium gordonae
atgcggatgcacacgaacctcagtgaggaacaggaggctgttcttgcggccgacgtccgactcgtcgaggcatgccccggcgcgggtaaaacccatgccatcgccgcacgctacatcgccgcagccacatcgaaaggtcaggcggcggcgctgctttcattcaccaacgccgccgtcgacgaagcagctcgtcgttgcgcgaacgttccgcaggccctcgatgcccccaacttcgttggcacctttgaccgattccttcaccggtacctcgtcactccgatcctcgtccgcgcgaagggcaagccgccacgctacgtcgactcgtacaacgatctcccggcgacattcgacaccaaggtgcgtcacggcagtgtggtgggcgcaggactcgcgctggggcacttccacgccgacgcttcaggtgacctttactatccctccgatgaccccgccgacgcaccggccgccgatcgcccctacgtcgcacagctaaataaggtcggcatcacacctagcgccctgaccaacctcgcgcagcgccggatcaacgagctgaccgcctcggggatttacgactgcgaacagtcacggctcaaagccctgagcattctgcgcgacgccgattcggcctggctgcaccagcgtttgacagcgcggttcgccgaaatcatcgtcgacgaattccaggactgctcggcgatcgagcacgaaatcctgcggtcactgcagtccgtgggcatccacattgtcgtcgtagccgaccccgaccaggctatctacgaattccgtcaagccgaaccgagctcctacctcggctaccgctccgctctgcagactgaccaggtcgtctacctcgacgacaactggcggtcgtcaccggcgatctgcgctatcgcatcgagccttcgatccatcagcacccggcccatcctgtcgcggcgtgactcctcccaatcgccacacgccgacgtcgtgtacgtggcgggaggaacaccggcatacgctcgaagggagttcgatcggttggcaacggaattgaatatcgaccctgccgaacgaatcgtcctcgccgccacccgcaaggcggcccacgacctgtcgggacgagtgccgcgcctcgccgagtcgaccaccaacacctcccgtctgatcagatccatcgccactctgcgctactcaccggatccgaccgaacgcaaagccgcgatcatcgtggtcgaggaggtcctgctggggacgatcaagttcccagccgaattacgccgcgtaccccgcgacgagcagctcgacgccgccggcatggaccgatctcagctgcggatcatggtcgcccggttggttgacgcatccgaaacctggaccgacgtcgattcagcaaccgcatccatcagaacgaccgtcgcgggcctgctctcggtgatcgatttcgggtacaccccgaccgggcagcggttccagaaggccaagagcgccgactggtcagcctggagccgggcgggcgaggcgaccgaccactcgcaggggctcgccagcgcgcacatccacgcagtcaagggcggcgaatgggacgccgtgctcctcgacatagaagacgacccgaggggggcgcgaccccacatcatcgaactatgggcggcgcctgagacccatgaggcgcgtcgtgtcctctacgtcggcgccagcagggctcgccggctgctcgtcctggcagtcgcaccgcaccgactcgaggcgctgcgggccgttctagacatgtcctccgtgaccgtcgagtacctcgtcgaataa

SEQ ID NO: 79112 - DNA, 1710 bp, Vibrio furnissii
atgtacattcgtacagtcgaaattgaaaactatcgagcctttaaaaacttcgagatcaaattttcaccactaagcgtaattattggtgaaaacgaagcaggtaaaactaacctattcgatgctcttgccttgccacttaacaacaatgacattagcttcaataagaaacgtctctcagtatcggatatcaaccgcgaagcaatcaaagagttttaccaagcgatcatcaatggtaaggacgatgatgagatcaagcttctgattcctaaggtgcgagttgaggtcgagtttactgagccaaagaacattattgaagaaggcgttattgggaagtggataatcggagaagaagccgacgatagctacaagattcgttacgacttcaagcccaaagatacagagcaatttgttaaggctgccaagaagctacttgacggtatcggggacataaaagatacacgctggttcaacctgccaattgagctgtacgactacgacataacacaaagtaacaatgggttaagggttagctattctgatttaagacttataggcatcaactcgatcaacgctgagcgtgacgactttgccgagagtaacactcagaaatcaaacgacatcctgaccaagatgttgatttccgctctcgaagattccgacaaagccaagattaacagcgcatacacttcttttttcgatgcaatcgaaaacaccgagacattcacaaaaatcgttacacctgatccagacttcgagaacttcttcgacgagattgttgataagctggaatgtatcccgaatctgcctaatttaaaaagcatcctatccaacattactctgaagtcgggtgaaagctatctgtatcagcgtggtcttggatatcgtaacctcgtgtacatctacctattatttgagttctttaggggcaacaagaatgcactcaacctatgctgtatcgaagaacctgaagcacaccttagcgtcaacaacctccgcttcgcaactgattttatatacaaaagcacacaaaaaggcggctcgtctctacaaacgctaattagctcccatagtccactggtcatcaataaacttgagttaaccaacgtgatcgtcctatcgggaaataatgcgatccacctaattgatagtaagcaacatcttactaactaccttcgtaagagaccaaacttcgacattctaaaactactgttgagcaacaagactgttctcgttgaaggcactacggaagagatgctgattaacgctatcctatatcgcaataacgaaaatgttagtagtcttgaagttatttctattgagcaaacgggctttacaactttcatggacgtttggctacaagttaacaaaggcaatactaagaagaagttaagcataattcgagattatgatgacaatgactcaaccaaagataagcatcaaaaatacgatactgataacgacaatattcgagtaagaaccactaccaaatatacgctcgaagatgatcttgcagaggctgatggaaaccttggccgcttgaacacacttttcaagaagaagtacaaaacctctgctgatatggctaagttcctgaagaaaagcaaagctgaaaggatgctcaggatagctgactccatcttagatgaagagaacaaagatccgatctcgttacccaagcacattcaagaagccttggatttcatgaaatga

SEQ ID NO: 79113 - DNA, 1443 bp, Vibrio furnissii
atgattgaaattcagatagctggagctggcgcaggtaagactcatggtctggctgagaagatcatcgcgcactacgactcaacatcgcataagaaaatctttgcgattacttataccaataatgccacgcagaacatttctcaagcgattatcagacaattaggatacttgccagacaatatcgtagtttgcacagttcacacgtttctattgaatgaggtcatttacccttactctccttttgttttaaatgaagtacacaccacctcttcacaatgcaaaacgttctcaaactttcctgctggaaagtctgctgagaaaaaacaaagagaagccaagagtaccatttcaaggctaaagaaaattggggtaatacatgtcgatgaaacatattctgcggcatggagagttgtcgatgaaaactattcaaaacacaacagccagaagaagaaatctaaagttaggaaagttcacaaactcctaagcagtgcgatcgacaagattttccttgatgaagctcaggatcttgacgaaaccgctcttaaagcttttcaaaaaatcggcgagaattctgctgatatttacatggtaggcgatcccaagcaagcaattgattatccacaagatttcaaaggttggttagcaaaaaacaaagccaacaaaaaagtaaaagtgctgccgaatatcacgacatctcgtagggttccacagaggattcttgatctatcaaataccttctgccccaaagggcaagagcagatcagcttgtctgaagttgaaggacgcctcacatacatcactacagaagatgaccattatgacgctgtacttagccatcacattgagaatggaagtttagttagcatcttcagaaaagaaggtaactactcaactaaacaagcaggagcactacccgagtttgaccctgaggtagaagagctacttacagtaaaattccccgaatacgaagaaggggtggtcatatattcattacagcgtttctttgcatctctgttgtccaaaaatgacaacaatagttccatacgtaaatttcttgccaagctggaaattccgtatgaaaaagagttgttcaaaaatctttgccgatctgccgagcaatatagttcatccaaggataattctgctaagtacacaataagcagcatccagcgcactaagggcttagaatctaaggtctgtgtattagtcttaacaccagcgattttcaaatgcttaatgcaggatgctgtaaccaagttcaacaagacttggaatatggtttacgttgcattaacgagggcagagtcagagcttgttgttgcagtagacatggatttacttggcaacaaatacaaccacgatgacattgttaaaagccttgaatctattgggtttgaagtgttaaacccaaatcatccaaaccacaaaacgaagaaaaattag

SEQ ID NO: 79114 - DNA, 1701 bp, Escherichia coli
ttggaaatatcatatctgaaacttaaaggttttagaaactttaaagatgcacatatcaattttaattcgaacactctgattatcggagctaatgatgttggcaaaagtaatatgctgcattcgctaagaatgctattagataaaagtgtatcagattcagaaattgaaccaaatgagcttgatttccatttagaaaatgggaattcatgtgaagagtttgagattattcttcattttaaagatatcaatgaagatgcggttctttcaattttgaaaggtaatgtcagtgactctggtgaatcttttattaagtatgttgcacaaaaatctgatctcagctacaaactttttataggtgactctttagagtctttacaagaaattaactctcgttattatcttaagttcgttaatctaaaatatattcagtcacaacgagatttagaaagatttatccgcaaagaaaaaagacaactcttaaaaattgcccaacaatcattgaactctgatgaaagaaaagaagatgaagatttattaggagagataagtacagatttgcagttgatcaatgataaaatatctcagcttgtatatgtagaaagagctacaaaagaagtcaacgatgagttgaaaaaacttgcacatcattattcagagtattctgtgcaactagatactggggcaattggaataaacgattttattgataatctacaacttggagctaatacaaatggttctaacgtaatgcttggaggagacggacggaacaatcaaatattattagcattatggaaagcgaaaagtattaaggaacatgatatcgataacgaagtcatcttctatgttatcgaagaacctgaagcacacctacaccctcaccaacaaagaaaattggctgattatttgatagctgaactcccaggtcaaacgatcatttcatcacattctccccaaatagcggtaaactttgagccaggctctataataagattgcttgaccgtgggggacacactgtagccgcaagtgaaggatgctcaaaaggtatttcagatggctgggaggatatgagctatcggatgagtatattaccagcagaatcatttttttcaaatggcgttttcttaatcgaagggccatccgaaattttgttttatcattccttagctaaaagtttgaaaattgacctagattatttaaatatttcattgatttcagttgatggaatatcatttaaaatatacgcagcaattctagatgctttagaaattccatgggtaatgcgcactgataacgatgtatcaaagctaaaagataaagaaaagtggcactatgcagggattaatcgatgtttagatatagctggtatagaaaagtttgagcatagcgacaaaaaaatatcttctcaagatactcttgctaacggtgattggcaaaaagtttctgatgaagtgaatagatctggaatatatttatcaaaaattgatttggaaactgatcttgtagaagaattaggtgcttcaatattagatgcactagataaaaaaaataaccaaagcgcaatagaatatttacaaaagaaaaaagcaataagaatgcgtatacttcttaagaaaattaaaaatgaccttgataaacttagtatgggtgatttggttaaaccgttacaccatcttgtaaaaatagttaaaggtgaatga

SEQ ID NO: 79115 - DNA, 1626 bp, Escherichia coli
atgagcgttttttcaccaaccactcagcaagcatcagccattgactaccctaaaagtatggtaataacagcatgccctggtagcggtaaaactacagttataaaagagaaaattagaaatattaccggttgtcttcctgagcataaaggagtcattgctattacttttacaaggaaagcaagtgcagaactagagcgtagatgtaaggccgatgggcacgatataaaacatagtttttttggtacgattgatagcttttgcttaaatgaaataatcattccgtttcttcccaaaatatggggtggcaaaccaacagaatgtaaagtacttaagaaattagattctccatataaatattacttaaaggaggatttttttggaacaccatcaattgttaatgtcaatgaagacgctggctataagagactgtatgatgagggaatgctgtggatgagttcatttgctgccttatctttaaaaatactcaatgaatctcctgcagcacaacgatatataaaagcgagatatagccatatatttatagatgaatatcaagactcatccttatcacagcatcaattatttttaaaaataaatgagatcggtttatgttctattgctgttggtgatgtttggcaatcaatttatgagtttcgaggtggaaatgcagagttgttacttgacttggttagagataaaagtatttttgaacattttgagataaatttaaatcatagatgtcattcatcaataattaattatgcatctcgactactagattcaaatttcgtattattgccaagtgaaagtattaatgtttataggaagagattgcctggaaatcttaaagatgtttcgatgacattatcatcatggatttcaaaatggttaaatgtaggtcaatggggcgtggagcaagcaagccaaatagctatttttgcaagaaaagaacagtcattactattgctatgctcgggattgacatcaaatttcagggtttatattgatacgccattagataaattgggtacagaatgttcagatttatataaagatcttctagcgtatagatacaaggcaataggtactgcgcaagaattaattaataaagtatttgatggcttaatcatgaatgacaaccatcagtttttattaaggaaaaaaattaaaattctcaggagtaatctaactgatgaggaactaattaattacttccatgaaatcgctggaatgctaaacattcagtttactgaatctaatgataatgcagttttggaaattatatcagatggtatgtacttaaagcagtttatgccattagataaaaatgaagttcaagtaatgacacttcacaagtctaaaggacttgaatttaaaatagtattacatttggatatggatgaatggtcttttccatatagattagtaaatgaggttgatagaaatatagcactttatcccagtcttccacaagaaacaaaccttcattacgttggtattacaagagctgagaaatgctgcgtattaattaatgcagagttacgccaaaactcgactggggcatttaagaagtctgaagcatcttacttttttaaattgccccaactagagggtctttatcgttag

SEQ ID NO: 79116 - DNA, 1785 bp, Escherichia coli
atgtatttagcaaaattaggaatacgaaattttcgaaatttccaggacgttgatattcccttagctggtaacatagttttgctgggtgaaaaccgcgtcggtaaaagtaatcttctgtttgcaatacgactggttattgatcccacgctaccagactcaatgagacaacttaaactgtctgacttctgggacggctgtgatctaaccacaaatccccagatcgaagttcatctggactttgcagatttcgatagcgatccgttgctttcagcactactaactgatttccgtatcgccgaaaatccctcagtggcaaggctcagctacgtttttcgtaagaaagatgaaatagctggaaaacctaagtcgagtgaggattgtgaatttcttgtttatggcggaggccaggagtcgtgttccattgccagccgcgtccgacgcaggatagccattgatatgctggatgccttaagagatgcagaagcccagcttgcttcgtggagaaattctcctttacgccctttacttgaagatgcatttgcttcactgagccgcgacgatcttgaaatggtcgcaacaactctcgaatcagccacgcagaccatggaaacgttcccttcagttaaatctcttgaagactcacttcgtagcggcatcattgacctcgccggtaccgctcatgatctcaatgcgcgcctccgttttgctcctgctgaccccctcagattgatgcgctcgctttcaatgttcattgatgatggaaaaagagggattactgaagcaagccttggctcagcaaatgttgcgctgatttcacttaaacttgctgagttttcctggcgtcgcgccaaaaatgaaagaaatttctcactactctgtattgaagagcctgaagcacatctacatcctcagctacagcgagctgtattcgaaaaactctttcacactcctgaagaaacccaagctctgattgtaaccagtcattcacctacccttgctactatcgcccctcttcgctcagttgttcgcctttgccgggggagagatggtggctcacgtgcattttccctcgctaatctgccagtgactagtgaagaacttgacgatattgaacggtatctaaccgcaacccgttctgaattactctttgcaaaaggtgtaatttttgttgaaggcgatgccgaagaagttttgcttccaggatttgctgaagccttgggattcaatctgaaccagttgggcattacgatttgtaacgttgctggtgtcaattttgaaccttacgtgaagctttctgccagtctgggaatgccctttgcggttattaccgactgggatccgctggacggaactaaacaacctctggggaaaaaacgttcaatcaatctctggcaagcgtatagtgccgtatcaactgatattcctaaattaaccactgaaaatatcacttggttcaataacagctcctatgaagattgcaaacctgttttggaaaagattggagtcttcctgaatgcacaaacttttgaggttgcagtggctgataccccgggcctcaaggaggcactgcttgatatacttgatgagcagggattcggaaaattacgctcatccaggataaaatcatggcgttcaggtcaacaaatagatccctcacagcttcttgcgatgatttctgatgttggtaaggggcggttggcagccaagctcaggaaaaaagtacccggactgattcctcctgaatatattacagcggctattaaatatgtcgtatcaaatgtttaa

SEQ ID NO: 79117 - DNA, 1794 bp, Escherichia coli
atgtcgtatcaaatgtttaaccgatatgcgctatcagaagcgcttaatgagctcttaccgaataaagagcagtataatgctgccattgaaactggccattgtgtcgtcattgctggaccaggaagtggaaaaacaaaaacgctgactacagctatggctcgaactctaatggatgatgtcatagatcctcgtggggtagcatgcattacctacaacaatgaatgtgcaactgagcttgaagatcgtctgtccaagtttggcgttataagtagtgacagaagcttcattggtacagtacacagctttgctttaaaccaggtcattattccatattcccgatgcataccgggtttactgccgaataatttccgaatagcaacgaaagatgagtgccgtttagctgttgagatcgcttacgagtcaatattcagcgataactgtgatcctcatgttcgatggcgttttgctgaagagaaacggcgtcgggacgtgaatcgccttttacctagttggctagataaaaatcctgagctggcaaaattcattgaagcatatgaagcagaacttaggcgttctgacttgattgactttgatgatatgcctcttatcgcatttcgaatgattaacgaacatagctggatacgcaacgctattaagtcccgttatcccgtattgtttgttgacgaatatcaggatcttggtcatgccctgcatgagctggtactacttctctgctttgaaggcgggataaggttatttgcagttggtgatgctgatcagtcaatctatggctttaatggcgcaaaccctcgcctgcttgaaaagcttatctcgcgaaaagatgtaaacgtattccggcttcgtttcaactaccgttcaggcgcgaaaattatcagggcgtcaatgggtgctcttggtgaagatagagattaccgaggccccgacggagcggttgagggcgaacttcgttttcatggggtaaatggtgattacgaagtacaggcccgttatattgcagaaaaattgttgccttcgttgactaagcagggttttcagcttgagcggataggtgtgctttatcgtgcagcctggatgggaaataaagttgctgatgcactcaaagcaaagaatatcgcgctggttcgtaccgataataatgctttgataaaacgcggttcccgtcttgcacgctttattgagtcttgtagccaatggattacaggcggatggagagaagccactcccccttttaatcagctcttggctcaggccctttctatagtttacgggcgtcgcgtaagccagaatgaagagcttgctttgacaattcaactaatcacgtttttgcgcagcagtattgagcacgatgaatcggctcatcagtggcttatgcgactaaacacagagctcatctctcaatggaagctactttctcagagcagtttccaagaatgggatatttgttcagagttaattaaacggacagatcccgctctgggatgcgacatggcactggctgtcttttccgggaaagtaaatgatgctggtcgtgtaacactgagtactcttcacagtgcaaagggccgtgagtttgaagtggccattttatatggcgtaaacaaatatgatttccccaataagcgtgattctgcatcagtcagcgcaatgcgagaagccagaagattgttttatgttggtgtaactcgcccccggaaagaattgcatttggtttacgaaaagggaaagcattctccatggctaaatgaagtctatcatcgtagcctgcaaaaatag

SEQ ID NO: 79118 - DNA, 2139 bp, Pseudomonas aeruginosa; identical to SEQ ID NO: 72908

SEQ ID NO: 79119 - DNA, 1800 bp, Pseudomonas aeruginosa; identical to SEQ ID NO: 72909

SEQ ID NO: 79120 - DNA, 2418 bp, Pseudomonas aeruginosa
atgaagctacaggcatatcggctgcagaactatcgccgactgcgcgacgtcgtcattgagcttgacgacgagatttccatcttcgttggcgctaacaacagcgggaagacgtctgccgtacaaggcttgtactcgatgctccgtggcgaagcgaaaaagttcgaactcttcgacttcagcgcgacgctgtgggccgagatcgacgccatcggcaggacgcctccaggcgatgaggacgcgcccaagatgttgccgtccattcttttggatctctggtttcgcgtcggtgaagacgaccttgccactgcaatgtcgcttctgccgagcacggagtgggacggcaagtgcgtcgggatccgggtggcgttcgagcctcgggacgcccatgcgctcgtccggagattccatgaactgcatgagaaggccaacaacgcggcgatcgcgctggcggccaggcgcgttgcagccagggagtctgccgtggaggcgggcgcggaagatgcggctgcagtggtaacggaccacggcgagtacaagccctggccggaaagcctgacgaagtacctcaccaaggagctgagtaaggaatacacgttccgctactacgtgctcgatgagcgcgcatttgtcggctatcaggcaaaggaggccgactacgagccgctgcctctaggcaaggagccgggtggcgcggccattctcaagtctctggttagggtggacttcctgcgtgcgcagcggcacctcgatgacccggatgctggaagctctgaccgcgccgagagcctgtcgcggcgtctgagccgtttctatcaccgcaacctcgagaaacgtggcgacgaccatgcggcgctcaaagcgctcgatacctcggaaaaagaactgaacttccacctggaggaagtcttcagcgacaccctcaagcgcctcgccaaactcggctatccgggtgtcaacaaccccgagatcgtgattcgtgcagccttggacccgaccaccgtcctggggcaggatgccaaggtccactacgtggttccgggcgcggtcaccgcgcaacttcccgacagctacaacggtctggggttcaagaatctagtctatatggtggttgaactcctcgacctgcacgagcagtggaaagccgaggaagacaaacgggcgccgctgcatctgatcttcattgaagagcctgaggcgcatctgcatgctcagatccagcaggtcttcatcaggaacgttttgcgcctccttgaggatgccaacgatcacgcgacgtttttccacacgcagctcgttgtcaccacgcactccccacacatcctctatgagcgcgggttctctcccatcagatatttccgccgtgccagtgaccaactgaaccatcacactgaggtaaggaatctttcccttttcaagacgggcgcggccgacgctccagcgcgcgaattcctgcagcggtatctgaaactgacacactgcgatctcttcttttccgatgcggtcatcttggtggaaggcaatgtcgagcgcctactcttgcctgccatgatcgagtcggcggccaagcgcctgcgttcctccgccctgaccatccttgaagtcggtggcgcgttcgcgcatcggttccaggaattgatcgccttcgttggactcacgacgctggtcatcacggatctagacagcgtggcggtcaaggcggatgccgaggatgccgccgagcaagacgcaggagctggcggcgccgtcgacggagataacgaggacgacgacctgaagcccttcgagctcgaagacgatgacgaagcagaaccgggcggcaagaagaagtccaagaggcgtggcagcacctgccatgcgcacgtagagggtgccgtcacgtccaaccaaaccctcatcagctggatcccgaagaagcggtcggtggccgaactctgggaagtcgcgtcggagcaaaagacgctgccgctggccgaggggtccagcgctgaggttagggtggcctatcagaccaaggttttggtgacggtggggaccacgacctcgcagctctgcggccgtacgcttgaggaggccttcggtcttgagaactccgactggtgccaagctgaggccaaccgggcggtcggactcaagctgaagcgcgcaccaaacacccctgaggaactggctgagaagttgcacaaaagggtgatcggcaagaatttcgacaagactcgctttgcgctggaggtcctcgcaagcggaccgctcaattcctggaaggtccccgcgtacatcgccgagggcttagcctggctcgaagctaaagtggcccacgagattgaggcggacgtggccatcgccaccgaggtcgcgacgattgagccgactgcggccggtgttgtcgccgtcgttgctaatgtggggcagagggcatga

SEQ ID NO: 79121 - DNA, 1923 bp, Pseudomonas aeruginosa
atgagtaggcgaatcgatagtccggacaccgacgccgacctcgagatccatgcgtgcattgccgcgaagcccccgcagcccttcgtggtccgcgccggcgcaggttccggcaagaccacatctcttatcaaggcgctggactgggtgatgtcggagcacggcgccagcatgcgggcgaaaaggcagaaggtcgcctgcatcacatataccgacctcgccgtcaaagaaatcttggcggacgttaacgacgacccgctggttcatgtctcgaccatccacagcttctactggtctattaccaagacgtttcaggcggacatcaaggtttggctacagaacgacatccgcaggcggatctccgagcttgaagaagagttcaagaactacagctcgcgtgttcgacagaccacgcgcgataggaacaaggctgatcaggatcgttatgcccgaaacctggaggctgtggctggcgttaagactttcaattacggcgtaggcagtgactacgcgaagggcatcctcggccacgaggacatccttcagctcaccgacttcctgctgcaaaaccgcccgctgttccgacggctcgtggcgctgaactatccgttcgtgttcatcgacgagagtcaggacacgttcccaggggtggtgaagtccttcaaggaagtggaaacccagatgcgggacaagttctgcctcgggttttttggcgacccaatgcagtcgatcttcatgagaggcgcaggggacatcccactcgaagaccattggcggtccatcatgaagccggagaactttcgctgcgccaagcagatccttgacgttgccaacgccgtacgcgcgcagggcgacggcatggagcaagtccgcgggctgcacgagagggtcgatggggccctccagccggtagagggctcggcccggatgtttgtcctgccgaacacgctgaaccgaacagagaccctggcaagagtcagggcgtggagcgcggcgacaaccagcgacgagggttggacgaccccagacatcgcggtcaagattctcgtcatcgtgcaccgcatggccgcaaaccggctcggcttcggcggcatctactcggcgctgaacgacaagacgtcggagtccatgaagcaagggatgcaggatggcaccggctggcccgttcgacctttcctaggtttcgcgctgccgatcgttgcagcgatgaaggccggcaacgagttcgcagcgatgaacctgctccgggaattcagcccgcgcctggcgccttatgccctgaccggtcgccgtgccgtagatgtactgcgagagctgcatgccgccgttttgaaactcgtcgccatgctcgatgatcctggcaacaccattggggacattgccctccatcttcgcgatgcgggcctattcgagttcgacgagcgttatggccgggcgcttgggttcatcggagatgttgccgacgcagctcaggaggccgaggcagctccggccgaaggacgatcctccgacgcagcaatggtcaagttcttcaagtgcaccgcacaagaacttcggccctacgaacgctatgtctcagaaggctccccctatgccacccagcacggcgtgaagggcgcccaattcgaccgcgtcatcgtcgtgatggacgaggaggagagcgactaccgaacctacaactacgagcgggtcttcgccagcgctgatgcccgtgctgcagatcgtgcacgagcccaggacggagatgaaaacacctggagtcgaacgctgcgactgctttacgtctgttgcactcgcgcccagcgggggctggtgctaacgttctttgtcgccgacccggcgaccaccttggaaaacgtcgtggcgagcgggatcttgccgcgaagcgcagtctttacgcaggaagtattagctggatggccatag

SEQ ID NO: 79122 - DNA, 2115 bp, Pseudomonas aeruginosa; identical to SEQ ID NO: 72562

SEQ ID NO: 79123 - DNA, 429 bp, Pseudomonas aeruginosa; identical to SEQ ID NO: 72561

SEQ ID NO: 79124 - DNA, 2082 bp, Chryseobacterium aquaticum
atgaaagtatataaaattgaagttgataattttaggttgctgaagaaattttcaatggatttggaagatgagctttcacttgttattggaaaaaataatacaggaaaaacttcacttcttacagtcttagataaatttttgaatgaaaaaagcaaattttattacgatgatttaaatatagactttaaaaaccaattagaagctttgattttatcagatgaagtacctgcacaattcttggacaaaggagttaaactaaggttattcattgaatataatgaagccgatgacttgtcgaatgttagtagagttttaatggacttagacccgaataataataaaattgttttgggctttgaacatcttattaactatgacgattttttgaaactgcgaagtgattttgcgagcttttctgcaagtgagaaagccaaaaaagttaagaagaaagaatacaagccaagaggactaaaagattttttaaaacaagagatggaaaattatttcagtactcataaaatgtcttttgaatatgaaactgctacaggcaaagttaatgaaatgaacttcataaatctagatagcgaaggtattagcatcaaggatataattagcttcaaatacattagtgcaagaagagacgtaagtaataaggaaaaagaaaatactctttcaaaacaaacttcgagcctgtataaaaaacaggaagataacagtgataaaactcaagctactgaaaactttaaagaccaactctcagaaacagacagtacattaagtgaaatctataaagacctatttaaagatgttataaaaaaagttcaagactttggtggagttaaactcaatgacacagacattgccataatatctactctacagcacagagaattactggaaggtaatacaacggtcgtttatacacacgatgatcataaactacctgaacattataacggcttaggttatatgaaccttataagtatgatttttgaaattgaaattcttgtccaggatttcaaaagagaaaaagacaaaaagccagcagacatcaatttattaataatagaagaacccgaagcacatactcatccacaaatgcagtatgtgtttattaaaaatataaagaaactacttggggaaggtgtaattagagaggacggaataaatagaccactacagtatattatcacaacacattcatctcacattgttgccgatagtgattttgatgatattaaatatttgaaggttaatggaaaaaataacgtaaccgcaaaaaatctaaatgatttgagaaagcagtatgacgccgacccaagtcagtatcaatttctgaaacaatatttaaccataagcagagctgaaattttctttgccgacaaagcagtgttaattgaaggagacactgaaagaatattgatacctacttttatgcggaaggttgatttagaagagctagctcgcttaaaagcagaaaataaagaagataattttcttccgttactgtcacaaaacatatctatcattgaggttggggcatattcccaaattttcgaaaaatttattgaatttcttgggataaaatctttaatattaacagatattgatgctcttaaagtcgtaagacaagatgataacggacaagatgtctggggggcttgccctgtcgatgaaggaacaaaaaccagcaattcagcaattaaccattttttaaaagcgactacttgggatgcactgaaaacattatcggcagcaagcagaacaatcactttggatagttctacggtttgtatttgctatcaacaggaagagagtgcttatcacgctagaagtttcgaagatgcttttattcacataaaccgaacttttgtaaatggtaaaaaagatgaatttcacggattacaaaacaggaagttatttgatgttgctactaataatgcttttgttttagcagataaatgcatcaaaaagaaaactcatttcgctttggatattttatatcatagcgataaagaatttactaattggaatattcctgcatatattaaaaatggtttattatggctgaaggaagattaa

SEQ ID NO: 79125 - DNA, 1929 bp, Chryseobacterium aquaticum
atggctgaaggaagattaaatttagaacctgaagtacaagaaatatttcaatcaattgatgaaggcagaaattttctacttagcggtggagctggaagtggcaaaacatattctttagtaagtgtaattcgtcaggcaattttagaaaatccaactgcgaaagttgcttgtatgacatatacaaatgcggcggttaaagaaattgaagaaagagtaaatcataaaaatttaagtgtatctacaatccacgattttctttgggataatataaagcattttcaaaaagagctcaaagaagcaattatctcattggctaatgatgaagaggttagcagagtttctgttgacgatataaaccttattcctgataattattatgatgatttggaagatggaatacaatataaagaatatgtcagggtaagggatggtattatatctcacgacgaattgcttttaattgcaaactatctttttgataaatacccaaagcttagtagcattgtaaaggataaatatcaattcatttttattgacgaataccaagatacaagcaaagctgttgtagatacctttcttattcatttcaagaaaagcgagaggaagaatatcatcggtttctttggcgacgcaatgcaatcaatttatgaagatggtattggtaatttagatgaatacaaaggtcaagatgcagataaagttaaagaaattccaaagaaacaaaatagaagaaatcctcagcttgttataaaccttgctaacaaacttcggacagatggtattacacaagaaccgtctgttgacattaatgcacctaatatggtcggaggtgtcgttaaacaagggaatgtattgtttttatattcaaccgatggcagtattgagcaagtagaaaaattcttaggagaaaattatggctgggatttcaataatacgaagcaaacaaaagagctcaatcttacacacaatttgatagctggaaaagcgggatttagatcattaatggatatttacgacaatgaccctatcattggattaaagaccgatatccttaataagataaaagataacaagaaaaataatcggacagaaatcgcaatatatgaagatgatacatttgatgttgtagttgataaatttcagctaaaaaacatacaaagaaatttaaagaaagatattttattagcagatcctataaaagctgaattatataatcaattaaaaaacaagctattttccgatgtgaggaaaatctatataaataaggatgctctgactgacgataaaaagcaagataaagatgatgaaaataagaaaggttcaaaaagagataatttgattaaacatttgttcaaaatccagaatagtatatctctctataaaaacaaacggtataatgaatttttaagaggtactgattatagaatacacataagaaatattgcaaacaaacgattattgaaagagaatatcgataatcttataaatgttggagaaaaaacaattgaggaagttattactgatgctcacgaaaaaggtatatctctaatagacgacagattacttgcatttgtagggaagaacgaatatttatataatcaggtgaaagatgtgaaatttaatgagtttcaaaagttgtacgaatacttagaaggccaaactccattttctacacaacataaaacaaaaggtgctgaatttgataatgtacttgtcattcttgataatgggggatggaataattacaattttgaaaaaatgtttttgggtacagctactccaagcgtaattgaaagaactcaaaaattattttacgtttgctgtacacgagccaaagaaaatttagctgtattctttcataatcccaatgcaaacgtaattacaaaagcaaaagaattgtttggaaatgagagtgttattaaaatttaa

SEQ ID NO: 79126 - DNA, 2076 bp, Sphingomonas sp. Leaf11
atgcggatagtgaaggccaggatcgagaatttccgacttctccgtaatgtagaatttgggttcgaggcacgcacgacgctgatcgtcgggcggaacaatagcgggaagacgtcaatcgcagagctgttccggcggatcttgtccggcggcagtctggcattacggcttgaggacttctcgctggggtgccacgagagcttttggcaggcgctgcaggcctaccgcgccgacccgcagtccgccgacgcttgggagcagctgccttcgatccggctggtcctcgacatcgagtacgacacggacgctctggatctcgggccgctgggcaactgcatcatcgacctcaacgacgactgccacgaggctcgcctggagtttcggttcggcccaaaggctacggcacccgagacgttttttgctgaccatttggtcccgctggaggatgcggcgaacgaccgctcccgtttcttccgggatctcggccaacggctccccaccgcctatgtgggaacgctggaggccgttgatccgaacgatgccaccaaccgcaagtcgctcgagaccaagttgcttactacgctggtcggggtgggctttatcaacgcccaacgcggtctcgacgacgacaccattcgtgagcgtgatgttttgggtaaggtcgtcgaggtgctgttccagtcggccctgactgatgacatcaatcccgaaagacggacgaccgcagagcagctcaaggaagtggtggaggcgatccaaggcgacgtacacaatagcttcaactcgggtctgacctcgctgctgccgacgttcgacctgttcggatatcccgggttgtcggatcccggactcgtgactgagacgagcttcgacgtaaacaagcttctcaaagaccacacgaaagtcaggtatcggggcgtcaacggtatgacgctccctgagacctacagcggtcttgggaccaggaacctcgtctacatgctcctgcagctgttgagcttctttcgagaatatcaggcaatgccgacctcatccggcgtccacctcatcttcatcgaggagccggaggcgcacctccaccctcagatgcaggaggttttcatccgtcagcttgagcgggtcacggccgcgttcgtggcgcagctgaacgccgaccaaccgtggccggtgcagttcgtcgtgacgacgcactccccacacatggcgaacgaagcaaggttcgagagtctccgctactttctctccgtcgccgatggcgagggagtgcgccgttcgctcgtcaaggatttgcgtcagggcatggcgggtgccgagccggcggtgcgcgaatttctccaccagtatcttacgctctcgcgttgtgacctgttcttcgccgataaggcgatcctgattgagggcacgtcggagcggctcctgcttccgtccatgatccgaaagactgacgagacggcggccgggcagccgcagctcagcagtcaatacctgacagtcatggaggtcggcggcgcgtacgcgcaccggttctacgatcttctcaatttcctcgagctgcgcacgctcgtcatcaccgacatcgactccgtggctcccaatgccaacaataagcgtgtcgcggtcttggtggcgcagggggccttcactagtaatgcgtgtatcaaggactggttcgcgcccgatgtctcgcctgcgcagcttctggcgaagacagctgacgagaagacaagcggcggcaggcgtctggcctatcagatcccggaacaggatggcggcccctccgcccggagcttcgaggacgcgttcatcctggcgaacccggatctgttcgaactcggcgggggggatcgagcggcgctcgcctacgagcatgcggccgagcagaaaaagtctagcttcgccctcgagcacgctatcgaaagcacagcttggagaacgcccagatatatcgccgagggtttgcggtggctcgccgcggggaatcccgctccggttcttccgcccgacgtggtggcggcggagctggtcgctgaggtgatcggcatagaagttgccgactacggacagccggcccatggctga

SEQ ID NO: 79127 - DNA, 1764 bp, Sphingomonas sp. Leaf11
atggctgatggggagagcccggctgacgctgccggccgcgccgcgttggagcaagtttttgcatgctttgacgaagggcgtagctttcgtctcgaggccggtgccggtgcgggcaagacctactcgctggagaaggccctccgccggctgctggcactgcgcggttctgagctcatgcgcaaccggcagcagatcggctgcattaccttcacgaacgtcgcgaaggacgagatcgcgtcccgcgtccaagcgcatcccgctgtgcggccggagacgatccacggcttctgctggtcgctgttgcaggactttcagccagagattcgcgcattagtaccgacgctcgaaggctgggccgaccggctcgccgaggcggatgtcgccgaaattggtgtccggaccatccaatacgaattcggctatcctagggtgaccgaagcggaattgacactgcggcacgaggacgtgctcacgctcatgaccgcactactcgcccggcccaagttccgggccgtgatgaccgcgcgctttccggttctccttatagatgagtatcaggatacggacgctggcttcgtgaacgctctgaagcagcacttcctcgacaccggaaccggcccggtcgtcggactcttcggtgaccactggcagaagatctatggcgacggatgcggagcggttgagcacgccgcgctccaagtcatagacaagaacgcgaacttccggtcggtagaacccatcgtttcggtgctaaaccgcatgaggcctgcgcttccgcagatcccgagcgacgccgacgcgccgggcgaggcgcggcttttccataccaacgcttggccggggcagcggcgcacgggtcaggggggcgggcactggactggagatacgagcgccgaggcggcccgcgcctacttcgaccatctcaagggcaggctcatcggcgaaggctgggattttgcggtcgagcggacgaagatcttgatgctcagccatagcgtcctcgcacgggagcagggctatccgacgatccagcagatctacggtcaattcaacgacccgtggctgaagaaggaagatccgcacatcaagttcctcgcggatcaggtggagcccgcatgcgccgccttccaagcgcagcgctacggcgagatgttcggatgcctcgacgccggtcacccaagcatccgccgtcataaagacaaggcggcgtggtcccaatctttccaagaactcatcgagctcaggcatagcgggaccattggacaggtgatcgacttcatgcgggcgcaggagcacatgcgcgttcccgaagcggttatcgatcgcgaaaatcggcttgctgcagtgggagatgttcctacggaaaacgagccgcgtagggtgacccagctacggaggctccgcgacgtttcctatgcggagctgatggcggtggatgccttcattgacggccacacgccgttcgcgacaaagcacggggttaagggagctgagttcgagaacgtcctcgttatcgtcggtcgcggttggaacaagtataacttcggtcaaatgttggaatggctagatcagggacctcctggagacaagacggcctcctttgagagcaatcgtaaccttttctacgtggcctgctcgcgtccgaagcggaggctggcgctcctgtttacgcaggtgctaagccaggctgccttggcaaaggttcttgacttgttcggcacggaaaatgttatcgctctgcccgctgacccatccgtcgcgtga

SEQ ID NO: 79128 - DNA, 2076 bp, Sphingomonas sp. Leaf9; identical to SEQ ID NO: 79126

SEQ ID NO: 79129 - DNA, 1764 bp, Sphingomonas sp. Leaf9; identical to SEQ ID NO: 79127

SEQ ID NO: 79130 - DNA, 2298 bp, Pseudomonas sp. Leaf15
atgcaaattcagcatctggaaatcgcgaacttccgcaagctcctatccgtacgggtcgacctggcagtcgagaccacactcctcgtcggagccaacaacagtggcaaatcatctgcgatgctggccttgcgcaagttcctactttcgaaagcatcgattttcagattgcaagatcttactctgagccatctcgccacaatcgattccattggtgaagcttgggaggctgcagatgatagcttccccatcccagtcgcaaatgaatgggctgactggttgccaacgctagatatttggcttgaagcagctcaaggcgagcttcatcacatccgagatctcataccgaacttcgcctggaaaggcggccatgtcggtatgcggttccggctggaaccggatgatatgccaacgctgttcgtcgattaccgcaaagagcgagcacgagtgagggagcttcagcaggaaattcaaaaacaggcagcgctaggtacacagccaccatctcttccgctctggccgcagagcttgcatgactacctaaatcggcggattggtaaaaccttcaagatccgatggtaccgacttgatccaggccagctacgagcaccaaatcctgcgactcgtaaagctaaccagcaaccgcttgcggccactgctacgccacttgaacgcaatcccctaacagacctgattcgagtccacgagatcaatgctcaacgcggctttggtgacagcgctgacgaaggagtcctagagggaggacatggatcgggcaggaggctctcggaacaattgcgagcgtactacagcaggcatcttgatcctggcgatagcccagatatttcagatttggaggcactcagagcaattgaggcggctcaaactgcctttgacactcgcttgagtacgagcttcgcgcctgcgctcaaggaggttgccggcttgggctatccaaataactccgacccgtccatccgagtttccacccgactcgcccctaccgacgggatgaaccacgaagcagcggtgctgtttgaattagattccgttggaggagcccctggagcaccgcctcttaggcttccggaaacgtccaacgggctcggctaccaaaacctcatctcaatgatattccgattgatggcatttcgagatgaatggctgaagaagtacagaagtcctgaagagcaaagtgctactggtgttgagcctatacatttggttctaatcgaagagccggaggcccacctgcacgtccaggttcagcaagcattcataaaacacgcctaccatgtgctttgcagcgacccattgttagcgaagtatccgaacctcaggacacagctgatggtcagttcccactctagccacgtagctcatgagattgactacgaaaacttgagatacttccgcaggcttccgtccggcatggccgggatatcaatcccagtctctaccgtctcgaacctaagcacagtgtttggcgagtccaatcaaacgaaggaattcgtcacccgttaccttcgggcccaacatgccgacctgttctttgcggatgcggtgatccttgttgagggggccgctgagcgcatgatgcttcctcattttttgaggcaacactttcgtttcctagaccagtgctacataaccattttggatattgggggaagtcacgcgcatcggctccggcccctgatcgatgcgttgggcattgtcactctggtgataactgacttggacgcgggtctcctacaggtcggcaaacctgtcgaacggaataaaggccaaaccactaacaacccaaccgtgcgccattggatgcgagcagcaggccttggacatgatgtggactcattactggatctgccctttgacagtaaagcccagcaaattgacgatctgttttcgatcaggatcgcttatcagacgcccattactgtccgcttacccaaaacggggttaaatgtcgaagcactaccaaatacctttgaagacagcctcgtcttgagcaatacagagcattttgctaacaaagcggggcgcgggctgatgcgatcctttgccaaggcgctacgtgaagcagaaacctccttagagcttggcacagagctattcaccaagctcaaggatggtgataaggctgagttcgcactacaggttctaggcgattctgatttcgccaagttgaaggtgcctacttacatccatgaaggcttggcgtggttgcagtccaagctcgaaagaaaaagcaaagagctgctgatcatcccttcagcgattctcgaggtgacaccatga

SEQ ID NO: 79131 - DNA, 1848 bp, Pseudomonas sp. Leaf15
atggatgatgttcctgatgccgaccagatcattcaagactgtctgaatctcgaccatccgaagagttttttcctatacgccggcgctggctctggaaaaacccattcgttagtcgaagccgtgaaaactctaaaggatagggaacggcaacgactgacttttgaaggacgccaaatcgcgatcatcacctataccaaagcggcgtccgaggaaattacccgccgccttgaacacgacccactggtggttgtgtcaaccattcacgcgttttcttggcggatgattcagggcttcaatgatgatattcgtgagtggcttcgggtcaagctcactcaagatattggcgagcttaatgagaggctcggaaaggctcgagggcaaaacaagacatttctagcaaatcaagcttcgagggatagcaaagctcgtcgcctcgattccctggatgagatatcaacattcatatacagccctaccggcgacaatcgcggtaggcaatccctaaaccatagtgaagtcattcaaatggccgctgcttttatccagcagcctccattgctgaacgttatggcggatctgcatccggtacttttgatcgatgagagccaagatacttatgggcctctcatggacgcttttctgcaagcacaatccctcatccctgaccgtttttgtctcgggcttctcggcgatacgatgcagcgtatctacagcgatgggaaggtgcgcttggaggaagcgatccctcgagactgggctgtgcccgaaaaacgtatgaaccgtcggtgcccgacgcgggtcgttgatctgatcaacgtaattcgtgcgagcgcagacagccatcagcagaagccaaagcctgacgctatagaaggcacggttcgaatgttttgcacccaacagataccaggtcaaggtttcgagttggaggaagacatcgcacaccgcatggcagccatcaccggcgacgctcagtgggcaactggtaaagacggaagaaaatccctgattcttgaacacaagatggccggacgccgaatggggttcgagggtgtgttcacaccgttgtatggagttgagcacctgcgaacggggctactggatggaacactgccaatcttgagactgttctttgatcgggtagcccctattcttcgagctgccaaggcgaacagtttcagcctcatggaggctgtgcggcttcagtctccgcttctcgatactaaatctataaaagacgcgcctgaccagttggccttgcttgataaagcaagagcagcaactgagtcgttatgcgaactattcaatgccaacgatcccctaatcggtgaggtggctcatgttctgttcgaaacagcactactagatctccctgatcgacttgtgacagctctattgctgggcgccacaagtgataatcctcccgacacatcggatcgtgatgcattagaaacccatgcataccagactttactggcgcgccccttctcggaaatggctgcgttcgctggctataccgagggactatccccttttgacactcaccaaggtgtgaagggactagagttccctagagtcatggttatcctcaacgacgaggaagcaggtggtttccttttcagttacgacaagctcttgggggtcaagcctgcttctgacagcgatgtaaaaaatcaacgcgagggcaaagatgactccttggctcgcactcgtcgcctgctgtacgtcacttgcagccgggtcgaagaaagtctcgcgattgtggtttacacctctcagccggcgacggcgaaacagcgagtgattgaagcaggatggctccagccagaggagatcgaaattctatga

SEQ ID NO: 79132 - DNA, 2133 bp, Pedobacter sp. Leaf216
atgtatatttctaaaatttctctagttaattaccggaactttaagaatgcagccttttatttcaacaagggtatcaataccattatcggtgaaaacggttcaggtaaaaccaatcttttccgcgcaatccgtttgatgctggatgatgatctactaaaatttgcctataaatttacagaagcagattttaatagaacacttgataaaaaatggaaaggacactggattatcatcagcttggaatttagtgagatttctgcggatgaatctattcaggcaatgtttatccatgggcttgggaatggtgaagaggaaactgtggacaaagccacctacaatctattttttagaccaaaatcagatatccgttatcgactctcggagttagcggaaaacgatacagaaggacttgcagcaatcgttgatcagctcactattgccaattatgagagtttcttcaccggcaagagcagtgttgattttaatgacccagaagtttacaaagaacttgttggagattttgacgctgttaagtttaatctaaatcccgatacttccttgtttggagcacggattccccatcaactttctatctctaaggacattagctttacttttatcaaagcactgagagatgtggtgtcagattttaataataataggacaaatccgttgatgagcctgctgaaaatcaaaagcgagctaattaatgatgcggattatgctcccatagcccatcaggtcaaagatctaaatgccgcaattgaacagttacccgacgttcaggatgttcgcgaaaatatcaaagaaacgatcaaggatacggtaggtgaaacctattcgccatcttcactttccattaagtccagtgtgcccgatgatgcggaaaagctccttcagtcccttaaacttttcataggagaaccggatgagacttatgaaggcagcatccatgagctcagtttgggaggtgcaaacctgatttttttaacactcaaacttttggaattcaaataccagcggtcagccgacaactttgcgaattttctcttgattgaagaacctgaagcacatatacacacccatattcaaaaaaccttatttgataatcttaattacgaagatacccagattatatattccactcattcgacctttatctccgaatctagcaatatttccaacatcaacattctgagcaaaaaggtaaactatgcagagagttttcaacccgccaacaacctacctgagtccaaagtccacaagcttcagcgttacttagacgcggtaagaagcaatctattgtttgcaaaaggggttatgctgattgaaggagacgccgaagccattttaattccgttgatggtcaagaaagtatttggtataagcctggatgaactgggcatcagtttaatcaatatcggtagtaccggttttgaaaatattgcccaaatcttccatgaagacagggtacaacgaaaatgcagcatcgtcacagaccttgatcaagctattgccgatacgacagaaatagacactgatacagaagcagtgaaaacttataaaaagaaattggcggcttcagagaaatcaggcaaagaaaggcaagaagcgctcgatttgtatatcacaggcaacatttatcttaaggcctgctacgctgactacaccttcgaagttgacttcatgaatcaggaaaacaaaattgagattctcaatacaattcctgaagtctacaaggaggaagatacaatagaactggccgcaactgacattggagatgaagatattgccatttcaggaaaaagggttctggctatggcaaaatatgcaaagaaaggttggtatgcacttattcttggaaaacacatcaccttcaaaactaatataccaccatatattttggatgcgattgtgttttcgaagaccacgctcagcagacggacgatattgtcgcttttggattaccggctttcccagtaccgaaaagatgcagttcatccagaatttttggcactcgagctagaaatggaaaaatatggtaaaggcgatatagcacttcaagcgctcatcgcttctatacataaagcgcttccaaatgatcagattaaggattttttagaaaggctatag

SEQ ID NO: 79133 - DNA, 1800 bp, Pedobacter sp. Leaf216
atgtttgtctgggatagagatgaattaaatggtgagcaggaagccgctatactggcaccgggaaatgtcctgctcattgcttgcccagggagtggtaaaactagggcattgacttataagattgcccttgaactctccaagctcaagtcgaaaaaaaaatttatcattgccataacgtataccaataatgctgctgaagaaataaaaacccgaatagaacatttgggcgaagatacttcccagctctggattggcaccattcattccttttgtaccgaatggatattaagaccttatggattgtatgatgacgcactaaaatatggttttaaggttctgaattcgcatgagagcgaggcgctgttggataccttctgtgctccgtataaggtctttaaagtatcttattatgactgcagttatattttcacaaaaacgggttatgcactgggtaactgtgccgcagttaagcgcccgtatgttgaggatgtattgaagaattactgggcataccttaaagcgaacaggttcattgattttgagttgatactaaaacatacatacgagctaatccagacgcgtcctgtcatcgctaaaacgctttcgaaattattttcttacatccttttggatgaatttcaggatacaaaggaactgcagtatgaagtgttggcaagtatcattgccagtaatccaaaggaaatcggcagttttatcgttggtgatcccaatcaatccatatttacaggacttggtggttacgcgatagcgctagaagatctgcaaaatatgaccaaaagtaaatttgagccttttgagctatccaataacttccgatcctctgaaaggcttatcaagtatttccaacattataaaacatttcccaatactattctcgccgcaggaaagaacaaagattacacgagcataatcagcctcaatcaggaggtaatgaaatcagtcctcgaagatgaaattgtaagattgctggcatttaacatcaccgagaaaggaatttctccaaacgagatttgtatcgttggccctcaatgggtgcatctctcagcgctgactagaaacctcatggttaaaatgcccgactataatttcaatggccccggaatggctccctttgctagggatattgacaacttcttttataaaatctgtagaatcgtactaacagaaccatcacccgccatgtatattaccagaatgcggtggtcgagggaaatattgaaagatttgcatgaaataggaagcgatatttctggtacctccgctaaagcttttctgaggcattcaaacctactcaggatcgatgaaacggacggactggcttaccttaaaattgccttttccgaactgttggcttcgcttggtgtggataagagtatgtataaagcactcaccgaggactacaactcattttttgcaagctccgagcagcggatcaaaaagctggccgagcagggcgatctgggcgttagtacaattgtcaatttcagaaaagtatttaaacaacgggatggtatcaccatatccactatgcatggtgtaaaaggactagaatttgatgtagtcattgctttcggcctacttgaggattgggttcctcatttcagtgatgtggatggtgaaaacagcgctaagaagttactctatgtaattgcctctagagctaggctgaatttgcatatgatatccgaacgaagagagaaacgtttttcgaggccgcctaggaatatgttcagcaccaatcagctttccggctatgtttttggttatgataactgttag

SEQ ID NO: 79134 - DNA, 1962 bp, Sphingomonas sp. Leaf20
atggcggtcgatacgactgtcttcatcggccgaaatggcgcgggcaagagcgccatgcttcaagcactgttgcgtctcttcggcgagacccgagacgagcgcaagatccagccggctgactttttcgtcgagcctggcgagcgacttgaaagcgttgccaaacgtgagctgttcctggaagtcgagattgcgtttccagagctagacgggggcgacgcagacgccgagcgcacggtaccctcagccttccgccatatgattgtgaccagccccggtgcggcgccgtttgcgcggctgcgtctcgaagccacgtgggagctcggcgggacgctcgacggtgtgatcgaggagaagctcttctggatcctgacgcctgacgatgttccgaccggcgaaggtagcgccttggtgaagcgcaaggtttcggcgagcgaacgcagccacatcgttgtgcgctacataccggcatcgcgcgatgtgaccgcgctcacccagcttacagtgaagagcctagggcgcagcctcatgaacgctgtggtttggcagaacaaggacgagatcgccgaactcgtcgccaaggccgccgagaagctcgacgcggaaggcgcgctagcgcgggtgaacgctgctatcaacgcttgctggagcgaactcaatacggcggaaaccggcacgactgccaaattggcggtgctcgcgcctgatctccagcagatcgtgcgatctgccacaattcaactcagcccgtcgtcgcaaggccggaccatgacggtcgaggatctcagcgatggccagcgatcactcttccactttgccttggtaaaggcgctgctggacctcaagcttgagctcgaggcggaggtccgcgatgccaaaacgccgccattcgaagcggcttttgctcgcgctcccgcgctgacggtgttcgccttcgaggagccagagaaccatctggcgccgtttttcctggcgcgcctgttgatgcagctgagcgtgctgacgaagactgcccgtgtgcaaggcgtgctcaccagtcatgcgccctcgatcgtgggacggattgaacccaaggcgatccggcatattcgccgggaaacaaagaccggcctgtcaacggtctgcgcccttgctcttccggaggatggtaccgaagcggcgaagttcgtccgcgaggcggtacgagcgcacccagaaatctacttcgcgcgccacgctattttcggcgaaggtgcgtccgaggagatcgtgctgccctggctcgccgagaagattggcgtgcccatggatcgctcattcgtcgcgatcgtgcccgtcggtggccgtcatatccagcatttctggcgtttggtcgaacagcttggcatcccccactccaccctcctcgacctcgatctggggcgaagcagtggtgattatgtgcagttcagctcggttgcaaaggcgctcacgtctggcggacacccgcgcagtgcggagcagcagaaatggctcgatgccgccattgagctcaagcgtcccccggcctggggtgaggggagtgcgacagataaattcctccaggattggatggcttggctcgagcagttcggcgttttcttctccgcgccactcgacctcgacatgctgatggttgaggcttttccggacgcctataagacgttgccggatcgtgcgaccgggcctcgtggcgccgatgacgcggacgtgatcgccaaggcggctaaggaggtggtcggagccgacggctttggcgttgcaccttatgaagccgacaagaactggccgctcttctcgtggtacaaatatctgttccttgggagccgcggcaagcccgccgcgcatctgttcgcgttggcgaccctcgaagccgatgaagatgccgatattcagccggagatcccaaaggtccttgcgcgcctcgtcgcgcatgtgaaagcctctcttgaagcaccgatcgcatga

SEQ ID NO: 79135 - DNA, 1932 bp, Sphingomonas sp. Leaf20
atgatcaagcccgatgattggaagccgatcgaagttgcagcgcttgagccggcggcactcggtgccgtgacggccacgggaagcacgctggtggttgcggggcctgggaccggcaagactgagcttctcggccagcgtgccgctttcctgctccagacggggcgttgtgcctacccgcggcgcatcctggcaatcagcttcaagcgcgatgccgccagcaacctgcgggaacgggtcgagaagcgctgcggccgggcgctcgcccgccagctcgattcctataccttcgacgcgttcgccaaacagcttctcgaccgcttctggcgcgcgcttcccaaccacctggcgctctccggtatgtacaagatcggccgcgcgcagccgccgcggcagggctacggacagtttcagttgtcggtcgtcgacgccttgaagactgcctccgggtctgtcggctgggcagcccagatgttgggggggcagcctcaggagcacgccgtccatgcggttggcttcgacgagtatagccggggcgtgcaggcgctttgtctcgagccgcttacagcctcatcaacggcagcttttctccaactcgtggcactgcgcgagggcctgatcgcaagcccgccttcgctgacgttcccacagatcggcatccttgcagcggctgcgatcacggccaatcccatgatccgcaccgcgctgcgcgcgacctacagccatgtctttctcgacgagttccaggataccacatcggttcaatatgccttggtggcggcgatgtttgagggttccgagacggtcttgaccgccgttggcgacacaaagcagcgtatcatgggctgggcgggcgcccgtcaggacgtgttcgaggcttttgagcaggacttccttagcgtcgcgtccgctcacgggcggctcagtctcaccaaaaactatcgaagcaacgagcgaatcgtcgcgatcctgaacatcctcaaagctcgcctggcgccggaggaaccggacttcgtggcggtgcgcaaggcacccgaccttcccgacgaggaaatctgttcggtgctcgtcgccgaccacgaaaacgctgaggccgaggccgtggcgaagctcgtggccgaggcgatcgccgacgggaccgatccacgagtgatcgggttgctcgtgcgtcaacgcgcacccgagtgggaggagcgcctgcgcgacgcctttgaccgcgagagcgtcacccttcgcaacgaggatcgggacgtcggcggcgccacgatacaggagctgatgaccgaagcgtattctcgcttcctgcttgatctcctggagttctgctcgcgcaaatatggtggcacgctctggagtgcggcgatggaccatttcgccgcagccgaggggatagagatcgacgacgacgagaccgctgagcgcgccttggccacccgagttgataagttccataccgagaaccggatcgatcctcgtgtcaagccggagcccgacgaggtacgcgcacgtattggagcgatcgaagagtgtgtcgggctggaccggctgcggagcctggcgcctcaatatgccaccggcgactttttcgaaagcatcaggaaggcgagcgcggacttcttgatcgaatgcgccgaggccacaacgtcgtggtccgatgcgatcgatcgatttcgtggcatcgggcaggttcccctcttgaccatcaccaagagcaagggcctcgaatatgaccttgtggtgctgcttgggctgaatgacgaccagtggtggagcttcgacaggaacaccgatgagggtcactccgtgttcttcgtcgccgcatcgcgggcacgggaacgacttctgatgacccgcacaagcagggaccggaaccgaaagatcgaggaaatcttcgatctgttacgcgcggcaaacgttcccgagcgccgcgtgtga

SEQ ID NO: 79136 - DNA, 2076 bp, Sphingomonas sp. Leaf62
atgcggatagtgagggccaggatcgagaacttccgacttctccgtaatgtagaatttgggttcgaggcacgcacgacgctgatcgtcgggcggaacaatagcgggaagacgtcaatcgcagagctgttccggcggatcttgtccggcggcagtctggcattacggcttgaggacttctcgctggggtgccacgagagcttttggcaggcgctgcaggcctaccgcgccgacccgcagtccgccgacgcttgggagcagctgccttcgatccggctggtcctcgacatcgagtacgacacggacgctctggatctcgggccgctgggcaactgcatcatcgacctcaacgacgactgccacgaggctcgcctggagtttcggttcggcccaaaggctacggcacccgagacgttttttgctgaccatttggtcccgctggaggatgcggcgaacgaccgctcccgtttcttccgggatctcggccaacggctccccaccgcctatgtgggaacgctggaggccgttgatccgaacgatgccaccaaccgcaagtcgctcgagaccaagttgcttactacgctggtcggggtgggctttatcaacgcccaacgcggtctcgacgacgacaccattcgtgagcgtgatgttttgggtaaggtcgtcgaggtgctgttccagtcggccctgactgatgacatcaatcccgaaagacggacgaccgcagagcagctcaaggaagtggtggaggcgatccaaggcgacgtacacaatagcttcaactcgggtctgacctcgctgctgccgacgttcgacctgttcggatatcccgggttgtcggatcccggactcgtgactgagacgagcttcgacgtaaacaagcttctcaaagaccacacgaaagtcaggtatcggggcgtcaacggtatgacgctccctgagacctacagcggtcttgggaccaggaacctcgtctacatgctcctgcagctgttgagcttctttcgagaatatcaggcaatgccgacctcatccggcgtccacctcatcttcatcgaggagccggaggcgcacctccaccctcagatgcaggaggttttcatccgtcagcttgagcgggtcacggccgcgttcgtggcgcagctgaacgccgaccaaccgtggccggtgcagttcgtcgtgacgacgcactccccacacatggcgaacgaagcaaggttcgagagtctccgctactttctctccgtcgccgatggcgagggagtgcgccgttcgctcgtcaaggatttgcgtcagggcatggcgggtgccgagccggcggtgcgcgaatttctccaccagtatcttacgctctcgcgttgtgacctgttcttcgccgataaggcgatcctgattgagggcacgtcggagcggctcctgcttccgtccatgatccgaaagactgacgagacggcggccgggcagccgcagctcagcagtcaatacctgacagtcatggaggtcggcggcgcgtacgcgcaccggttctacgatcttctcaatttcctcgagctgcgcacgctcgtcatcaccgacatcgactccgtggctcccaatgccaacaataagcgtgtcgcggtcttggtggcgcagggggccttcactagtaatgcgtgtatcaaggactggttcgcgcccgatgtctcgcctgcgcagcttctggcgaagacagctgacgagaagacaagcggcggcaggcggctggcctatcagatcccggaacaggatggcggcccctccgcccggagcttcgaggacgcgttcatcctcgcgaacccggatctgttcgaactcggcgggggggatcgagcggcgctcgcctacgagcatgcggccgagcagaaaaagtctagcttcgccctcgagcacgctatcgaaagcacagcttggagaacgcccagatatatcgccgagggtttgcggtggctcgccgcggggaatcccgctccggttcttccgcccgacgtggtggcggcggagctggtcgctgaggtgatcggcatagaagttgccgactacggacagccggcccatggctga

SEQ ID NO: 79137 - DNA, 1764 bp, Sphingomonas sp. Leaf62
atggctgatggggagagcccggctgacgctgccggccgcgccgcgttggagcaagtttttgcatgctttgacgaagggcgtagctttcgtctcgaggccggtgccggtgcgggcaagacctactcgctggagaaggccctccgccggctgctggcactgcgcggttccgagctcatgcgcaaccggcagcagatcggctgcattaccttcacgaacgtcgcgaaggacgagatcgcgtcccgcgtccaagcgcatcccgctgtgcggccggagacgatccacggcttctgctggtcgctgttgcaggactttcagccagagattcgcgcattagtaccgacgctcgaaggctgggccgaccggctcgccgaggcggatgtcgccgaaattggtgtccggaccatccaatacgaattcggctatcctagggtgaccgaagcggaattgacactgcggcacgaggacgtgctcacgctcatgaccgcactactcgcccggcccaagttccgggccgtgatgaccgcgcgctttccggttctccttatagatgagtatcaggatacggacgctggcttcgtgaacgctctgaagcagcacttcctcgacaccggaaccggcccggtcgtcggactcttcggtgaccactggcagaagatctatggcgacggatgcggagcggttgagcacgccgcgctccaagtcatagacaagaacgcgaacttccggtcggtagaacccatcgtttcggtgctaaaccgcatgaggcctgcgcttccgcagatcccgagcgacgccgacgcgccgggcgaggcgcggcttttccataccaacgcttggccggggcagcggcgcacgggtcaggggggcgggcactggactggagatacgagcgccgaggcggcccgcgcctacttcgaccatctcaagggcaggctcatcggcgaaggctgggattttgcggtcgagcggacgaagatcttgatgctcagccatagcgtcctcgcacgggagcagggctatccgacgatccagcagatctacggtcaattcaacgacccgtggctgaagaaggaagatccgcacatcaagttcctcgcggatcaggtggagcccgcatgcgccgccttccaagcgcagcgctacggcgagatgttcggatgcctcgacgctggtcacccaagcatccgccgtcataaagacaaggcggcgtggtcccaatctttccaagaactcatcgagctcaggcatagcgggaccattggacaggtgatcgacttcatgcgggcgcaggagcacatgcgcgttcccgaagcggttatcgatcgcgaaaatcggcttgctgcagtgggagatgttcctacggaaaacgagccgcgtagggtgacccagctacggaggctccgcgacgtttcctatgcggagctgatggcggtggatgccttcattgacggccacacgccgttcgcgacaaagcacggggttaagggagctgagttcgagaacgtcctcgttatcgtcggtcgcggttggaacaagtataacttcggtcaaatgttggaatggctagatcagggacctcctggagacaagacggcctcctttgagagcaatcgtaaccttttctacgtggcctgctcgcgtccgaagcggaggctggcgctcctgtttacgcaggtgctaagccaggctgccttggcaaaggttcttgacttgttcggtacggaaaatgttatcgctctgcccgctgacccatccgtcgcgtga

SEQ ID NO: 79138 - DNA, 1941 bp, Curtobacterium sp. Leaf261
atgcagatcacccaccttcgaatctccggcttccagtcgtttggcccggacaggaaggagatcgcgctgcgggacgtcacctacgtcctgggccccaatggttctggcaagacggccgtgctcgaggcgctctcgcggctcttcagcccgctgccggtgcagcgccgagttcgtcactcggacttccatatcccgaaccgacagacggcagccgaggtgcaggccgctggacccgtgatgtggatcgaggtggatatcgagtttccagagtcgggtgcttcaggcgaccacgcctcgataccgcccaactttgcgcacatgcgcatagccacagaggacggcatcccgcgcatccgcgtgcgcctcaccgccaccatcgctgccgacaacgtgatcgaggagaagctcgagtacatcctcgaagcggatgcggaaggcgagccgctgcagcgagctgacatgtcgcgcttcgatcgcgccaatgtcgaggtgcactacttgcctgcgcgccgcgatccggccgagcacatttcttacacgaccgcatcgctcgtcgggcgggcgcttcgtgccgcagactggacgaccgagcgtaggacgctcgaaatgctttcgaagaacctcaccgaggcacttgccgacaacgacgccgtcaagagcatcggcgttcagctcgcgggggaatggaaggggcttcactcaggctccttcttcaccgacccctccatcgcgttcggcagcggcgatctcgagagcgtgctccgccagctcactatctcgttcgcaccgtccccagctgactcctcgcttccgttcgaacgactcagtgacgggcagaagtcgctgctctacatctctttggtcctggcctggcaagctctcgcgcgggaagtgcttggtggcacagagacctcgttcgatcagcaccgcctgcgccctccggtgcacaccgtcatcgcgctcgaggagccggagaacagcctggctccgcagtaccttggccgcatcatccggcagctccgaaaggctgcggagcctggcgactcgcagtctctcatcgcgacacactcgcctgccctactccgccgggtcgatccagagtcaatctgcttcctgcgcctcgacagcagccgccagtcccaggttcggcgcatcctcctgccaacgacgagcgacgagacggcgaagtacgtgcgcgaagccgtgctcgcattcccggagctctacttctcgcgcttggtcgttttcggcgagggagacagcgagcagatcgtgctgccacgtgtcctcgcggcggccggcattgccgaggatgacgcctcggtgtcagtggttccgcttggtgggcgtcacgtcaatcacttctggcgcctcttgaaggagcttgagatcccgcacgtcacgctcctcgacctggactcaggacggcaccagggcggttggggtcgcgttcggaacgcgctgaagcagttcaataagctgaatccggacacctttgctactgcgctcatcgatggtctcccgaagtggaacgacaccatcgacttcccggaactcgtagatccgacgatcgttggcggcgtgggtcctgttaacgccctcgaggctaagggcgtttacttctcccaccccgtcgaccttgacctcatgatgctcgaggcgttccccgacgcctacggagtcgaatcggtcggtacgccggacgaccagaccatcgccgcggtgctcggcaagtctcacgcgagcgaggatcgcctcccaacacacaccctcgagctcttcgatgactatcaccggctgttcgatctgaagagcaagcccgcgtcgcaccttcgcgcgatggcggcgctgaccgacgaggagctactcgaagaccttccggaggtactcgagcggctcgttattgacgtgcgcgcaaagcttggggcgcttcccgagtga

SEQ ID NO: 79139 - DNA, 1656 bp, Curtobacterium sp. Leaf261
gtgatccatcccgatgactggcatcccgtcggcggactggacctcgaaccgaacgcactgaaggccgtgcgcgaaaccggcgcgaacctcgttgtcaccgccggccctggtgcgggcaagaccgagctgctggcgcagcgcgcagacttcctcttccgaacaggcgcgagtccctatcccaagcggatcctcgcaatatcattcaaggtcgatgcggcacgcaacctacagtctcgcgttcgtctgcgatccgggtcgcagtacgcggctcggttcgacagcttcaccttccacgccttcgccaagcgactagtcgataactttcgtccggtgcttaccggccagaatgccctcaagccaatgtaccggctcgacgcgagcactcggattcagaatgagcagatcaccttcgacgaccttgtgccgctcgccctcgagatcctcgagaagaacgagtacgcacgtggcgcgcttcggcagacctacagccacgtcttcatggatgagttccaggacgccacgaccgcgcagtacgccttcctgaagaaggcgttcgaaggaaccggcgtacatctcatcggcgtcggcgacaccaagcagcgcatcatgcgcttcgcaggcgcgctcgaaggagtcatggcaacgttcgctacagacttcagcgcgatcgacctccagctctatcaaaacttccggtcgaagccacgcctgcgccggatgcagaatcgcatgattctcgagatggacccgggcgccgcgagtcccgacgctgacctcgttggggaagagggcgaagttcaagtgctgcgcttcgacaacaacgaggacgaagcggccgcagttacggcgatgatcaaaggatggctcgaggccggtgtgccaccgcgggagatcgccgtgctggcgcggcagcagccccacctcatcacgagcgtccttagcgagcatctcagcaccgccggcatcccgtatcgcaacgagcagcagtcgcaagacctgacaacggagcccgtcgcggcactgatcttcaactaccttcgcgtcgttgcggacgacgggcgaccagcggcctacaccgaactcgtgcgcgtcgtaacccacggcggaatcgaagaggtggacggggtactggacagcacgctccgcgcgctccttcgcgacgcccgccttaccgtgcgcgcagcaggcttcgacgccgccaagttctcgtcatggaccccactcatcacttcgttcctgaagttcgtgactcgcccatcgctcaatgcgctgtctccgtcgtatcaacagggggaccggctgaacgacgtgatcaaggaggccgccggcgctttcaagcgcgagctaacgttcgacggcgatccgattgcggcactcgaccggctatcagaagaggacagcatccggatcctgacggtgtacaagtgcaaggggttggagttcgagaaggtcgtcgtcttcggagtcgagcctcagttcttctggggcgatgacaacgacgtgaagtcggaattcttcgtcgcaatctcgcgagccaaggacgaactggtgctcaccacggctcgtcgccgtacgaagccttacggcgcgaacgcctactggcgtgaggactcgcctccgtacaacgcgctattgaagtatgccgatgagtcctga

SEQ ID NO: 79140 - DNA, 2004 bp, Sphingomonas sp. Leaf30
atgcatcttcaaagtgtcaggttgggtaatttccgatcgttcgatgaagcgcggctcgaactgcagagcgacctgaccgtccttgtcggcgagaacaacggcggcaagagcaatgcgatcgatgcgatacggctgttgaccgctccgctgagcgggcgacgggagatctactgcgagccgaccgacgtgcgattccaaagcgggtctgcccggttcgagcttgaggcgcacttcgccgaactctccaccggacagcagggacgactgatctcggccgcaaccgacgcaagtctgacgaacgcctgctttggtctacggtatgatgcgacggcacctaatgcacggccgcacctgtgggcgggcagggatggcaacgtcgccgagccgaactgccacgacatggtcaggcacgtctatcttcccacgctccgcgacgcgaagaggtcgctcgcttctggaaacccgacgcgcatcatggcgctgctcaatcatttcctcgaaggcacgagcgccgcggatttggcgaaggagcttgctcggcagaaccggcacaatgttctgacgaaggtcgacgatgccgtcggaaagggcttggcggccttgactggaggggtgcggcgtcaggccgcaacgctgggcttcgcttcggacgaggcattgatcgacatagctcgtgacctccgcttcaagctggccgatcacggtatcgatcccgaggacctccgctattccgggcacggctatgcgaacctgctcttcatggcgataatcgcggtcgaactggagaaggtcagaaacaccgatctgacgctcttccttgtcgaggagccggaggcgcatctccacccccaactgcaggccgctgtgctgtcattcctgcgcgaacaggccgaacagtcccggaaggatgcacccgccgaccacgggccggcgggcgagcttcaggtcgttgtcgccacgcattcgccgaacctgtccgcatgggtgagcagcgaccgcctggtcgtctttaagtccgtgatcgcctcggccgatgttggcggcagggatgatcatccggagtccgcctcccttgacgccagcctgatcgaagaggtgctgactccggagtcgaagcctcgaaatgatgctgctgcggcggagtccatcgctgaggccatctccatgcgatcgccgcgccgatctacgcgatgcctaccgctcgccaagctgccgctggaacctttggatcgccggaaggtcgatcgatacctcgatgtgacgaaggcggcgcttctcttcggtgggcgtgcgttgctggtcgagggcatcgcggaggcactgctgcttcccgccatcgccaagtaccacgttctgcgggatcagccggagaaactccgactgttcaggtcggccgtattcatcccgatcgatggcgtagacttcgcgccctacgtttccctgcttctgacggagctcgacgggacccgcatcgcagatcgcgtcgtcgtcatgacggacggtgataagggcacgaaatcgaaggaagatgaagaggacgtcgacctcgagtatgcagccgaactcgacgagacgtcgcctaatggggcggacgtgccgcgaggcgaggacccgacggaaaatgaagaggaggaggaaggcgagaagctaatccctggcgaacggcgtaagcgctcgctggaccggttggtcggaggaatgggcgcatcggaccagttcgcggctgtcaccagcacctattcgctcgaatctgagctggtggaggccgggaacgccgatctgctcgaaaaggtcttcctggagctgcacaagcggtcgaggacgaagtggcgtaacgccatgaagaaggagggcgacgagcgcgcccaggcgatccacaagatattcaagaacgcgcgcaagggagattttgcgcagatccttgcacgccggatcgaggatggtgagaaattaaaggtgcccgcctacatcaaggacgcgatcgaccagctggtcatcacgtga

SEQ ID NO: 79141 - DNA, 1725 bp, Sphingomonas sp. Leaf30
gtgactgtcacctacaggcccacgctggagcaggacgcggtcatctggcacgacggctgcgcgttcgtcaccgcctgcccgggggcggggaagaccaggaccatggttgaacgagcgcgtcgcctattgagcgatcgcagcgatcgacggggcgtggcgttcctgtcctttaccaacacggccgtcgacgagctggaggcgcgcctacggagcttcggcgtgcttccttcgccaatttttcccagcttcatcggcaccttcgatcgcttcctgtggcaattcttcgtggctccgttcgggatcgatgggtgtgacacgaccccgcgtctcataccggacaagccggattggccggtgcagccgcatgagacgatgcaggccatgccgctgcgggcgttcgaccgaacgacgggcgtgttggacagagcgatcgcgaccgaactccggttcaaccgggatccaggcagacatcaggcccgcgcgctgaggatgctggcggcagcccgaacgaagggacatgtcgatttcgaggacgtgcgcgagtgcgtgcgtggtcggctcgccgacaagccgttcgcggcgaggctgggaaaggcgctggcagcgcgcttccgcgagatcatcgtcgacgaggcgcaggactgcaatccggccgacctcgacgtggtccagtggctccgggactccgggatcaccgttaaggtcatctgcgaccccaatcagtcgatctacaagttcaggggcggcgtgacggacgaactcgacaggttcgccgagcggttcgaggagtccgagcgcctcccgatgagcggaaacttccgatcgacgccagccatctgttcggcgatcgtcgcgctgaggcccccggccgcacgcggtgccgtcgatcaggctttgggaccgctgaaggacgaactgaatcccgtccacatcctgtcatatggcggcacgtcggttccgaagacgataggagcgaaattcggagagatcgcgggttcgctcggcatccagaacgcggatgcgccaatcctggcgtcgcgccttcctacggctggcaaagcgattggccatcccgcgcccaaggaatcgctccacatgacgctggtgctcgcgcgtgcggtcaccgatttccatttctccttcggtcttggaaaccgccgtgaggcgctcgtcgccctccaccgcgcggtcctgcaggtccaaggccacattcattcgcctggtgaataccatgcccacgttgccggcgcgaatgccgaggacgggaagtggcgtcctggaatcatcgagatcgcttcgaagttgaagttcgaccccggcgacacggcggagggatggctggcgaaggcgcaggccctgctcggtcccggcctcgtcgcgtctggaagcatcggtcagcgcatgagaaagagccctgatctgccagcggccctggcaagtgcaccgttgcaaacacaccctgcacgcacgatccactcggcgaagggcttggagttcgcggccgtctgcgtggtgatgacgagcaagaagactggcaaggtcatcgatcaccttcagacaggagggggcaatgccgacgatgccgaggacgcccgcaagatctacgttgctgcatctcgcgcgaagcggctgcttgtcctcgcggtcccgaggaattcagcagccagactggaggcacttctggcctccaccggctgcacgacgcagcggcacgacgtcgtttga

SEQ ID NO: 79142 - DNA, 2064 bp, Serratia sp. Leaf51
atgctagttaaaaatattgaaatagaaaatttccggcttctaaaaaatgtatctcttgggcttgaagaaaaaattacactaatcgtcggtcgtaataacagtggtaaaacttcaattgctgaattatttcgtagacttttgtctgataaaggcccttcgttcaggcttgaagatttttcgcttggaagtcatgagggcttttggtctgcatttgaggcactgcgagcaggagaatcacgtgaggatatttatcatcatttgccgtcaattataattaagcttgatgtggagtatgatgttgagtccccggacttagggccaataagtgactgcataatcgaccttaaccctgattgtaactttgtacgcatggttctcacttttggacctaactcggtagccactgaatcactttttgctgacattactgtacttcctgagggaatgaatattgagcgttcagctctattccgcgcagttgagacgcgtttacctcagtcgtatgaatgcaaacttgaggctgttgatccaaatgattcaaccaaccgtaaaaatcttgacctaaaaacgattaaaattttgattaatggtggatttattaatgctcagcgtggtctggatgatgatactcaccgtgagcgcgatgtactaggaaagattattgaagttctttttcaatcagctttaactgatccgattgatagtaataaacgtacaactgcggcacagctcaaaatggctgttgagcagattcagacagagcttcatgttggtttcaatgaaaaactgacctccctattacccacatttgatttattcggatatcctggcttagctgatcctgggcttgtaactgagaccagctttgatgtcgataagttgcttaataatcacacgaaagtccgctatgtcggtgttaatgggattactctgcctgagacttataatgggctcggaatgcgtaatctagtttatattttgctccaactcctgcgttttttccgtgaatatcaggcaactccaaccgctgcgggagtgcatctcatctttattgaggagcctgaagcccatatgcatccacagatgcaagaagtctttattcgccaactgagtaaaataacaaaagctttcgaaacacagctcaatgagaacagaccctggccggttcagtttgtcattagcacccattcgccacatatggcgaatgaagcacgatttgagtcaatgcgatattttcttactcgggaaggcaatgatggtttccgacagtcggtagtcaaagatctgcgtaaggggatgggggatgcacctgttcctgaacgtgattttttatatcaatatttgactttgactagatgcgacttgttctttgcagataaagccgtcttgattgagggcacttctgaacgactgcttttacctgcgatgattcgtaaaactgatgctgcagctccaggtgaaccacaacttggtagccagtatctgacagtgatggaagttggaggggcttacgcacacagattttttgacctcttgtcttttctcgaattacgcacgctgataattaccgatattgattcggtgaagcgtaatgcaaacaataaacgcgttgcaacacctgttgcaaatggtgaattcacgagtaacggctgcatcaaagcttggttcgccaataatgatattacacctacccaattattaactcagtctcatgcgaataagattgttgatagccgtcgccttgcatatcagatacctgaaatggatggtggggcatgtgcgcgcagcttcgaagatgcttttatcttagctaatttcgaaagcttcggccttggtgaaggtgatcgtgcaacacttgcttatgaccatgctgctgaccaaaaaaaatcaacttttgcattgacctatgcaattgaaaacaccacatggaatgtgccgcgttatatttcagaaggtttaagatggcttgctgaaggcaatccagtcgtagtgataccacaagttacaccatcagatattgtcgctgctgtagctgggattgagatgagtggcgagggggcttaa

SEQ ID NO: 79143 - DNA, 1764 bp, Serratia sp. Leaf51
atgactactgaaattcatgaaagcccagcagatactgcgggacggttagcattagaacgcatgtttgattgccttgaacaagatcgaagttttcgtcttgaggctggtgcaggtgcaggcaagacattctctttggaaaaagccctccgttggctaatcgataaacgcggtggcgagttgattcgtaagcgtcaacaagttggctgcattacctacactaatgttgctaaagacgaaattatctcgcgaattaaatcgcacccagcagtatgcccagagaccgtacatggattttgctggtcaatcttgaaagattttcaggcaatgttgcgtgagtttgttcctcttctccctggttgggctgaacgccttgagcaagtaaatggcataggtgttcggcgagttcattatgaattgggatatccgagtgtggctgaccatcaggtctcgatccgccatgaagatgtgttggctttaatgattaaagcaatggatttaccaaaattccgtactgttctttgtgctcgttacccaattttattgatcgacgaataccaagatactgatgctgcgtttattactgcgttgaaagattggtttctggatcgccgagaagggcctgtcattggcctttttggtgatcattggcagaaaatttatggagaaggttgtggtttagtcgagcatgcttctcttgtaataattgataaaaatgccaattttcgatcggttgatccgattgtgcgtgtgttaaatcgcatgcgtccagctttacctcagatggttagtgatcctgacgcgcctggcgaggcccgtgtattccatactaatcagtgggtaggtcagcggcgtactgggagaggcggtggtcactggacaggcgatacgactcccgaagcagctaaagcgtactttaactacgttaaatctcatctcatttctgatggctgggccttttcgatcgaacatactaaaattctcatgcttagccacagtgtgctggcccgcgaacaaggttatgcctctattccaactatttacggtcaatacaacgatccatggctcaagaaggaagatccacatattaagtttttgaccgatcagctcgagcctgcctgctcggcttttattgatcgccgctatagtgacatgtttgagtcttttgggaccagcatgccccatattcgcaggcatcaagacaagatcgcttggactgaatccatgaattctttaattgagctcaggttgagaggatcaattggtgaggttgtggactttattgcggcacagccacacatgcggttacctcgagcagttgaagaacgtgagcttaagctggcggagatcggtgccgaaccggtagatgaagaaccccgccgcgtgacgcaattacgcaaattgcggaatgtttcctataccgaaattattgcgctggactgctttattgatggcaattccccattcgcaactaagcatggtgtaaagggcgcggagtttgaaaacgtgctcgtcattgttgggcgtggctggaataaatacaacttcgtacaaatgttagaatggattgatgcagggccaccggcggaaaaggtcgagttttttgagaacaaccgtaatcttttttatgtagcttgctcgcgccccaaaagacgtcttgcggttctatttactcaagagctaactgccaacgctacggttaagctgacagaatggtttggtagagaaaacattgtggcgcttcccgctaatccagagttgcattag

SEQ ID NO: 79144 - DNA, 2112 bp, Erwinia sp. Leaf53
atgtacgtaagcagtttaaaaataaacaattacaggaaatttggtcgcaatgataatacgattggcttcgtggaagcaaagagtaataacgctaaacacaacatcgttgcatcctctacaacgcttgtaattgggaaaaataactcagggaaaaccacagtaactaaagctctggaattaatggtttcagattcggaggttataaatggtcatgattttaactataactacgcaaagaagatattaagccgacacttctctgggaattatgatgaaacaccaaaactcaagtttgaaattgaaataatcttcgataatagtgaaggtgatttcactggagtcttgggcgctttcgttgacataaaaaccgcattaatgaatgaaaacaaaaaagcgaaagtaacagtagaatacaaaatcaaagacatgtcgtcatatcacgaaaaggtagaggaattgatatcatcgagaaaaggcgaagactctgatgaccatataacctttagaagatacttagaaatcatttcagcacttaaattcaaaagagtaatcacaaacaatgttggaagagttgtagataaagttctccccaaaaatttaattgacttgcgggtaatttcttctgcaaagaatattcatgataaaaaattattaacgagatctttcaataaaatcataaagtttatgtacgaaaataatgacgtggattataaaaatattttaggattggttggaagtaataatgaaagcttaaccttaagcataaaaaacaaacatcaaactggagttcaatcagttttgagtaagatcatctctgataagaagataggattggatcttcgttcagacttaacttttgaaaaactaatgtctgacctggttatttatgagcataaagatggtgctcatatggttcctgaaggtcagtttggattaggatatgcaagtctaattagcattttaggtgaaataatagactatgcaaaccaaggattgaacaaaataaaacaaagtagaattaggatattatgtattgaagagcctgaagtattcatgcatccacaaatgcaaataaattttgtaaggcatattcaagaagctcttttagcgatctttgaacttgcagaaaaaagtatagactccataaaaacccaactacttgttactacgcactcgtcacacatattaaacagtataatacatggaagcggtactttggatgatataaattatatccatctaaaaaatggtgatgctgcaagcttacttctaaaagatgatgaaataagcgacactcctatagaaaaggaacaattcacctttattaaaaaacatattaaacatcaagtccctgagttgtttttttcagatgcaattattctagttgaaggtattacggaagagcgagttttaaattattacatagagtcaaatacaattctcagcagaatgcacatatcagtatttagaatagatggtgcacatggaaaagtttacgctagcttaacctccaaattactaataccaacattaatcatcactgatatcgattattgtaaagataaaagctctattattgaaaaccccttagtcgattcaggtgataatgatgaatctaatcaaattagtgaaataaaagaagggacaattactaccaatgcaactctcaagcatttttttaattctgatataatttcaaattatcatggctattatcaaaataacaatgtgatggtggtttttcaaaaggatagtgtaagcatccgtggaggaagtgatcctatttcttactatgctacgagtttcgaagaagctgttattttagaaaactataacaatcatctactgcacgaagtccttaactctgtattagggaagtcttttcgtgatattttaaataattccacggatggagtagtgttagcacataattccagcaaaatacaaaatcttttagctaaaaagaaaagtgatttttcaaatctaatgatttatttacttgtcactaaaaatactgacaagccagaattaccagcttatattaaagcgggcttgaattggttggctaaagagttaaacaatagtggggctgatgatgtctttttaccttga

SEQ ID NO: 79145 - DNA, 1872 bp, Erwinia sp. Leaf53
atggggcaaactgttctatgtataacatatacaaacaatgccgctaacgagattagaaaacgggttggtgatgacaatctcacttccatttcgacgatacactctttcatttgggagaccgtaaatgttcacatggatgaaatgattgaagaacatgttatatatttgaatgaagaaattacaagaataaataatgatatatatgtgtatgagtctgataaaaaagccattgctaatattcgtgacataggaaaggataatatcagcaaggtggttgaaaaaatcgcactaaagcagaatgatttttatgatgcatgtaatcttggtgccaaggatttttgggattatttggcgagagagtttggtgatgagttttcatttaaaataaaatcaaatgctcagcacgtgactcacgcattaaaaaatttagttagagctaagaaatacaaaatttgcatcgataaaatactgtcaaaagcagaaggctttgatagtctaaaatacttcagctccaaaaacatcgagtcacttaataataatattattggtcatgatactttgttgaaatattcttcgagaatgttttgcaaatatcctgcacttacgagaaaagtgattgatgctcatcctatagtttttgtcgatgaatttcaggattctgaagactcagttcttaatatttttctaggtttgctcgaatactctcagggaaaaaaaattgatttttgtttgggtttttttggtgatcctgttcaagccatatacaataataaaatgcacgctatgaacaaaaaaatggctattgtaggaaaaaatataaatagaagatctcatcagaccattgtcaactgcatcaataaaattagaggtagtcgtgatcttattcagcagaaccctattaatatttatagtggtaaatgcgatctttctttcgaggtgagaagcaaatctgaatacagccattcatccataatgcttgagattgataaatacaagaaaaaatggggaatagactccaataacaaactaacatgtttggtccttaagaataatatgctttctgagctatgtggctttggtgatcttttcctgcttatcaatgacatctataacattgagttttcaaagggatttgaaaaagtaagctcggaatttcttttctcagaagaaagaaatgctggacggcttcctatactcctctacgaaataatcctcccattgtatttaattaaaaataaagaagagttgtcgcttgcagatgtttttggcggaaattttcataactcatgtagtctaaatgatttaattgaaagtgtgcgttttttttatgatcttggttttataaccttgtatgattacatttgtgatgccttagataaaaaggatgagtgtgaaaacctgaataataagtccattaaaataattgaatctgtaattccattcgatacacaagttattgaacacctcataagtgatatttacaataaatgtaaatttaaaaaagacgaaaaaacaaaaaaattaattagaaaagttctactaacagatatacaccagttttatcgctggttagactttttgtttcaatcaatctcaaaaaatgacacagattatttgacctgccactcgtctaaagggcttgagtttgataatgttatagttttcctagatgattcttttaatagaaatgaaacatacatctccgcattccttcaagcagatattaatgagattttagatgatcctttagaatcggcacgaagaatagtttatgtttcatgctctcgtgcaataaaaaatttacgagtgtgtttatacactgccacaggtgaaaatatcgaatcaaccaaaggaatttttaactctatttaa

SEQ ID NO: 79146 - DNA, 1944 bp, Flavobacterium sp. Leaf82
atgtatctaaaaaatattaaaatatggaactttcgcaaaataggaaccaaggataattcgaatgaaattagaaccgacaatcctggcattgatatttccttcaattcttttttgaatgttcttataggagaaaataattctggtaaaacagctattattgatgctattagaatgatactgggtagccatacttttgattttcataggttggatgaaagggatttccatcattataaaacaggaagaagtagagaacttcgaatagagtgccttctttcaggtttttcaaatcaagaagcaggtttttttctggaatggttacatttcaatgaatttaaacaatatgaattgcgtatatggctatatgcttacactcgtgatcacagagtcatttataatgttaaagcaggtatagatgatgatggtgcatttatggatggtgcagcaaaagatatgttgcgcctgacttaccttaaaccgcttcgggatgcagaaacagagttatctccaggttataaatcaagattagctcaaattctatcaaatgatcctttatttaaagatcaattcgatgatgatcaaaaaaaagtaaaacatactttagaaaagtatgtttctaaagcaaataatttaataacaggatatttttcacatgattctttagatgaagatttagaatatgaaatatctaaagaaacgcctgcgggagggcctataaaaagtaaagtggaaaatcacttaaaggatttttttcatattgatgacattcaaaatcctttctttcatatttcgggttctgaactggccagtattctaaaaaaattaggactttcacttgaagaaaataagtctggacttggcgcgctaaacaaattatttatcgctaccgaattactactcttgcaggggaaaaattatagcgggcttagactcgctttagttgaagaactggaagcacacctacatcctcaggctcaattaagagttataagtgctttacaaaacaaacagcaagaattcgataatcagtttattctttctacacacagtacaacactggcatcaaaattacatcttaaaaattttatattatgccaagatggccaggcatattctttagcggcaggtcatacaggattagaagaggatgattacgagtttttggaaagatttcttgatgctacccagtccaatatgttttttgcaaaaggggttattttagtagaaggtactgctgaaaatatactgatcccaacgatagctgaaattattgggagacctcttcatagatatggggtttctgttgtaaatgttggaagcaaggcttttcttagatatgctaaaatatttaaaaggtttgatcaaagtacacttcctataaaggtttccattattactgatttagatattgaacaaaccgatacaggtgctacaattcagtccaaaaaacgtactgtaactaaacttgttcctgatgccaaaatcgagtcggacaatttaatcaaagattataattctgctgatggacggatacaagttttccattcttcgctttggactatggaacatgatcttgctttaggtgaatttgcagaatttataaactgtgctacctatttagcacaattgtctaaatcacgaactaacaaccataattttaaaggcattacttccacagaagcaattaaaagaataaagaaggctaaagaaatttacagtaaatggaaagaagactccttaagtaaggagcaaattgcttataaaatttatgaaagactttctgctaacaaggcttctaaaacagttactgcccaatggttgtcaaaaatgctattaagatacaaatcaaaaatacagccgggaattaaggctgatgaaagattcaaatatatcgttgacgcaatttatcatgtaacaaaatcagaagatgcagatcactcataa

SEQ ID NO: 79147 - DNA, 1959 bp, Flavobacterium sp. Leaf82
atgcagatcactcataaagatatcacgagggtagaaaaaattttctttggagacaatggtacatttgaagatgataaaaacgaacgatacaactttatatcctgtatagacaggtcaattgatgtagaagcatgtccaggaagcggtaaaactactagcctccttgcaaaattataccttctttctgaaaaaatgccctttgagaatggtaaaggtctatgtgtacttacacatacaaatgttggtattaatgaaattaaaaataatcttggacatagggctgaaaagctatttcaataccctaatttttttggcactatacagtcatttattgataagtttttagcaataccatactacagtaacaaaaaccatgagcgaattgctgtgatagactctgaccgtgcatttaatcgtttattcacatcgtttgccaaaggcgtttcacgagacgatttaaaaatggcaaaagaatttcttcacgctaatggggatatagccttcaaactcacttataaacaagttgaagaacaagtttacgatctcgtcaaaggtgttgatggtaaaaagattgaaccgaaaaaacctcagagaagcaaaggaaaaaatgcaggttggtctaacgaggaaaaaatccgagtatataactctctaaataaacttaaagctagtattctaaaaagcggtgttctttcttatgatgatgcatatttttatgccaaagaatatctgctggcatatcctgaaataaaaaatgccttttctagcagattttctcatgtttttgttgatgaaatgcaggatacatataaccaccaagatgctatcattaaattattatttgatgataatgtaattattcagcgcattggagataccaaccaggcaattctaaatgataatgacggaataagtgcttgggaagattccgaaagaatgagcattacagaatccagaaggttttcacagcctatagctaatatattaaaaacggtggcccttaaaagtaatcccgatttaaaaggacgtaatgaatttgatattcctacatacataattaaatacaagagtaaagaagaaaatcaggtaattgaaaaatttgctgcattactgcccgtgcacgatttagccgaaaataagcaatataaatatcctgtaaaagctgttggctgggttggcaaagataaagatggattaaccattaaaagttatttcccttcttttaataagaaaatttcaaataaaaacccttcattcaaatcgttgctggctgcaataacatatagcaatatttcagagccaaaagaatttttcaatactgtgattgattgtcttgtagagattcttcgaagatcagaaatcaaaaatagtacgatcaaaggtgaacgatattatagtagaacctctctcattaattttctaaaacaacagtttcctgagcagtttattgccctgtcttcaaagatttctgcatgggccagtcaaagtttttctggtaacaatccaactgaagaaataaaaaactttacaaaagatattttatttcctgctttggacattgctttgaaagactattcattaaagtttatagattctaatgatgctgaagatattagtgcccaaacgctgcaactaaagaatattttttattccagtgcgactcatttaaatcatgttcctatagaagtggcaacggtacacagtgtaaaaggcgaaacacatagagctacattatatctagaaacatctttccacaaaccctgtggagaatatttgatagagcaacttaagggtacagcctatgttaaaagaaagggagcatcgagaaaagaaatgtgtcttaaagttgcccatgtaggcatgtcccgacctactcatctcctttgcgtagctttaaatgaaacattagtagaggaaaatagtaagctccttgaagataatggttggaaaataatttaa

SEQ ID NO: 79148 - DNA, 1815 bp, Methylobacterium sp. Leaf100
ttgaaaatttacgccgttgcaatcgagaacttcagaggcatcaaatcaaccaaactgttcctgcccgatcacgccgtcctcatcggcgacaacaacactgggaagtccactgttctcgaagccatagatcttgcgcttgggccggatcgactgagccgtcggcctcctgtcgacgagcacgatttctatgatggcaaatatcggcccgcggctccggccctagccgaagtgggtgaagcgccagcagggccgccgacagtgccccagatcaccgtcgaggtcacgattgtcggactatctgaggagcaggaagcccggtttggcggcaatattgagtggcttaacgtagagactggagatttcttcacggaagcaaatcccgctggcgtggatgcggcgaacatcaaggcagcgttgcgcgtcacgttcatcggcgcatatgacagcgaagaggacgatttcgttggcaatacttattacacgcgcagcctgacagaggaagagactccggtgcccttctccaagaaggacaaacagcactgcggcttcctgttcctgcggtcgttgcgcacgggctcgcgtgcgctcagcctggagcatggcagcctactcgatatcatcctgcggctgaaggaaatccggccgcagatgtgggaaggcacgatcggcacgctcgccggattcgatgtcgcgagcgatcccgcaatcggcatttcgggcgtgcttgagagcatggacaagtcgctaaaaaaatatgtgccgcgggaatggggcgtgaagccgcatctcaaggtttcaaacctcacgcgcgaacatctccgcaaagtcgtgactgccttcatcgctactggagatggcgcacatgccgcacccttcttccggcagggcaccggcacgatcaacatgctggtgctggcgatgctgtcgcagatcgccgaggacaagcagaacgtcatcttcgcgatggaggaggtcgagaccgcgatcccgccctatgctcagaagcggatcgttcacgagctgcgcaagctggctgcccaatcgatcgtcacctcgcactcgccctatgttcttgaggagttcaagctcgacgagaccgtgatcctgtcgcgggcgaatgatggcgttctcaagcaggcgcagatcgcgctgcccgacagcgtgaagcacaagcgctatcgccaggagtttcggacgcggttttgcgagggcctgctatctcggcgcgtgctcgtcgccgaaggcgcgaccgaggcgagctcctttccggttgcggcccgccggctctctgaactgaaccccggtgtctacgcttcgctcgaagcgctcggcatctgcatcatcgatgcgggcactgagtcgcagatcgccgatctcgccgggctctacaatggtctcggcaagcggacgttcgcactttgcgataagcaaaccgatcccgcgaaggctgcaataaaagcccaggtcgagcacttgttcatgcacgaggaaaagggcatcgaggatttaattcttaaaaacacgaccgatgccgctcttacgcgtttttccgatgcgctggattggccgccgcacctgctgcaaaagtttcccgacccggcgaccaatttgaccgccgcgttgaaggagtatttcgggtgggcgaagggcaattgggggatcgcggatttcctcggccaatgttccgaggctgagatgccggcgtggattcgtgaggcctgcgtgaccctaaaggcactctgtgatccgccgcccgcgttaccggcgcgtccggaggagaatggcgaggacgcagccatcgagcccggcgcgtag

SEQ ID NO: 79149 - DNA, 1824 bp, Methylobacterium sp. Leaf100
atggtcgacctcactcacgcgcagaaggatgttcttagggtcgatgggcaccagcttgtcgtgggaggccctgggtccggcaagaccaccgtgtccattttgaaggccgcgaagatcgcccgcgagaagctccggccagggcagcgaatcctgttcttgagtttcgcgcgcgcgacggtctcgcgtgtcttccaggcgatcgacgaagagcaatccgtcacggaagaggagaagaagcggatcgaggtcgacacgtatcactccttcttctggcggattctcaagacgcacggatatctggttggatttccgcgccagatggagattctaacgccaccgaatgagtctatcgcgttgtcagcgatccgcagcgccttcaaggcgccgtccaagctctcggacgtggagaaggcgcagaaggctgccctggaaactgccgagcggatgcggctggcgaccgaagaaggcaaaatctgtttcgatctcttcgcggagcgcgcggccgtcctattacatgattccgccaagatccgcggcctcgtgtcgaccatgtatccgttcatcatcctcgacgagtttcaggataccaccgctcagcagtggcgcgtagttgaggcgagcgggaagaccagcacgctgatcgctctggccgatccggagcagaggattttcgatttcatcggtgccgaccccgagcgccttgaccatttcagggaggctttcaagccgtcagagcacgatttggccggggacaaccatcgcagtaaggggacggatattgcgctgtttggcaaccacctcctgaccggcgattatagacaagaagcgtatcagggcatcgactactatggatttgcttcgaatcccaatcaggcattctcctcgctggtcgctcaagttctgaaggcgcgtaagcggctcgtcgcgacgggccgccgggattggtcacttgcgattctggtgccgacgaagcgcatgacccggttggtctccgacaatctgcgcgagccgttcggcaacgtgcctccaatcgcgcacacggcggccgtcgacatggaaggcccaattttggccgctgagctgatcgccttcctcctccagcagcgaagtcactccggccgctttgacgaattcgtcgatctgctttgcagctatttcagcggccgaggtggccaggcaccgaccaagggcgacctgatggaagcagcgcgtttccgcttggcgctagagaagtggaatgaccgtctcgcgaagggaaaggccgttccggcgaacagcgtcttgcaagccacattcgcggtccacgaggctgcagcggctgttgcgctgacagggcagcccgacggcgactggaccgtcattcggacggtgcttgaggctggggcctgcacccggctcactgaggttgcgaaggacgcgcgcaacgtccggctcctcgaacgcggaacgcagctccggcaaagcctgtcgcaggactggcgtgataccggcggatacaagaacgcgctggctgttactcgccaggcgttcgtgaaggagcatttcgcgatcgctcataagccggagactggtgtgatcgtgatgaacatgcacaaggctaagggaaagcagtttgatgaggtgatcattttcgaagggtggccgacgcgctacaagggtgagatagtcagcaaccccggtcgcattgtaagtggaaatttccgcgcaggggcgatgacgcaagcgcgccagaattttcgcgtgagtgtgacacgtgcgaaaacgcgaacgacgatcatgtcgcccaacgacgacgtgtgtgtgctcctgctcccggccaagtga

SEQ ID NO: 79150 - DNA, 1725 bp, Acinetobacter sp. Leaf130
atgttcaataaattaacaattaagaattttaggaactttcataacatagaaatagaattaactaacaaaaacattgtaattggaatgaatgatgtcgggaaaagcaattttttacacgctctaagattaatatttgataagaaagtacgttttgaggaaatatgtgatactgattttcatcaaaaaaatactagtttacctattaatataattataactttagatatttctgatgaaagtaatgaagatgtacaaaaggttttagcttgtgtaaaagaggctagaacacaagaagattcaaaattattttttattaagttggaagttgaaaataatctaagtaatgggtatttaaagcattatacatggggtgatgatcttttaaatttaaaagaaataaaaacaaaaggattaggttatttattgttagatgatatatttaatattatttatattccttctcatattgagacggcaaaaatttttaacgatattagaagaaatattttacaggaaatagaatatagcgctgatgatgagaaaatcaaaggcgaaatatttgatggtttaaaaggagttaataataatatagagaaattatcatctgttaaaaatattgcagaacaaattaataaaaatttagaaatttttgatgaatcttataaagttaaaattacatcacaatcagtagtagatgatttacataaacaattgaaaatttttacctatgaaaaagatgaagatatactatttcctgcatctggagatggtagacagaaaaaaattatgtatgctatgttgcattatttcttacaaaaagaaactcgaaaaattcctttgttacttttagaggagccagaaaatcatttatatcttactgcacaaatagatttgtcagataccttattttcatcgagagatataaaatatatatttatgtcaagtcattcttcacagttgttatattatataaatagtgattgtagtttgataaggctttataaaaataagaaaagtgcctgtaataatacttccagtaactcatctaaaattagtgaagagtatcatcaattaaaaaaaatttatgttgaagatatgagtaaagggtattttgcagattgtgtattattagttgaagggtattctgaaaagcttttatgtgacactattttgaaaaaagtattaccacaaaatatttatcaaaggctttatgtcttaccagttttaggtactaattttaaaccttatagagatttattattaaatttaggaattgatgtaataattagaacggataatgatatttataagaatgatatatatgggcttaaaagatgttataaaattatagggaaaaaatttaaaaaaacagttcctgaagaaattaaaggtagtaaatcagaaggtgagctaatattaaatagtaaaaaaaatagacttaatgaaatctatagaagaattatatcttttttgaaaactaagaaaatatatttagctgagatagatttggaatatgatcttaaaaatgctttagaagaaagtggtatagtaatgtgtaattttgagggagaagatatatctaatacagatttagtagcaagattacaagataagaagtggcataatatgtatatatttttaagagataattcggataaatataataatatttttaatgataaaagatttgaatttctaaaggaggttgagttatgtctgaattag

SEQ ID NO: 79151 - DNA, 1338 bp, Acinetobacter sp. Leaf130
atgtctgaattagaatttactgatgaacaaaaaaatataattaaatgtattgatgataatattattgtttcagcttgtgctggttcggggaaatcatcaactttggttgaaaaagctttatccgaaataactaatattcaaaattggaaaaaactttcaattctgacgtatactaataaatctaaacaagatttagaaaaaaagatttataatgaaaagattgtaatagatacttttcatgggtttatatataaaaatatttttcctttcgattatgagatttctcaaaattttattgaaaattttacttttagagcaaaaacatatgaacagtggtgtaataagttatatgatgaaaatatattagttagttcttttggtggaaatgattttgtaatggaacatactctatatttgatgaaaagaaagaatctcttatcttatttaaagtcaaaatattatgctatttatatagatgaagctcaagataataattatcatcaatatactttgttagaggagtttatgaaattaggaattaaattgttgatggtaggggatccaaatcaaacattgtatcaatttaggggggcaagtcctgaagattttaaaaaatatttctctgataaacgcttttcttcatttagcttaacaaaaaattttagatgtcatgatattattgataaaatagcaaacagttattgttttcctgattgcaatattaatgatgctagtttcggttattacttgatatcaagttcaaatttagaagaaatagtctccacttattctagcgaaaaaattgcatatctgagaaaagctaatgcagatttgagtgattattcgggtagattttctataataaaagatttggcatttgatagtgatgtttctgaaattgtgaagaatattgttttatgtttgcttaagtttaagtttcaaaaaacttactatttatacagcttgtttgatgatttaaagattgatggaaatttatattcaagtcaaaatcagaaaaaattaatagaatttcttaattttttaattgaagaaaaatgtaagaaaagtctaataaattttcttgttttattattattggatgaatatattgaagaagtttttaatatatatatacagttagctgatgatccaataactaagaatttttttaataatttgagtttacatataactatgactgttcactcatctaaagggcttgaatttgataatgtaataattaataaaaatgattttttttatcagcaggaattacaaaaaaatagtttttatgttgcttttactagagcagaaaaaagaatttttgtaatttattaa

SEQ ID NO: 79152 - DNA, 2301 bp, Xanthomonas sp. Leaf131
atgtacttgaaaaagctggctttacgcaattttaggcggcttaacaacgttgttattgaccttgcctcagacatctcgatcttcgttggctccaacaacagcggcaagacatctgttggccacgcattacagttgtttagtggccgcggccgcttcaacattcatgactttagctccgagctttggcctgacataatttcgtacggcgaaagcgagggtctcgacatgggcaagcttcccacaatcgagctcgacatctggtttgaaataggaacagacgatattcatcgcgtagttgatctgcttcccagcctatcttggcaaggcaacttggttgggatgcgcgttatttatgcgccgatcaacccaacagccacacatgcacgctatacgggagtgaggcagcacgcactaggagcgacacctcagagagaggatggagcgccgacttatgacccatctccccgtaacctcaaagattttcttcgcgattggcttcatgctgaatatgagattagatactttgttcttgatcacgcgaaatttgatcccagcatggtcgccattgacggctatgttccgtcgcctctgagcggaaaagagcacagcggtagggatatcctgaagaaccttctccaggtcgacttcctgaatgcccagcggcatctttccgatggtcaaggtggctcgcgctcggaggagctctcgcgtgtacttagtcgcttttatgagcgcaaccttgaacagaagggcaacgacatcgaagctttgagcgcgttggcagcatctgaggtttcgcttaataagcatctcgagcgcgtgttcgaaccgacgctgaagagcctttccaagctcggctatccaggcctaaccaacccacgaatgatgatccgctctgcactcgacccagtgcagatcatgagcgggcgtgaaggcgccgtggtgcattacgcattaggcgctgatgacggcaatccagacccaccgacgttgccggacaggtacaacggtctgggcttcaagaatttgatcttcatggtggtggaactcctcgatctccatgcccagtggctggcaatcgaggaagatcgtccacctgtccacttgatcttcatcgaggagccggaggcgcatctccacgcacagctacagcaggctttcatccgaaaggtgatggatatccttgcactcagcgatgaagacaaaaagcaccacacaagccagattgttgttacaacccactctactcatatcctctatgagcgaggcttccgtccaatacgctacttccggcgaagccgtgaacagaacgcggcgacttctgaaattctcaatctctctgtgttctatgacagcgccaagccagatgatcgcaccttccttgagcgctatcttaagctcgctcactgcgacctgttcttcgcagacggcgccgtacttgtggaaggcaacgtggaaaggctgctcttgccgcaaatgatcgagaagtccgcacctaggctgcagtcaacctacctcacagtgctagagatcggcggagccttcggtcaccgattcaagtccctgatcgacttcctcggccttaccaccctaatcattaccgatctggatagcgtgtttggcccagtaacacccgctagcgtagaagccgtcgctgctataccaccggtgccaggcgccgaagaagctcaggatgatgatgatgaggacgacgacgaggaagacaccccagaagcagcagcaaagcctggaaaggcgtgcatcgcaagccacacaggtgctgcaacctctaatcaaacgctgcttcagtggctcccaaagtttggcacagtggctgctctctggcaggcaacggttgaacagaagactcaggcgagaacagtggatggtgacgctctggtgcgggtcgcttatcagtgccaaaccgaagtcacctggggcaaagaaactcagaaacttgcagggcgcaccttggaggaggcgttcgcactcgagaacctccagtggtcccaggacaaagatcgcaaatcgcttggccttcgcattccaaaggccagtgacaaggatctgagtacactcgctgatcgccttcacaagcgggttcagagcaagagcttcagcaagaccgactttgcacttggcttgctagcagaagagccgaataaatggttggtacccgcttacatcgctgaagggcttacctggcttgagaaccagatcgctccaccagagctacacaacggtcaccccgatggcaacgaaccccagcccgccactatccctctcgaagaggcggtgtag

SEQ ID NO: 79153 - DNA, 1878 bp, Xanthomonas sp. Leaf131
atgacaagccgaatcggaagtcccgacacgccggccgatctagaagtccgagcgtgccttgatcgagagccacctcgctctttcgtagtggtggcgggtgcgggctcgggcaaaactacttcgctcatcaaagcgctcgctcacctaggcgagacacgtggacctgctctacgtcgcgccggacagaagatcgcgtgcattacctataccgaagtggccgtgggtgaaatatcggaagatgtaggtgtctcgcctctgttccaaatctctaccatccacagcttcctttggtcgatagtcaggccattccattcagacatccttgtatgggttcaggatcgcatcaaggagaagattgcagagcggtgcgaacacttcaataagccgaggactcagaagaagaccaaggcccgtcttgagcaggagatggtcgatcttgaggccgaacttgcagaagtgcataaagttgagaagttcgattacggaaccggaagtagttatgccgagggcatcctcggccatgacgacatattgaagctcgcgccggcctgcatcgtcttgcgccccctactgagacaggtcatagcggcgcgctttccctacatttttgttgatgagagtcaggacacccatccggacgttgtcaaggcactgcagaccattgccgctgagcatccgaagctgtgcgttggcttcttcggagatccaatgcaacggatctacatgagcggagctggtcccatcgagctcggcggagactggtcggagattaccaagcccgagaacttcaggtgtccgagagcagtgctcgacgtcatcaatgctgtcagagccgaaggcgacgggctggaacaaactcgtggccggactcgaatggtggatggccatgagcagccggtggcagggaccagcaatcttttcgtcttgccgtccgacggagatcgaactgcctgcctaatggccgtcaggcaatggctttctgagcagacagatgacacgcagtggctaaatgatgtgcgcgaaagcgatgtgcgcctgctcgtactggttcaccgcatggcagcgagccgcctcggcttccctagcctgtacgccgcactcaatgatcgcgcgccaatgagtctgagtgagggtctcagcgatggaaccgcgtggccactacggcccttcgttcaacacattcttccgctcgttgtctcagagcaagcgggcgaaaatttcaatgtcatttccatcttgcgcagtgtgagtccgaaactcgagccggacaggttaagtggacaagatactgcgactgtcctcagtgacctacagcaagcggttcgaacgcttgtcgagctgcttgcggaaggctcacaggcaactattttggacgtccttaaacatgtgcgtgatagcgagctgctcagactcgacgatcgattcgactcgcatctagccgacgatccgcagaacaaccacactagtggctacgacaacgttcaagccttcatagcttgtggaatacaagatctgtgggcctatcaacgttatttttccgaagaatcacccttcgctacccatcacggcgtcaaaggtgcacagttcgagcgcgtcctggttgtaatcgatgacgatgaggctaactaccggcagtactcttacggcaaatactttggctatacgcccctgtcggagaatgacgatgaacacattgctgcaggcgaagagtctgtgcttgatcgaacacgaagacttttctacgtttgctgctcacgtgcgactaaagacttggcagtggtgatctttgttcccaacgttgaagtggcacgagcagcgatcattgaaaaaaagctattccctcaaaacgtgatccgaggagccgagcttcttgggtag

SEQ ID NO: 79154 - DNA, 1725 bp, Flavobacterium sp. Leaf359
atgaagctaataaaaatatcgataagtaattttcggggaattaatcatgcagaagtgcttctctccggccatacggtattaattggagataacaataccggcaaatctactgtgcttgaagccgtagatctggttctgggacctgacaggctttcaagaatgccggttattaacgaacatgatttttttgaaggaatttatttaaatcaggatggtcctgtgccaattgaaattgaaattatcatcggagcactgtcccaggaacagaaacgaaaatttatgaacaatctggaattctggaaccacgataccctgagcttagttgaaagcggccctttggatctcttagatgatattgctgtagaagaagttataagggtcaaattttcaggcaaatatgatatagaagaagatgatttcacaggggaaaccttcttctgctctccggaagaagccaaaacaaggtttaccaaaagcgataaacgtgactgcggttttctttatctcagagcattacgcacaggcacgagggctttaagccttgaaaggggatcactgcttgatatcatacttcgcattcaggaactgcgtccccagatgtgggaaagcatactcaagcagctcagggaaaccgaagtgaattccggcgctgaagatgaagtcaataaaatcctttccagcgtacagaaatcacttaaacagtttgtacctaccgattggggttccgagccgcatctgcgggtttcaaacctgaccagagaacacctgcgcaaaactttagttgtatttatgtcttcaggttccggtaattatcatgtgcctttcagccaccagggaacaggaaccataaacacaatggtgcttgctctgctttcaatgatagcagaactgaagcaaagcgttatattcgcaatggaagaacctgaaattgctattccaccatatacacagaaaagaattgtcaacagtataagaaaccagtctgcacaagctattttcacctcacattcgccatttgtacttgaggagttttcccctgaacagatcgttctcctggaacgcaaaaaaggaataatgaaaggcatgccacttacttttccatccaatataaaacctaaagcgtatagcaaggaattcaggatgcgtttctctgaatcccttttggccaagcgcgtacttatcgcagaaggcgatacggaagcttcagcatacaacgcagccgctcgatgcctctccgagctcgatccgcaaaattattcctcatttgaagctatgggtatatcagtttttaacgcagagtctgaaaacagcattccaatctttgcaaagtactttagtgaacttgggaaaaccactatcgcagtctgcgacaaacagtctgatgctgcaaacttaaaagccataactgaaagtgccggctacgtttacgaatcagcttacaaaggctttgaaaatctaatacttactgagactcccatttcggtgctgaaaaaatacattactgaattagtttctgagcaaaaatggcctcagcatcttaaacttgatggctctcctgaagatatggaagaagaggttgtaaaaagtaagctgtttgactacctcaaatggcagaaggcttccggcagtgccgcagatattctagctttatgtaccttagccgaattccctgccacgcttagagatgctgtaaaaggaattacggacacaatcgatctgatctaa

SEQ ID NO: 79155 - DNA, 1710 bp, Flavobacterium sp. Leaf359
atgataatctgtgagaaaagggccgaacttattgaagcttctggacatctccttgtcttgggggggcctggctctggcaagacaacgatctcacttgttaaggctaatactataatcaataacggaattcttgagaatgggcagaagattctgtttttatcctttgcacgatctacagtttccaggattcaggagcatacaaattctataatcagccctgaaaacaaaaataaaattgagatcaacacctaccacggattcatatggaaattacttcagagtttttcttatctcattaacaatcgaaagttcctgcagttgctcactcctgccgccgaatcagctcttcttgcggaaatggatgacgacaaggagcttagaaaacaggccaagatggcacttttcaaaactgaagggcaggtttcttttgacatattttcggaaatcgcatctgagatgttcaaaaactccaaaagaatcctggatttggtttcacagcgctaccctataattatagttgacgaattccaggataccgacaataacgaatgggaactcattaagacaataggaacagtaagtaccattattgccctggcagatcccgaacagcgcatttacgatttccgtggggcaagtacggagagaattgaccagtttattaaaaattttgatccggaaatttttgattttgaacaggagaataatcgaagtacaggaaaggatatcactcaatttggaaatgacctcctaaagggtgcaaatatcgggaaacaatacaatgatgtggcggttgtgcattatcccttcaacagggcagaacctaataagatgctaaaaataaatctattaacagcaatcaaacgtcagaagaaagataaaggcgaacagtggtctatcgccgtattggtccgtaccaaaaagatgatgttttcagcatcatcatatctttccagtaccacctctctgcctcccctctatcatgaagtagcaattgatccgaacggtcccgcactggcaggaataataatagccgggctgatggaacctactatggatatttcacggtttacttcactggtcagtgatgtaaaaaatcatatgaaaggaagatcaggaaccaaaatatcaaatgaaacatcacaatttagcaccgcactggataattatatcggaacaggaaaaataaaaggaagcaaaagaattttgtttattcaggaattagatcagctgctggcagcgagggaggaaattgtcttgtccggcattcccgaagaagactggctcgccatacgacgactctttcaaaactgtcaaagtccttatttgaaaaatgtttacgaagacgcaaagtttttgcgccttttgaaaaaaggagccctgctaagcgaaaggcttgcttctgcctggcgcagtacaggcacatacctgggagcaaagtcctcaattgaagaagcatttgtacaggagcactttattgcagcccagactgattatagaggactgcatattatgacacttcacaaatccaaaggcaaagaatttgatgaagttttcatttgggaggactattataatcccttggtaagacatgaggcatcagcaaaagaaattgtcgaatcccgttatctgctgcgggttgctgccaccagatcacgagaacggactacttttctaaccgtagcgtcgcagccttgcatcttactttaa

SEQ ID NO: 79156 - DNA, 2037 bp, Rhizobium sp. Leaf155
atcaagctcgtgaatattcaggtcgaaggttttcgacttctcgaaaatgttaggattgcgattgaagaaaccgcgaccgttgtcgtcggcaggaacaacagcggtaagacctccctaacagaagtcttcgatcgctttcttggcgagcagatggggcgcttccgccttgaagattttgcagcggcgatccggccgaagttcctcgctgccaaggcgttgcgcgacggtggcgcggagccgccggagaaagtcctcgcggagctacctgttatggccctaaccctgacgttcggctacagcgccgaggccgacgaccttggaccattgtcgcctttcgttatcgaccttgagccgagctgcacgacggcaatcgcacgcatcgaattttcagcgtctctcaagacccttggcgcgctgctcgatgcgccggagccggccgaagctgaaagcgccacggaatccctgtttcggcaccttcgtgaggtcgtacccaaagcatactcgatcaagatcttcgcgatcgatccgacggacgtcaccaaccgccggaccttcgagaaaaccatcgaactcaatagccttatcagcactgggttcgtgaaagcccagcgcacgctggatgttggtaaacggggcgagaccgaagtcatagggaagttgctcaacaagctttttaagacggccaacgcggtcaccgcatcgaccgacgatcaacagatcgcggacggccttaaggcctctgtcgctgatctggaaaaggcaatgcagggagactttgacgatcggctgaaggcgctgctgccggcgctcaacacgttcggttttcccagcctcaacgatactgagctgcgaccgcagacaacgatcgacgtcgagagtcttctcaccgataacacccgcatcctgtacaccggcactgacggggttcatttgccagaaggctacaacggcctcggcacccgcaatctgatttacatcctgctccagcttgaagcgctgcataagacctatcgcagcacgcctatgcggccaggcactcacgtcgttttcatcgaggagcccgaagcgcacctgcacccccagatgcaggaagtcttcatcgggcagcttaacgatgcgatttccactctatcgcaaaagtattccggtgagacggtttggccggtacagtttgtcgtatcgacccattcctcacatctcgccaacgccgcgccattcgaggcgatccgctacttcctgaacgagccgacacagactaacggtgtgcgaaggaccaaagtaaaggacttccgaaaaggggctgataagatcggctcggaggaccggcgcttcctccagcaatacatgacgctcaccaaatgcgacctctatttcgccgacaaggccatcctcgttgagggggccactgaacgcatcctgatgcctcgcatcacgaagatcgttgatgcagatctggcccctgaacatcggctcggtcgtcagtacgttacaacgatcgaagccggcggcgcgcatgcgcaggtcttctattcgcttctcgagtatctggagctcaagactctcatcatcgccgatctcgacgccgtcaaactcgtggactcaagatggaggaagtgcgtgtgcgccgagggtgagcggacatcgaactcggccctcaagacatggttcggcgacaacgaaatttcttccgcagcgcttcaggcaaagacgcccgaagaaaagaccagggggtactgccgcattgcctatcaaatgtccgaggaaggctctgagcattgtgcgcgaagctacgaagacgctctgatcctcgcgaacctcgccgatttcgggatcgcaaacgatgtaaacgcggcgatcaaagcgtgggaaaccgctcaagacttcaaaaaatccgaggaggcgattaagtacgcgatccgcgaggaaaactggaacgtcccgaaatacattagggaaggcttggcgtggctgtcagaaccgcccccaccgcctgaagcgtccccgccgactattcctgaggaggcggaagccgcatga

SEQ ID NO: 79157 - DNA, 1737 bp, Rhizobium sp. Leaf155
atgatcgatcgggatccatcgcccgccgtagttgcggctcaaaaagcacaggaacgcctcgaagccgctctcgcggacggaaaaaactttcgccttgaagcaggtgcgggagcgggaaagacctactcacttgttgctgccctgaagaagattatcgcggaaaagggccccgcgttaactcacgccggtcagaaggtagcctgtatcacttacactgaggtcgcccggaacgagatcgctcaggaaatcgaggaacacccggcgatcctggtgaatacgatccacggtttcggttgggcgttcatgtcccgcttccagaagcagcttcgcgaaatggtcgcgacacaggaggcccgccaagaggcgatcgaggcggcaggcggcatccacgaccagacggtcgaatacagcttgggcttcttcgggattgacgaggagcggatcacgctccaccacgacgacatcccgagatttcttgctgcgcttctgtctaacgcgaagttccagcggattttcaggagcctctatccgattctgtttatcgatgaataccaggacaccgatccgctcgtcatgacggccctatcggagaatttcttcgcgaccgggcaaggaccggtcatcggtctcttcggtgatcactggcagacgatctatcggagggactatcagctcgccaacttcccacgtttggaaggcatagacaagggcgccaacttccggtcggtccccgtcattatcaatgtcctcaatcagcttcggccggagctgaagcaggacgtcgacgatgagaccgctgaaggcgaggcgcgcttcttccattgcaacgcctatttgggcgcccgcgtggactctcgcagcgggaaacaggaattgccccccgaggtgtacgccgatttcatcgcgaggatgcgaactcagctacgtgaagatggctgggactacaatcccgagaagaccaaaatccttctgctcacgcacaatgcgatcgcggccgagcgcggctatccgaacctcgccgcgatttttgagcacaacgaagccttctcgaaaaaggaagatgcaacgattgcgttcctcgctgatgtcgtcgagccggtctgccaagcctactgcgctggaagcaccggcgagatgttccgactcttgggcggcgcgccgacaattcgcaagccatccgataaagtcgaatggcgggtggagatggatcagcttgtgaagctacgtgcggaagggacgattggggacgttctcgatctgctgaagcaaactaagcgtccgcgcattgccgatcgcgtggcgaagcgggaagaggagatcgcgcagctcgaaccggaaccgacggagggggagtcaaaatcactcaggcgccatcttcggcttagggatgtggcctacaaggagcttattgccctcgtagagttcatcgacggctttaccccgctggccacccaacacagcgtgaagggtgctcagttcgaaaatgttctcgtcatccttagcgcgggctggaaccactacaactggcccagatttttggactaccttcaaaccggcaaggtgacggagaaggatcaggcgggtttccatcgtgcgagaaatctattttatgttgccgtctcccggcccgagaaaagactggcggtactggtcactcaaacgttgagcgacaacgcgctcgcggccgctgaaaggctgttcggcgcagacaatgtgtttccgcttgctgaagcctga

SEQ ID NO: 79158 - DNA, 2016 bp, Pedobacter sp. Leaf176
atgaaaataagcgctttaaaaattaaaggatttaggtcattcgggccagatgaagtcaaaattccaatcgatgaaaaactagttggctttattggacttaatagtgccggtaaaaccacttctctcgaagcattgaggaagttgttcgggcaatccttagccgaccgagaaatttttcgtcaagattttcatgttggcaaagaagaaaaacctgatgaaataacggaaagattcctgtccattgaggttataattgattttgctgaagatgagaaagaagcaatcccgcatttcttcagtgatatggtagtggatgaagaaaatgaaaatccatatctccgtttgcgacttgaagctacttggaaaagatctgaatacgaacctgaaggtgaggttgattataaaatttattttataaaagttgctgaaggtacttccgaagaagagcaaagcaagcaaatatttccaaatcattttaggcgtctgatacagatactttatgtgccagctattcggcggcctgcagaacaattaaagtacgtatcagggagtattttatttcgtgtattaaaaaagataaaatgggatgattcttttaaaacagaatttgatggaaaaatagagcaaataaatgatgcttttagaggcttgtcagaatttagtactgttcaaacttctattacagaattctggcagcaatttcataaggatgagcgctataaagataccactcttggctttggcgggagtgatttcgattctatcttaaaaaaactagaaatatcgtttagccctactggtacacacaaaacctataagattgatgaactaggggaaggttatcgttcactattttatttaacactagtatgtgcattattagatatagaagaaaaattatccgaaaatgaagatgaagaaaatataggtataaatcgtcccttacttactatattagcaatagaggaaccagagaaccatattgctccgcaactcttaggtagggtaataaaaatactaaaaacaattgctggtaaagataactcacaagtcttactttcttcacatacacccgcaattgtaaaaagattaaatcctgaaagcattctgcactttagaattaccgaaaaatatgaaactgaagtaaataaaatattactccctaaaaaaacagatgaggcatataaatacgtaaaagaggctgtacacaattatccggaactatattttgcaagacttgttgtaattggtgaaggtgatagcgaagaggttatttttaatcggcttatggaggtgatggaagttgattttgatgacaacattatcacttttgctccgctcgggcaccgattcgtaaatcatatttggaagttattagaaacactacatattccttacgtaacgcttttagatttggacgtagaaagagaaggtggcggttgggggagaataaaatatgctcttaaacaattaattaaggtaggtattaataaggaagacatcttaaaaactacaactggtatattgtctgatgaggaacttgaaaaaatgcatacctggagtttaatagaagagaatgctattgaaaacatgaatagctgggtggattttttgatgaagcataatattttttattctaatccacttgatttagatttcctaatgcttacccattatccggaattttataaaaaagctattccaactagtggtggaccaagaattcctgatgaaatagaaaaacctgatgagtttaatgataaagtaaacgttgcaattcaagcaactttaaagtcggaaaatgcaacggcggaaacctactctgaagatggaaaaaaactaatgatttggtataattatcattttttgggacgaggaaaaccgacaactcacattcaagttttgtcatctatgaccgatgaagaaacaaagggtaatttacctcaagtatttacagagatttttgattgcatatcctctcttctaaaaccaaatagagcagatgaagccaattaa

SEQ ID NO: 79159 - DNA, 1845 bp, Pedobacter sp. Leaf176
atgaagccaattaaaactcaagaatggattccaacagatggaatgaatcttgaagaaaatgcccttaaggttgcgaccagcgttgaaaacaatcttgttgttgccggtccaggtgcaggaaaaacagaacttttagcgcaaaaagcttgctttcttttgcaaacgaatacttgcaaatttcctcataaaatattggcaataagttttaaaagagatgccgcgtacaatctgaaagacagagtaaggcttcgttgcggagatgaattatccaatcgttttgactctttaaccttcgattcgtttgcaaaacagttattagaccgcttcaaacaagccctccctactgaatacaaaataggttcagaatatgatgtcttaataagagatcaatccattttagatttatatgaagctgaagacattaattattataatacaacaaacagagacaccatccttagacttcataatacgcaattaccgcactccgctaacaatgttggcgaaaatataagaaataaggtttggcagaaaatgattcatcaatcaaaattatcgttcactatgataatgcgattagctgattacatcattaataaaaatccaaaaattagaagatttctccagcaaacctatcatttcgtttttctagacgagtttcaagataccacagaaattcagtacgatttctataaaagttgttttctagacagcgaaacagcctacaccgctgttggcgatgataaacagcgtattatgatgtgggcaggtgccagagaaaccgtgtttgaagactttattactgacgtaaatgcaacacgaattcctcttaacatgaacttccgatgcgcacctagattagttactttattaaaccatcttactcagcatttattaggaaaaaatgatttcgctacaccatctccgaaatggcaagctgaacaaggagaatgttatgtttgggttttcgaaaatccagaatctgaaatgcaaatattgctccaagaagttaagaagtggattactacagatggaattaatcctagagagatctgtattttggttaagcagcaactggaacaatatacaggcgacttaattgcatattttaaccaaaacggcactaaagcaagagatgaaaataaattgcaggatatgttgacacaagaaatctctatttatatcattaatattttatactccatttttcagaacaaatctcatgagaccaagcaaacagcattcagtttcttgaccaatcttcatacagaattagaagacgggcaattattaaaactagaggttgcccttgcaagtttcattaagaaaatgaaagataagtgcaaaaacacaacttgtaacaaagaacaaatcaacacactgattgatgagataattgattttgctgacaaagatcgcattatagccagtttttcctcatatagaaaccctactgaacttaatagaataacaaccttactaaaagaagaacttattaaatattataatacagtaaataatatgattctagctttagatatgctggttggtaaagatacaatccctgttatgacaattcacaaaagcaaaggattagaatatcatactgtaatttttattggtctagaagatggcgctttttggtcatttgaacgccaaccagatgaggacaaatgtgcattttttgttgcattatcaagagcaaaggagcgagttgtattcacgtttagtaaacaaagagttggtcgttttggactgcagaatcaatctataacaaaaattaaagttattctggaggaattacagaaatcaggtatagttacaatgattgaaagaaaaaattaa

SEQ ID NO: 79160 - DNA, 1794 bp, Rhizobium sp. Leaf341
atgtacctttcaagaattacggcagataacttcaggaacttccggtgcctcgacgtctcgctggctggcaacgtcgtcatcgtcggtgagaaccgggttggcaagtcgaacttgctctatggcctccgtctgatattcgacccgtcgctgccagacagcgctcgagagctgtctctcggtgatttctgggacgggcttgaagaacttgacgaaggaagtcgaatcttggtgtccgttgagataaaggacttcgatgatgaccccgatgtccttgcggtgctgacggactaccgtgtccccggaagcccggatacggtggcgctgacgtacgaatacaggacgcgccccggacttgggcgggctccgacgagcgagagggacttccagttctcgtgctacggcggcagggatcctacacgaaaattcggccatgacgtgcgaagcagggtttccatggatgtgcttcccgctcttagggatgcggaaggggacctagctgtctggagacgctctcctcttagaccgctgatcgagacggcttttggtgcgatcgaccgtgacgagttgcaggaagtcgccgaccagattggcacagcaacctcgagcctgatggagttcgagtccgtctccgaacttgaggaggccatagcgacatcgttccgggccatgagcggggagcggcaggacgtcgagccgacgctcggcttctccgccaccgatgcctcgaagcttcatcggcaaatcaggctgctgatcgactccggacagagggccgtttccgacgccagccttggctctgcgaatctcatcttcctgacgctgaagaccatggagttgcgcaacctcattgcaggggacaagcgcgatcattcccttctcgcgatagaggaacccgaagcgcatctgcacccgcatctgcaaagactcgtctaccgaagcctgttccaagatgcgagcagcccggatgaggacggcgaggatcctccgctgtcagtgatcatgacaacgcactcgccgcacatcgcgagcgttgctccggtgacatcgatcgtactgctccgagaatacggcgacgagactgtcggctgttccacggcctccctggatctgtcgaccgacgaggcggatgacctacagcgctacctggatttcacgcgcgcagaaatgttgttcgctcgcggagtcatcctcgtcgagggcgatgcggaacgctttctggttccaagctttgccgaggaactcgccgccgatttggacggccttgggatcacgatctgctcggtcgccggcgcgaacttcacgccctacgcaaagtttcttgaagcgttgaaaatccccttttccgtaatcaccgatttcgaccctgatggtgatcggggccagaaacggacagttgcgttgtcccggctcctggatgggatgcgcaccgagaagtacgacgaggaatatttcgacgagctcctcgagaccgatgactggcctcgcttcgatgaaagcatcgaggagttcggggtattcaccaacggcgacacgctcgagatggatctcttcaagggcgccttcacggcgtctatcatcgagggcctcagggagggcaacttcggcaaggaacgaatgacacggatcgacgcctgggaaaaggatcctacgacggtcaaccggaaacagctactcgccatgatggaggacatcggcaagggccgcttcgcacagcgtatggcagcccgtattagcggtcttgaggtacccggctacatcgcgcgcgcaatcagctacgtggtcgaccgtgtctag

SEQ ID NO: 79161 - DNA, 1839 bp, Rhizobium sp. Leaf341
ttgaggtacccggctacatcgcgcgcgcaatcagctacgtggtcgaccgtgtctagcagcgcactttatctcgacgctgcggaagaactaaggccgaacaacgcccagtggcaggcctatgagtctaccgggcactgcgtcgttctcgcaggtcccggaagcggcaagaccaagacactaacgattaaacttgcccggatccttgccgaggatgtgaaggctccgcgtggcgtcgcctgcatcacctacaacaacgaatgtgcgcgggaattggaggaacggcttggcgccctcggggtcgaaccgggaaagcgagtattcgtcggcacggtccactccttttccctgacacaaatcctgatcccatatgccgattccctagatgtcggacttccttcccggttccagatagcaaacgcccagcaaaagggactggcgatggccagggctcaccgggacgtggtcggcggtcccggcaatccagaggattttcggttcggcatggacctccaccgtcgcacctacttggacagaaccaagccgatatggatggaagctaacccgcaacgagctgcgctcgcaacgtcatacgagcagtatctgcgcgaagctggcttgatagacttcgaggacatgcctcttcttgcgctgcgtgcccttgtcaggaatccatggctgcgcgatgcgttgcttgccaaattccctgttctcgccgtcgacgaatatcaggatctcggtaccgcacttcacctgatggtgctaggactttgctttcgcaccggaatacgcctgctcgcggtcggcgatgccgatcaatcgatctacggcttcattggagcgagaccggagctgctgcagcagctttcgcagcgtgaagacgtggagacggtgagactggcgctgaactaccgaagcggcacacggatcgttgccgtttcggaatatgccctcggagaggtgcgcggctaccaggcggctgaaggcgccgctgaaggcacggtctacttccacccgctggctggaagctacgaataccacgccgcttggatgttctcaacgttgcttcctgaagtggaggtgagaaatcccggccttcagcgcggtaacatcgctgtcctctatgcggcggcgttcatgggcgacgccgttgccgaggcggctgctgatcatggctgggcattcgtgcgggctgacgcgaatgccctttattccaggtcgaacaaattgatgcgatggatcgagcgctgcgctgcgtggtgttgtggcggatgggaggtcggcgagccacgctggtcaaggattgtctccgaaggtaggcgcctgttctccgagacgatcttgtccgatcaagattggcgggagttcaaacgggccctgctcgccttcacttggtcgtcgcgggacagcacccttcacctttccgcctggcttcgggcgctagacgccgcgatcgtccaacggtttgcgatcggttgcagaggcttgtccgacgatgtgtccgcgatgagatccctcatacagcggcttgaacaggatcagggattgtcaggcatgacacttggccagttctcgggagctggcgaaggaaacgatcgcgtcaatctcagcactctccacagctcgaagggccgggaattcgatgtcgtggtgatgttcggcatcgacgaaggcagaatccctcgatccaatccggcaccaagggacatcatcgaacagcgtcgccttttctacgtagggttcacccgcgcacgctcggaagttcacctagcattctcgtccacccgtccatcgaggttcgtcctcgaagtcgacgagcgcatccaggcggaagatgattga

SEQ ID NO: 79162 - DNA, 1995 bp, Dyadobacter sp. Leaf189
atgcaaatcacaaaactaattattaaaggatttaggtcgtttgggccaaccggtgctgaaatcctgataaaccaaacactagctgccttcatagggcttaatagttcaggtaagacaagtgcaatcgagtcactcagaaagttatttggttcttcctcctcagaaagggaaattctacaccatgattttcattcttcgaagaacgagcagcccggtgaggttagtaataaacaactttcaatcgaggtaagggttgatttttttgaaaaaggagatgatgcagtgcctcatttctttcagcatatggttgtggaggaggaaggtggaaaaccatatttgagaataagattagaagcttcgtgggaacaatcagatcgagaaccagacgggataatagacagtaatctgtttttaataacctcggctggacatttgaatgaagaaaaacaactttacccaaatcatcttagaagcctattccaaataatatatgttcctgcgattaggcgaccaactgaacagctgagatacgcttctggaacaatgctttatagaatcttgaaaaaaatcaaatggtcaaatgatttcaaagttgattttgctacaaaaataagcgaaataaataatgaatttaaagggctgcgagaattcacgaccatacaagcatcaataagctcgttttggaaaaagtttcataaggattcaagatatgccgaatctaccctgggctttgaagcgggagatttggactcgatattgaaaaaacttgaaatctcattcaccccatctcccgtgcataggaaattccgtatcgacgacttgggagaagggtataggtcactgttttacctgactctagtttgtagcctccttgacgtggaagagaagctagcgaaagacgagggcagtgaaactggaaatgcccctctcttaacaatacttgcaattgaagagcccgaaaatcacattgcacctcaactgctaggtcgtgtcgtaaagattctaactacaatctcagaaaaagataattcacaagtatttttatcatctcacactccggcgattgtaaaaagaatagaaccggaatccatctatcattttcgagtgacaaaggaatatgaaacacaggtcaatactataaaattgccagcggaaagggttgaagcatacaaatatgtcaaagaagccattcgcaactatccagaaatatattttgcgaagattgtagttatcggggagggagacaccgagggtgtgattttcaaccgcttaatggatttattcgacactgatttcgatgataacattataactttcgctccgctaggacaccggtttgtaaatcacatttggactatgctcaaagctttacacataccttacatcactctcttggatttggatgttggtagagaaggtggtggatgggggagaattaaatattccttggaacagctcatgaatgtcggtgtcgataaaaatgaactatttgaattggaaggtggtgaaattatgtctgacccgaccttcgatagttggagttcaaaaaaggtgaatgacgaagctgatctaaaattgttagtgagttgggttgattatcttgaagatttcgatatatattattcgggaaatcttgatttagacttcttaatgcttagttactatccagcgatttataagacaataatcccggcgggtggtggaccaagaataccagataaggtagctgaacttgataaattcaacgcgaaagtaaagacagctgtacaagctacattgaaatctgaaaactcggatggaagtatttactcagatgcagaaaaggaattaatgatttggtacaattatcatttccttggtcgaagtaagcctggtacacacatagaagcgctcgctgccatgagcgacgatgttcttaaaaagggcattcctcctttacttgtgcgaatattcgaccgcatttccgaaattatattatcagaagttgagaaatga

SEQ ID NO: 79163 - DNA, 1848 bp, Dyadobacter sp. Leaf189
atgaagaaagtggatgaaaaagtttggacgccagcggatggattgtttttagaagataatgcattacaagtcataaaatctaaaagtaataacctggttattgctggacctggcgctggtaagacagagcttttagctcaaaaagcaggatatctcttgcagactaatgtatgtaaatatccaggcaaaattttggccattagtttcaagagagatgctgccttcaatcttaaggatagagtttcactacgattgggtgaagagttggcaaagcgatttgattcgatgacctttgattcttttgctaagcaaattttggatcgatttatgttggcactcccagccgactatcatatttcgtctgattacaatttgacactatccgacaacttggccctcgatttatacaagctaattgataaagatttctttttcaaaaagggtcgaaccgatcttgtaacccaccatacaaaggtcaagctatctacaccgctagactttagcaaaagtcaacgagctgaggtttggagaaggatgttaagagattcaccttctcagcttactttcaagatgattatgcgacttgcagaattaattattgcgagaaatcctagaattcggacgtttcttcaacaaacatacagtcatgtttttcttgacgagtttcaggatgcaaccactatccaatatgaattctttaagacttgttttcttaatagtgacttgcagtttaccgcagttggtgatgacaagcaaagaattatggtttgggcgggagctcgggaaactatattcgaagattttgaaaaagaccaaaatgcagtaagagtagctcttactacgaattttagatgtgcgcctagactaatcaaattgttaaattatctcaccgagcatttgctgaataaaagagattttgctataccaccccataatgttgattctgaaaatggggaatgcagtgtttggaagtttgcagatcccgagatggaaatgaaatatatttttgaggctgcaaaatcttggataagtagtggggttgctcccagagatatatgtattttggttaagcagcagttggaaaggtacgctggtgggttgatagaatatttaaatcgaaatggtataaatgcgagagacgagagtaaataccaggaattacttactgatgatgtgatattgtacattatatattcaattgaaaatattgtcggcgccggttctttacaggcaaaaagcttctcgttacgatttcttcgtaatcttcattctgaatatgaggatgaaaaaatgctgaaactagaaattgcctatttcaaattttgccaaagaatgctccaatcgattacgcttgggcaatcttcttcgagtactattagtgagatgatatcgaaaatccttgattttgccgggcgagatcggataatggcatatttccctaattacaataacgctacttacttcaatagttgtgttgctagtcttgaaagtgagctattgatctgttatgccagagctcaaaacctagttgcggccatttctatgataaaaggagaagaaactatacctgtaatgacaattcataaaagtaagggccttgaatatcattcagttgtttttgtgggtcttgaagactcagctttttggacattcgaaagacagcccgatgaggacaagtctgcattcttcgtagcgttgtccagagcaaaagagcgggtcatcttcaccttttgtgatatacgtgatggccgaaccaagggcgagcggcaggcaaacaagaagatccgcgtgttttttgatcaaatggaaagttctggattggtaaatattagaacacttggaaattaa

SEQ ID NO: 79164 - DNA, 2073 bp, Rhizobium sp. Leaf391
atgcggatcaagagcgttgaaatcgagaatttccgactattgcggcaggtcgcggtcggattggaagagcggacgaccctggttgtagggcggaacaatagcggcaaaacgtcgatcgctgagttatttaggcgactcctgagcgagaaatcgctctcgtttcgattggaggatttttcgctgggctgccacgaagggttttgggctgctttcgaagctttccaagccgggcagccggtgcctgatgtagtcgcgatgcttccagcgatcaaagttgcgatcgaaatcacgtatgacgtcgactcgccggatcttggcccgctcagcgactgcatcgttgatcttgatcctgactgcacggatgcgcgcctcatattgacttacggcccgcgcccgactgcgccggaattgctctttagcggcgtggcggtcggcgacgacgttgctgttaaccggctgaacttgtttcgcacggtgggtgcgggactgtccggcgcttatggagcgtcgctagaggccgttgatcccaatgatccgaccaaccgcaagctgctcgagccaaagatgattacggcgctgatccgtggcggtttcatcaacgctcagcgcgggctcgatgacgacacgcaccgcgagcgcgacgttttgggcaaagtcgtggaggtgcttttccaatctgcgctcaccgaccccgtcgaccctgagaagcggaccactgcggagcagctgaaggcagctgttgagcaaattcagggtgacctgcatgcgggattcaacgcgaagctcacctcgctgctgccgaccttcgacttgttcggttatcccggtctttccgaccccgggctcgtcacagagacaagtttcgacgtcgacaagctgctgaacgatcacacgaaggtccgctatgtcggcgtcaatggaatgaccttgccggaaacctacaatggtctcggtgttcggaacctcgtttacatgttgctccagctattgcggttcttccgcgagtaccaggccgccccgacgtccgcaggggtgcatctgatctttattgaggaaccggaagcgcatcttcatccacagatgcaggaggtcttcatccggcagttggaccagatcatcagcgcgtttgtttctcagcttaatgagaataggccttggccggtccagtttatcgtgagcacgcactctccgcacatggcgaacgaggctcggttcgaggccatgcgctatttcctttctgtgcctgacggcgatggcatgcgccgttccgttgtaaaggatttgcgtagagggatgggtggtgcaccggaaccggaccgcgagttcctccgtcaatatctgacgctgacgaggtgcgatcttttctttgccgacaaggcggtgctcattgagggcacggcggagcgtatcctgctccctgcgatgatccgcaagaccgatgtcactgcggtcggtgagccgcagcttgggagccaatatctcaccgtgatggaggtcggcggggcttatgctcatcgtttcttcgatctgctatcgttcctcgaacttcgcaccctcatcatcaccgatatcgattctgttacgcctaacggtagcggaaagcgcgtcgccgtgccggtggcggaaggcacgttcacgagcaacggatgcctcaaagcgtggttcgacgccgatgtgtcgccggctgcgttgatcgcaaaaactgaggcagaaaagactgctggcggccggcggcttgcgtttcaagtaccagaggttgacgaaggtccgtgcggccggagtttcgaggacgctttcatcctcgcgaatcctgttcgcttcccacttggcgacggtgaccgggcgctggcagcctatgctttggctggcgatcaaaagaaatcgaccttcgccttggagcatgcaatcgagcacaccgattggaatgttccgcgctacatgagcgaaggtttgcgctggttggcacaaggcaacccggcgccggtgcagccggcagctgaggttgctgtcgagatcattgccggcgtcgctggagtagccgtgaatgtcgccgaggttggtgatcatggttga

SEQ ID NO: 79165 - DNA, 1761 bp, Rhizobium sp. Leaf391
atggttgaagaggttgaaaatcctgcggatgcggctgggagagttgccctcgagcggatgttcgcctgtctcgataacggcagcagctttcggcttgaggctggcgccggcgccggtaagaccttctcgctggacaaggcgctccgccgtctcatagatcaacgtggcgcagagcttcttcgggttggtcagcaagtcggctgcattacatacaccaatgtcgccaaggacgagatcatttcgcgtatccaggcgcatcccgctgtgcgccccgagacaatccacggcttctgctggtctttactcaaggactttcagtcgacgctccgggcactcgttcccaatctcgacggctgggcagagcggctggatcctgtcggcggcattggcgcgcgacgcgtccactatgagttgggatatccaagcgtcggcgaccatcaggtcacgctccggcacgacgacgtgctggcaatgatgattgaagcgttgagctatcccaagttccgatctgtgcttacagcccgctttccaattctcctgatcgatgaatatcaggacaccgatgctggcttcgtcgatgcgatcaaggcgcagttcctcgatgggggacatggaccgcagattggcctcttcggcgatcattggcaaaagatctacggcgagggctgcggtttggtcgagcacccggcgctggtggtgatcgacaagaacgcgaatttccggtcgaccgacccaatcgtgcagatgctcaaccggatgcgaccagcgctcccacaaacggttcgcgatcccgcgttgccgggtgaagctcggctgtttcataccaaccaatggcctggtgctcgccgtaccgggcaaggtggtggtcactggacaggcgatacgagcccggaggcagcgaaagcgtatttcgcgcatatcaaacagcggctggctggcgagggatgggacttcgcggtcgagaagaccaagatcctcatgctcagccacagcgtgcttgcccgggagcaaggctatgcgaacatcccgccgatctatggccagttcaacgatccctggcttaagaaggacgatccacacatcaagtttctcgcagatcagctcgaacccgcatgcgcagcgttcgaggccaagcgatacggtgaaatgttcgagtgtttcgggaccggagcgcccaaaatccgcaagcatgctgacaaggtcgcttggacgaatgccatgaccatcctactcgctctgcgtatgtcgggcacgatcggcgaggttgtcgattacatcgctggtcagccgcacatgcgtctaccggagaccgttgaggatgcggagaaaaggctggctgatgctggccctgaaccggtcgaaggggagcctcggcgcgtcacaagactgcggaagctccgcgccgttccttatattgagctgatagctcttgatcggttcatcgacgggcacacgcccttcgcgaccaagcacggtgttaagggtgccgagttcgagaacgtattggtgatcgttggccgcggttggaacaaatataatttcaatcagatgcttgaatggatagaggcagggccgcccgccgataaggtcgagttctttgaaaacaaccgcaatcttttctatgtggcgtgttctcgaccaaaggtgcggttagccttgttgttcacgcagttgctcagcgctgatgccatggcgcggctgagtgcgtggtttggcgcggacaacatcgttgcgctccctgctgatccgggggtggcatga

SEQ ID NO: 79166 - DNA, 2244 bp, Methylobacterium sp. Leaf465
gtgaagataagtcaactgaaagtcaaaaatttccgcctactgcatgacgtttcacttcagcttgaaaaaaagacgaccgttgttgtgggtcggaacaactgcggcaaaacgtccttgtctgatgtcatcaagaaattcctctcagaaaagagcagcttcgagatcgaggacttctccagcgcgtcctacgaaaacttctgtgccgcgcaccgggcctacctccagaacgcggacccgcaagaagtccgcgctttggtcccgaccatcgagctccgcattcacgtcaaatatgatccggccgttccagaattcggaccgttgcaggagttcgtaatcgacactgacgacacatgtaccgaggcggtcatcgtttgtcggcgtgctctagctgacggccgcattgatccactcttcgacggtcacggcaaggtcgtccttgaaggcgatcctgcgcagcacaccgaagcggacaagctcgcgctcttccgaagcctggccgaacgcattcccagccatttcaccacacgtatgtgggctgaagatatcaatgacccgacgaacacgcatgaggtgacgccggcggccgtcacaaagcttttgtcgcttggcttcgtgaatgcgcagcgcgcgcttgatgggaccggcggccgtgacaccgacgttttggcgaaagtacttgagggtctcttccaaagtgcttcggtttcaacggccgacggctcgcaaaaggatatcgccgaagggctcaagaaggctgttgaggaaattcagacggggatcgatagggacttcaaaggccaactggccaagctcatgccggccatcgaatattttggctatccgggtcttgataacggcccgctctatccagagacgaagctcgaaattggcaagctcctgaccaatttcaccaaggtccagtatgcgggtcacaacggcgtgcagcttccggagtcttacaacgggctcggctaccggaacctcctctacattcttctcaaaattgttgggttcttccgcgaattccgcgcgcacgctcatgcacccggcctccagctcatcgtgatcgaagaacctgaagcgcacctgcatcctcagatgcaggaagtcttcattcggcagcttcaattgattgtcaaaaggctctgcgcactggagggtgagaacgtcacctggccggtgcagtttatcgtctcgacccactctccgcatgtcgcgaacgaagcgcggttcgatacgatccgctattttgcgatcacgtcgaaggatcaacctgtcggcgtccgttacacgcaggtgaaagatttaagtagcgacctcgcgggcctcaaagggccagtcgcacacttcctgcaccagtatctcacgctaacgcgatgcgacctgttcttcgcggacaaagcgattctgatcgagggcacaacggagcgtttgatgctgccgcaggtgatgcgggcattggagcaggccgatccatccctgaagctcggcagtcagtacacgacgatcatggaagtcggcggtgcatacgcccaactcttcatacccttgcttgaattccttggactgcgaagcctggtcgtgaccgacctcgatgcggtaaggaagaacgagaagagcaagctcgaagcgtgcctcgtccatgagggagagagcacgagtaactcttgcatcaagaactggttcgctgaggtcgaagccgatccgccgccccctacggaagctgaagaagtcgaggagccgcaggcagagccggcagtcaaatccgcagccgaagcgatcgccgatctcgctgatgacgatgaggaggaggtgaaggagggtacgaccctattcgaccttgcagtcgcaatgacggctgacgccgcgaagaagacccgcggctcggtgcgcattgcctatcaggtcccagaggcggacggggggccgtgtggccgcacgttcgaagacgctttcatcctcgcgaaccaaggtttgtttggcatcaccggcgccacgaacgacgcgctcgcgaaagctgccgccgataaggcggccaagcagaagaagtccaaatttgctctgacctacgccatcgacaaaacgaactggacgacgccccggtacatcaaagatggcgtcgtttggcttgccgacagcaacgcggctgttgtcgatcccggcgtggcgctggcggctgaagcacaggccgcaaacatgatcgaaaatcttggagaaaagatgaccacgggagccgccgaatga

SEQ ID NO: 79167 - DNA, 1743 bp, Methylobacterium sp. Leaf465
atgagtgaggcgaccgaacttaatcctgctgaagcggcggcggttctttcgtgggaagagcttcgcggctatctcgatgacgggtcgagcttcgtcttcgaagcgggggccggggctgggaagaccttttcgctggtcgaagcgctgcgacacatcctgaaagatcgctcccgcgaactccaacggtcccatcagcaagttgcatgcatcacctacaccaacgtagcgcgcgatatgatcgtcgctcagacagacggccacccggcgatctactgcgataccacccacgccttcgcgtggatgcttatcagcggcttccagaaacggctcgttgagctcgtccgcacgctttccggttgggtcgaccgcgttgaggagctgaaggcggcgaacatcacaggtgtcggttatgctctcgggcggcgcacgatcgaggagagcaccgccaatctgcaccacgacgatatcttcccagtgctcatcgagctgatgaaatcgaagaagtttcgaaatacagtgacgtcacggttcccgattgtgctggtcgacgagtaccaagatagcaacaaggctctcgtcgagtgcctagcatctcacttcctcggccagccgaagtcaccgcagtttggattcttcggcgaccattggcagcgcatctacgatgacacctgcggagccatcgagcatgaagcgctcaagcgcatcgggaagaaggccaacttccgcagcgcgaagcccatcgtcgattcattgaacctgatgcggccagagcttgcccaagcggtgaaggacccttctgcgcctggctcggtgcatgtcttccacacgaacggctggatcgggtcacgggaaacgaaaaaccactggcaaggtgacttgcctgggccgaaggccgcaagcgcgctgacgaaggtgcgcgcgacgctggctgctgagcatggctgggacttcgccggcgacaccaagatcctgatgctcacccatcgggcactcgcgaccgagatgggctacagctcaatgcggaacgtcttcagctacgccgactcatatacgaggaaggcgaacgaggtgatcgcgtactttcacgaacatctcgaaccggcggcgcgcgccttcctcgacgggaagtacggcgcgatgttcgaggccattgatgcccggcggccgatcatgtctggaccggcggacaaggcaaaatgggcgggcgcaatgaagcgcctttgcgagctgcgtgataccggcaaggtcggcgaagtcattgctcaccttcaggcaacggggctgccaatcttgtcggacacggtcgagcgtcaggagaaggatcttgccgatgccatcgccgccgggggggagttgtcgagccgccagaaggaactgagcaagctgcacaatgtcgactacgcggacgtcattgccctttgtacttacctcgatggccactcgccgtttcaaactaagcacggcgtgaagggcgatcagttcgagaacgtgcttgtcgtatttggtcgcggttggaacgagtatgacttcaacgcttacctcggaatggcgaagaatcccgctaagatagcggccaaggccgccgcctatgagcgctatcgcaacctgttctatgtcgcggtttctcgcccgaagcgtcgtctggcgctcttgttcacgcagaagctggacccttcggcgatggcgacgctcaaagactggtttggacagcacccaattctcgatattggttccacgctatag

SEQ ID NO: 79168 - DNA, 1854 bp, Rhizobacter sp. Root29
atggccattttcggcaaagacagcggaatcgcagtcaccaccgttcgggtgctgaacttccgttccctcgcgaacgtcgaagtcgagctgggcgacctcacggtcgtcatcggggccaacaacgccggcaagacgagcttcttggatgcgctgttcgccgcgatcggtgccgggaggaagcttctatccgtggacgacgtgaggttggagcccgccgaggccacggcccccaagacccgggagatagtgatcgacgtgaagctccgcccggtaggcgacgacggcaaggtcctcgacgcctaccccgccggcagcttctggacgggtctttgggggacgccgggcatcgcggtagacgcggagttcaaggagttcacccccatccgcacgacgctcaaatggagtgcggtgaagggtgaatacgtgatggaacgcaagttcttgaaggagtggcgcgacttcgcggactggaccaacgcggcagtccacgaccggctggtcagcgcggcccagatggagcccatcgccctgcactacgtggacgccaagcgggaccttgacgacgacttgcgccgccccgggtcgttctggaggcggctcacggaggacctgggcctgagcgcgacggacatcgccgcgatggagacgacgctgtcggagatcaaccagacgatcgtcgacaagagcgagatcctcaaacacctcaaggaaagtttggcgggcttgcagaacgtggtgtcgtccgacagcggcagcgtggacatcgcgccggtcgctcgcaagcttcgggacctgtcgaagggcgtggacgtgtcgttcagcacggctggggcccagtccttcccgcttgcgcggcatggcatgggcactcgcagcctggcgtctctgctcgtgtttcgcgccttcgcctcctggcgcaacaagcaggcgaccaaaggcggcgacaaggtgcactcgcttctggggctcgaagaacccgaatcgcacctgcacccgcaggctcagcgctcgctcttctcccacatcaagcagattcccggtcagcgcatcgtcagcacgcactcgccttacttcgcggggcaggcgcaactcgaagagctgcgtctcttcatgaagaagggtggcgacacgattgtcacgcggatcgacttgactccgctcaccgaccccaacgacgtgcgcaagctgcaagagacggtcatcgacactcgcggcgacatccttttctcgcgcggggtggtcctcttcgagggccagaccgaggagcaagccctgccgatttgggcgcaggagtattggggcagcacgattcacgagctgggcttctgcttcgtgcggaccaatggcaccgactacttccctttcatctggctcgccaaggcgctgagcattccttggtacgtcttcgccgacggggaggagcagcctgtgaaggacctcgacagcgcgttgaagaaggcgggggaagcggattcggccagccaccccaatgtggtcgtccacccgaagggcaagaatttcgagtcgcaactcatcgacgagggttacatggccgagatcgagatggctttggacgagatgagcggacggatgggctatcttgacgaatacatcaaggagaagcacgggcagaagggcaagaagggggtcgttcgtgactaccagtccgccggaggacgcgagcgcgcggcgttcgacgcgttgtccgcagcgaagaccagcgtgtccaagcaccttgggtacgtcatcaccgcccacaaggaccccgtgcgccgattcccgaagaccatcgaagcgctgttcaaaattgtcggggatgcgcacaaattgaagattgcggaggccaagaaatga

SEQ ID NO: 79169 - DNA, 1848 bp, Rhizobacter sp. Root29
atgaatgcgccgttcaatgccaggctctccgcggagcagagggaagttgtcgagcatgtagatggcccgctgctggtcgaggccggccccgggtcgggcaaaacccgcgttctaaccgaacgcatccgcaatctcctcacgagcgttcgcggacacttccgcgtgttggctctgaccttcaccaacaaggcggccgacgagatgaaggatcggctgcaagatctgggcgacgagcgcgagcgcgcctttatcggcacgttgcacagcttttgcctggacctgctcaccgagcggggcaggctcgtcggcatcgaaggcgtccccaacatcttcgagcagttcaaggaccgcaaagacgtgttgctcaaggcgatcgacgaagacccgttcctttcggacgcgatcggacaaatcgaagacgccaaagagcggaaccgacaggtcgacaagtggctgacgggcatctcccacgtgaagtcacacccgattacttgcgctgtgatcgaagatgagctggtcaagcgtgctctcgacgcatacgaggcgggcatgcgagcgtgcaacgcctacgacttcgacgatcttctgctcctgacgtatcgcctcttggtcggaaatccaaagctcgcggacttgtatcggcgcctctatcgcttcgtttgcatcgacgaggcccaagacatgaatgaggcccaatacgccgtgatttgcgcgttgtgcggcaacggatacaagaacgtgatgttggttggtgatccgcgccaatccatctacggcttcaacacgtcgagcccggaatacatggaacgcttcggcgtcgagttcggggccaagcgggtcgcgctcacggcgaactacaggtcgtccaaggcggtcgtcgggctggctcagaggctcgatcccaactacatggtggcgatgcagcttcccattgagggagcggtccaaatcatcatggggctcgacgagcaggacgaagcgcgacaggtggccaacgagttgcaaaggctcttcgccgaaggacaccccgatgtcgagggcggcgtcgagccgtcgaagtgcgccatcctgggccgcactcgattcgcgctgttggcgattgaagccgagctcaaagagcgcagcatcgcccactacaaacgcctatcggccaatcacgagaacgagtcggccttggtcgaggagtttcaacttgcgctgcgcgtgctggccaacccgaaggaccgccttcacatgtcggcgttggcgaaaaagtggaaggctgcggagccgtcatcgacccccgacggctacctgcaatcgctccgagccatcgcgcaggcgacgcagtcgcggaacgccgtgacggtctgcgaggccctcgacacgatgagcgcgggccaagcgcgtttggacctaatgcccgcgctcaagcgtctggaagatcacgcagacaacttggacgagcccgatcgactggcgatctacgaagacaccgtcgtgttccgacatgagtgggatcagtatctcagggcggcaagcgggtcgatttcgctcacggcatttcttagcagcaaagcgctgggcaacacgcagaaggcggctcgcgaaggcgttgctcttctcacggtccactcttccaagggcctggagttcgacgtggtgtttctggctgggatggccgaaggaacgttccccgattggagagcctcaggcgcgaaagaacaggccgaggaggtccgcaacgcgttcgtggcggtcaccagatccaagcgtcttctctatctgagctaccccgccacgcgtgtaatgccgtggggcggaacgcgcaggcaggctagatctcggtttctggcgaacctttcttga

SEQ ID NO: 79170 - DNA, 1806 bp, Aminobacter sp. Root100
atgcgcgttgccaggatagtattgcaaaacttccgcgcgttttcgtcactcgacgtgaatatcaccgatgatctttgctgcatcatcggcgagaacaatacagggaagaccgcgatccttcgggcggttcagatctgcctggacaatttgctgccgtcgagctttcgctcgctattccgcgaagacatacattccgggatcgatatcacccaccccaaccaggttctgatcggcatcgaatttaccggcttcgaggggcgggtaaacgaggaagcgttggtcagcacatggaagaccgccgccgatcgcgcgcggattttctaccgatttcgaccgcgcccctcggtgcgcgaacagctggccagtggcgacctgctccctggctccctcacactcgaagactaccaatgggaaatccgcgggggtggtgatccggcggtcgaccttacgaatatcacttggaatgacgagggaatcggtgaagcagttaggttcgccgacctccaatcctatctcctcgttcacctgccggcgctccgcgatgtggaaaatgacctgcgcaatcctcgccagtcgcctcttatccgcctgatcgaggccttcgaaatcgatgccgcggaacaggcggcgctgatcgcgatcctcgacgaggccaatcaggccatagctcagtcgcagaccatcgctgaaatcgccggagcgatcgacaaaaggttcaagtacgtgtccggcccggcgttcgaaatggacgccaccctcgggctctctgcggcaacctttcgcgcgatcatccgcaatctcaagataatcttgtccgacctgtcgcttagctcgtttgaacccggtcgcaatggtctgggaatgaacaatatcctctatgttgcgattctgctcgaatatctccagcggcggatcgcgctcgaccgctcggccggccagctgatcctgattgaagaacctgaagcccatctgcatccgcagttgcaattttcgctgatctccgcactgcgcgacattggtgtacagacgatcctcaccagtcacagcacgcaggtgacatcgcgagttcccttgagcagcatagtgtcgctaaccaagcgtgaggatgcgacgattgcggcgggcaatttggcgcataattcagcgctcaacgacaatgagatcgcggaccttcagcgttatctcgacgcgaccaagagcagcctgctgtatgcccgaaaagtaatgctggtcgagggaccggccgagatgttcctgatcccggcgatgatcgagaatgtctatggtgtgcagttggagcgactcggcatctctgtgatcgcgattcacggcgtccacttcgacgtttatgccaagcttttccgatatggatcgctcgaaaagaagtgcgcgatcgtagcggatgctgatctgataccatcagacgcggatagctttgatccagaaactcatgctcccgacctagtggcgcttgagggggcgttcgtctcagtgttcgccggggccacaaccttcgaacgcgagctagtctcggtcggccgcctgcctatgctcatcgagaccgttcgggcgcttggcgcgccgcaaattctcgaacaactcgagaacgggctgatcgatctccaagtgggcggaatgggcttcgcagaggaaattgcgttgcgcgtcgaactcggtcggctcacgctcaacaccgccaggcggttcggcaaagcacgcttcgcccaggtcgcagcgcgttatgcgcatctggcggcggacttgccgacgtacatcgacgaagcctatcagtggctcactgaatga

SEQ ID NO: 79171 - DNA, 1761 bp, Aminobacter sp. Root100
atgatcccgctcactcccgaacagcgcaccgccgtcgagcatgatggtaatctcctcctgaccgcgtgtcccgggagtggaaagacacgcgtcatcctagccaaactgctcgcgctggccgacgcggtcgttggcacgccgcagtttgtcgcctgtattacctatactaatgcggcggtcgatgagattgaagctcggctccggacctatggaggcaacgccagcgccgacaagtgcgagatttcgactatccacgccttttgtctcgaatttattctgaggccctacggctggctagttcctgaggtcccgcgcgcattccaggtgctcacgcgcgaaaatccaatattcgaacagatcgtgacagcggtggaagacgcctacgggcgtcaagcgaccgcacgtacgttcgacgactatgagggactacgcatcaatgtcgacggtgcagcctgtgggcaggggcttgagggcggcatcgtcacgccggagtcagcggcactctactgggaacgtgtgcgagaccatcgctgtctcgatttcgcgatgatcctctattactcttggcgagtccttgctgcgcatccgtttgttgggcgcggtattgccagccgcttcgcctggttgctgatcgacgaattccaggacacgaccgatatacagcttgcgattattggcaagcttcagagtttcctgcacacgcgattcttccttgtcggcgaccagaaccaatcgattatgagattcgcgggcgcgcggccagatctcgcggaccagttcggtcagcacatcggcgcccgtcgcgatgcctcacttaccggtaactttcgctgcggtccggcgatcgtcgcggcggcgcgtacacttatcccgaccatgcccgccatgcagtcggcgggcgccgcgagcgagctcaacgccagcgtgaattatgttcatgtggcgcgtccgctcgatgccatcaccgactatttcctgccggctttgcaggcagccggcattcccttgggcaaggctgcaattctcgcgccgtggtggacccatctaatccccatcgcgcgagcgctgcgtgagttcgatgtgcccgtcttcggacccggcgctcgcccatatcgacgccgccgtctcattgccgggcttgcggagcagttaggtgcatgcgcggtgtccagcgactatcttggtctcccgggtgtcgagcgggccatattccgtctgatcggagattttactggcgccacgcgccacgatatcttcagctacgtggggcggcgcaccgccctcggcctgatctatcgcgcccgtgcccttgccgatgaccaccccggcggtgtcaactggttacgcgccatcgctcgcgaagtcggcgattacttggaacgcgaggagtggcttcccgcagccgcgaagccatcgctcatcgattccgccgaagtgatgctcactgatatgcgcgcaaacagggtcgatctcggcaatctgttgatctcggatatggggctgttcgccaatcccgccgaagcgctcaagttgatcacgctccacaattcgaagggtcgcgagtttgagggcgtggctttggtctgcatgaacgacggcagcattccgcacttcgcgacctcgacgcaggagcaatatgatgaggcccggcgcttgttttacgtcgggctcacgcgtgcgaaacaggtgctagtcgtcgcctccgatgcctcgcaccatcgcaatcgtccgacacctttcatcgcagatgcgggactctga

SEQ ID NO: 79172 - DNA, 2340 bp, Aminobacter sp. Root100
atgcggatagaatttgttgaaattgcaaatttcagaaagctgatctcaacgagaattggcctttctgctgaaaagaccgtcttcgttggcgcgaataacagcgggaagacctcagctatcacggccttgcggtactttctcgtcgatcgggaacgaaccagcttttgcttcaatgattttacgctgtctcattggccgagaatcgacgcaatgggtgctgcctgggaggcggcgcacgtagcgcagcaagccctgccggaaccggagtgggatgcgttcctgccgtttctcgacgtttggattcaggtcgaagaaaacgaagtgcactacgttcagggcatcctgccgacgttagattgggggggaggccgccttggcgttcgcgtcaggtacgaaccaaaggatcgtgaacaactccagaaagattacctggcagcccgctccaatgcccgcgatctgcaaactgcgggcgctgcgcttgcagaagaacaaggtcaggacgttgcacagtttcaagtcgcgatctggccgcggacattggtcgaatttctgcaacgccgcgtcacgcattacttcacgattcacacctatgtgctggatccgaccgcatgcgtcgatccgcagcatgggcgggcccaaccgcaggctctgcacggaagtgagcccattgagggcgatccgttcaaggggcttatccgcattgacgaaatcagcgcgcaacgcggctttggccatgccggcgaaagcaacattgacgacggcgatgcgtctggatcgggttcgacgtctcgcaaactctcgtcccagcttcggcaatactataaaagccatcttgatccgtatgaaaatccggatgccaaagaccttctcgcgctcaaggcgatcgaggaagcccaagaggcattcaatgtccgccttagcgacggctttgaaagcccgcttaaggagatgcacacgcttggctatcccggcgtcacagatcccaaactcaatatctcaacgcgcttgcgccccgtcgaagggctcaaccacgatgccgcagtgcaatttgtcgtgccgattcaaacgggcggcgctccaatcaacttgtatctgcccgaagattccaatgggctcggctatcagaacctcatttctatggtgttccgtctgatggcgtttcgcgacagctggatgagagttggaaaggcgcaaagcaaagcgtccgatgacgcgatcattccgccgctgcatcttgttctgattgaagagcccgaggtgcatctccacacccaggtgcaacaggtctttatccgacaggcctacaagatccttcgtaatcacgatcatttaggggcaaattctaacttcgtgacacaaattgtggtgagcacccattccagccacattgcccacgaatgtcactttgactctctgcgctacttccgaaggctcccggcccgtgagcacgctatcccaacatcatgcgtggtgaacgtgggcgaggctttcggcggcgagcaggaaaccaagcgcttcgtgacccgctacctgaaagtcacgcactgcgatctattctttgccgacgccgccgtgctgatcgaaggaccggcagagcgcattctcgttccccatttagtaaactcgcacaccgagtttcataagctcgctgagagctacatcacatggctcgaaatcggaggcagccacgcccacaagctacgcagcctcatcgagaagatcggactaacgacgctggtcgtgactgacatcgattcttgcgacgcggcgggttccagtgcggcgcccatgcgtggggcgaactacacgacgcgcaaccacaccctcaaaacgtggtggcccgagatcgcggaattggacgcgttgctggacaagcccgaggccgaaaaatccaaggactatgacgcagaacaattcacgcttcgcgtcgcgtatcaatgcccgatcgaggtcgagttcaagggtgccacagccgaagctttggcgtacacgctggaagacgcgatcgtcgtcgccaacatcgaatttttctccacgcttcccggtaccggcctcatcgcaaaattccggtcggacatcgagaatagcgttgattttgcggcgctcagcgcagccatgaaagaaacgttgaaggggggcggcaaagccgaattcgcgctagaccttcttgagatcgacaatcccagtgatctgaaaccgcccaaatacattcgcgaaggcttgctgtggttggcagcgcagcttgagcagaagcagaccgagctggggctggtcgcgatagcgccggtagaagccgaggctggcgccgatgccgaggctggcgttgagatcgccgcgtga

SEQ ID NO: 79173 - DNA, 1902 bp, Aminobacter sp. Root100
gtgaacattgatagcgcttcagttggatcgaatgtcacgcgcgacgatccggtcgaggacgagatcgcgtcgtatctcgatctggaaaatccaacgagtttcttcttattcgctggggcaggctccgggaaaacccggtcactcgtcaacgcacttaggcacatcgctgcaaaatatcgggatacgcttcggctgcgggcgaggcacgtcgcggtcatcacctacaccaacgctgcctgtgacgagatcacgcgtcggctggaatatgatccgctcttcgtcgtcaaaaccatccatagttttgcatggtcgcaaattcaggggttcaactccgacatacgggaatggctgcgcgtaaatcttcagacggaaatcgccgatttgacagccgaggaggccaagggccgcgccggtacgaaagcgtccgcagcgcggctgacgtcaattggatcaaagcagcgtcgccttgctcgactcgatgagatcaaggctttcacctacaatcccaacagcgataaccgcgagcgcaacgccctcaatcacagtgaagtcatcaagatttttgcgaccttcctgcttgagaagtcgctaatgcagcgaatgttcgtcgagaaatatccgttcctgctgatcgacgagagccaggacacaaacaagacgctgatagacgccctcctgacggttcaacaggcgcacgcgagccgtttctgcttgggactcatcggcgacaccatgcagcgcatttatctggacggcaaagagaacatcgaaagctcgttgccgccgggctggaaaacgcccgagaaggtgctgaaccatcgttgccccaagcgtattgtgcgtcttatcaacgccattcgattgggtgcagacgagcaggttcaggagcctcgcgacgacgcgattgaaggatgggcgcgactgttcgtgttccccgtcgatacgccggataagcccgcgatggaggatgaggttcgtgcctatatggcagctctcaccgatgatgcgggttggagtgaccgcgaccagtgtaagattctcacgctcgagcaccacatggccgcgaagcggatggggtttgggcagctgttcgaggcgattgcgccgatcgaagcgtcccgcacagcgtttctcgacggcagcttcgcgccgacacgatttttcacgcacagcgttcttccgctcgttacggccacccaacgaggcgataagttccttgcgaccaagctcatccgtgaagcgtcgccgcttttgagcaaggacacgcttaaaggctccgaaaagcccttaaatcaactgcgcaccgcgcaggcggcgatcgatagcctgatgtcgctctgggcgaatggcgaacccacttgcggcgccgttctggaaaacgtcgcgagcaccaatctatttgttgtgcccgatagcctcaaagccgccctggcagcattgagtgcggagccggtcgtttctgacgacgacgaggaggctgacccggttggcgacaatatcgccgcgctgctgacccttctggattgtccgttctcgatgattgcgccctacgcttcatatgtcgcgcacgaggcctcctttgacacccatcagggggtcaaaggcctcgaatttgatcgcgtaatggtcctcatggacgacggggacgcacgcggctttctattcggatacgacaagctgcttggagccaaagggctgagcgccagcgatttgaagaatgctcaagaggggaaggattcctcaatcgatcgcactcgacggctgttttacgtcacttgcagccgagccagatcgagcttggcgcttattgcttactcagccgatcccggcgcgatgaaagcgcatgtgatccagtcaaaccttttcaaagaggatgaggtttttgttggccttccggcatag

SEQ ID NO: 79174 - DNA, 2337 bp, Ensifer sp. Root31
atgcatcttcactctctgacttataagaactttcgtagattgagagatgcacgcgtcgagtttgcaaacgatttgacaatatttgttggagccaacaacagcggaaaaacgtctgcaacccacgctgtggacctgtttttgtctggttctaaggacaagttcactgtcaatgatttcagcgcagattgctggccaggctttgaaaatttcccggcggaagatgcggctgagcaagccttcgaattcccagccataactcttgatgtgtggatcagcgttgatccggacagtctctaccgggtagtagatctcttgccccgagccgcatgggaaggcgcactcgtcggcgtccggattgagtttgccgcgaaggatgccgcccaaacgctggccagctaccggaggatggcgaccgaggccgcgaagttcgcgcagaccaaggccgagcatggcgcggattacaagccttggcctcgcaacatgcgcgactacctcgcgcgcgagctgaagaatgaatacggcttgcgctatttcatcctcgacgaagcgtcgctcgaccctgcgaacgccgccgagacttatacgccgaaggagatcctgggagacaccgagcgcacgggccactcgatcatcaattcgctgatcaaggtggacttcctgagcgcgcagcgacacttaagcgacggtaacgcacaggctcgaaccgaagatctgtccaagcgcctcagccgtttttacacgcgcaaccagagcaagcgcgaagacgaccacaacgccctgcgcgcgttggcgctatctgaagaccaactgacgaagcatttttcagacgtgttcaaggatacgttcaaatcgctgcgcaagctcgggtatcccggcctttccaacccttcactggagatccgcgccgccctgcggctggagcgcctgatgggcgatcagcaggccaaggttcactacctgctcgaagaggcgaccggtgacgcagaagccctgtctctccccgacagctacaacgggttgggttttaaaaacctcatctacatgggcgtcgaactcctcgacctccatgctgcgtggtcggtcacagaggaaggtgaggaagaaaagcgccaaccaatccacctgatgttcatcgaggagccggaggcgcatatgcacgcgcaactccagcaggccttcgttcgcaagctcaccgaactcatcccgcccgcaggggcggacggtcacgccacgcagttcgtgatcacgacacattccccgcacatcctgtacgagcggggcttcagaccgctacgctatttccgccgttcggccgaaatcggctccaagcaaagctcgtctgttttcaacctctcagccttctacgagagcaacaaggaagaccgggacttcctccagcgatatatgaagctgacgcattgcgacctcttcttcgctgacggcgcaatccttgttgagggcaacgtcgagcgcctcgtacttccgttgatgatcgggcacggcgctgagaagctgaacgctgcttatctcagcattcttgaggttggcggcgccttcgcctttcgcttccagaagctgattgagtttctcggcttgccgaccctgatcgtgacagacctcgacagcgtgtatccgcccaagcctaagaaggctgccgaagccgctccggacgccaacggggacgccgctacccaaagcgataacgacgcgtgtgaagacgaggacgatgagctcgatgatgagggtgcggctgaaggagatgagccgaagccaagctcaaaatgccctgccggaacggctggagctgtgacggcaaaccagaccctgcgccagtggctccccggcaagatactgattgaagaccttctggccgcggcgcctgaaagcaagctgcaagcgccgcagaatggctcgggtgcgcatgtgatggtgacgtatcagtgccccgtgaccgtaacgtggggagcggagacggctgagctgaagagccgaaccctcgaagaggcgttcgcttacgaaaaccttgaatggtgccagaagaaggagcaccacgatctgaagctgcgatggagcaaggcgggaacgatgccgctggccgatctggcttcgaagattcacacgcgcgtaaaaggccagcatttcaagaagaccaacttcgccttgggtctcttggctagcagcgacgcgacgtgggtcgtcccgacttacatccagcagggcttggactggctgactcaacacgtcgcgatcgtagaagaggagacggcagacacggctgaagtcgcgggcgccgacgaagctcctgcccaacctcagaacgttcaggtgggtcaatga

SEQ ID NO: 79175 - DNA, 1890 bp, Ensifer sp. Root31
atgaccagccgcgcgggaaagccggatacgccggctgatattgaactgagaaccttgctagacgatgacgcgtctaccgggttcgtaatggtctcaggtgcagggtcgggaaagacgacctcgatcgtcaaagcgctcgatcatcttctgaaaacacgaggccgagctctccgagcgcagtccaaaaagatcgcctgcattacttacacagaagtcgcagtcgccgagatctggggtgatgtcggcaacaatccattgttccacgtgtccacgatccacagcttcctctgggcggccgtgaagccgtttcagatcgacatcgcaagctgggtcgggcgtcggctcgacaaaaaaatcacagacactgaaactgagattgcaggcttcacgaacaggacgcgggcaccgacgcgcgaacgcaaacacgccgacctagagcggtaccgagcccaaaagctcacggtcggtgatgtgaagcgcttcacctacggtgtcgggagcgactacccgaagggcattttggggcacgacgacgttatcaagctttcgaccgagctgatccgcgaccttccggtcatcgccaaggtggttgggcagaagtacccgttcatctttgtcgatgagagtcaggacaccgatccggatgtcgttgcggcactccaggcgatctcagccttgctcggcagtaagttctgcctcgggttcattggtgatccgatgcaaaaaatctacacatccggggccggcgtcatagcacctcttgagggctggaagcctatcgagaagcctgaaaattttcgctgccccgtcgctgtccttgatgtgatcaaccagatccgcgcgggcgatgacggtcttgttcagaccggcggcaaaacgaaagaggtcggaggcgtacgcgttccggtccaaggctcggcgaagctgctcgtggtgtccaagaccgaccgtacccagagcctagctgacgcgcgacaatggctagcacaccacaacagcgacgccctttggctcagcgatgaatctgacgctgacgtgaaggtcttggtgattgcccaccggatggccgccaatcgccttggcttcggctccctgtacgaagccttccacgacaagacgtctgacggtctcaaagacggtttcgatgacggcacacattgggccgtcacccctctgctgaagctgctggcccccttgatgctagccaatgccgatgacgatcagttcgaggttatgagccttctgcgtcgccatgcgccttttttgcagcgcgagtacatgcaggcgaacgctgtgcccggcattttgaaagatatggacactcggttgaaggcgctcgcgcagatttgcggagaggcttcagcgacccctgcttttgctgcgttcgagcatctgcgggacggaggcatgttcaagctggatgatcgcatcctcgcggcaatggctgaatacgatgttgcggctccatcagttgaaagcggcgaccatgccgctttggtgaagctccttcacacgccgatccgccagctatggggctatcgtcgctacattgaggagcagtcgccgttcgaaacgcatcagggggtaaagggtgcggaattcagccgtgttctcacgatcctcgatgacgaagaaggtcgccataatcagttcaattacgggaagtatttcggcatcacgcctctctccgacacggacgagcagaacatccgggacggcaaggaaacgacggtgatgcgcacccgtcgccttctttatgtctgctgctccagagccggcgaggatctgggtgtcgtgtttttcgcggacgaccctgcgcaggctcacgccgctatcgtcgcgtccggcctgtttccccctcaagacgtcatcaatctcgccgccccctag

SEQ ID NO: 79176 - DNA, 2136 bp, Rhizobium sp. Root1212
atgcatatctcgcgcgttcagctcgttaactatcgaaacttcgagcgcgcaagttttcatttcaacaaaggcataaacaccgtcatcggtgaaaacggatcgggcaagaccaatctgttccgcgcgatgcgtctcatgctggacgacgatttccttcgctgggcctatcgcatggaggaaagcgattttcatcgcgggatcggcaactggcgcggtcattggatcatcatcaacatagaatttggggaggtgtctcaggacgaagccgtacaagcacttttcctgcatgggaccggagttatcgaagacgaagcgattgctcggggaacctacaatctaattttccgaccgaatgccgcgatccggacgcgtttggcgcaactcgatcaagacgatcatgcgggtttggctgcgatcttgaatgcggtcacattggacgactacgagaccgtcttcaccggcaaaagcaccgcggacttttctgatccagccgtgtaccaggaactcgtcggaaatttcgagaccgtgcagtttccggcagagcttcatcccgcgaccctcggaggaagagttccaggcataatgtcggtcagcaaggaggtttgcttcaccttcatccaagcccttcgtgacgtagtcagtgagttccaaggccagagaacaaatccccttttgacgctcctccgcagcaaaagcggggatctggatccagcggtgcttgcgccgatcactgatcgggtgaaccaactgaatagtgaaatcgaagcaattcccgacgtcggagaaatccgggccgacatccgccaaacgatccgggatgctgccggcgaaacttactcgccagcgagcctcgcagtgcgatcggctgtcccgggtgaagcggatcggcttttccaatctctaaaattgtttgttggcgagaccgatgatgaatacgagggagccatcaacgagctgagtctcggcggcgccaacctcatatttctcagcctcaaacttctcgagttcaagtatcagaaagcaaagcaagcctgcgcgaacttcctagtcattgaagaacccgaggcccacattcacacccatattcagaagacccttttcgacagattgaattaccccgacacccaggtgatatactccacgcactcaacccaaatttccgaagttagcaacattgagaatgtcaacatcttgggccggagcggttcgcgctgcgaagcgttccagccgagtgctggcctggaagcaccaaaaatccgtagcattcagcgctatcttgacgccgtccgcagcaatctactgttcgcgaaaagcgtgatcctggtagagggcgacgccgaagaaatcctcgtgccggtgctggtgaaagaggtgctgggtgtgagcctcgacgaactgggcataagtctgatcaacatccgcagcactggcttcgagaacgtcgcagttttgtttcacgatgatcgtattcgtcgacgttgcgcaatcgtgacggatctggacgccacctttttcaacactgacccgcatccggacgatcctgatacgttgaagagtgccaaagagaaggcgcttggctcgcaggcagctggtgtcgcacgacgcactcgtctgacggccttcaaggatggaaacgactggatttcggtccactacgcgccgcgcacgttcgaagtcgatttcgttgcagccgggaacgtcgagctgacagtttcggtgctcaactccgtctacagcgacgccgcaaccattgttgctgcgaccgaggagctgcggtccggcgatgtggcaatctacggaaagcgaatcctcgcaatggcgagctatgccaagaagggctggctggcaattcaggttgctaaagtggtgacagggacaacgcgaatccccagctacctggttgaagcgatttttaccgcacacaaaccactgagccgacgagtgctagcgaacatgattgagcaccggctgaaattccacacggatccggccgttatttccgaggcgcaggttttggcgttgcgtacgcaagtcgaggcattccgtgtcggcgatttggagatcgaaccgcttcgagaagcgatcatcgtcgcaatggcaggagacgtcatcatcgacgttctggggtacgcttga

SEQ ID NO: 79177 - DNA, 1803 bp, Rhizobium sp. Root1212
gtgtttgtctgggaagacggcgacctcaatgaagagcaggttgacgccattgagcacgacggaagcgtgtaccttgccgcctgccccggaagcggcaagaccagagcattgaccgataaaatcgctttggagttatccaagctcgaaagcaaacgtcattgggtgattgccatcacctacacacaccgcgcggccgaggaaatctccgagcggatcgagcgattaggcgtgggaacggaccagctctggatcggcacaatccactcgttttgtcttgactggatcttgcggccttactccgtctatcacgaaaaactgcaaaacggatttcgcgtggtggaccagcatgaaaccgaagcagttctggaccaactatgccatcagtcaccgtatcaagttcgagcactcgattgcagatattattactcgacagccgggtgtcagctggaaaatgcgaacccgaacaggcgcctggctgcgctttccgtgttgaacggatactggcaccatttggaagagaaccggctgattgattttgagatgattttagggtgcgcttatgacctcatcgtcgcccaaccctctattcccatcctgctcggcaagctgttcagatacatcctgatagacgagtatcaggatacaaaggaaatccagtacgcgatcgtcgctgcgatactcagcgcctcggctgggaatacagagacgttcatcgttggcgatcctaatcaggccatctacggatcgctaggcggcttcgccatgggccgcttggacttcgccgctctggcaggcattgcacttgccgacaaaagccttttgagcaactaccgctcctcggacaggatcgtcgactacttttccaattattgcgtcgtcccagcggtcatcgaagctgtcggtcctgacaaagaatatccgagcgtggtctcgttcaatcaggaaatcaatcagcaggagctggacgacgaaatcgtccggctcatccgctacaatatcgagacgcttggcattccccctcacgaaatctgcgtggttggaccgcagtggatccagctcgctgccgtcacgaggcgcctggttgcagcgcttccagagtatagcttcgatggccccggcatggcccctttctctcgtgaccaagacaacatctggttcaggatttcacgtctcgccctgacccgtccagatcctcagctcttcgtccgacgcacacgatgggccaaagagattttggatcacctcagatccgcgggtgtcgacgtttcaaaaatctcgccgcgtgatctgctgcgccattgcaatagcatcgagatcgctgtggaagatgggctggagtatctggagttgttcttcgcggaactgctgttcgtactcgacattgagatcgatcttttcccaccactccaggagcaccacgtcgcctttttcgaacggtcccgggttcaaatccaacgactggagaatgccggcgttcaaggcgtatcgagcattgccatgttcagacgtgtgttcgccacccgagctggcataacggtttcgacgattcacggcgtgaagggagcagagttcgatacagtgattgccttcgctttgcttgagggaatggttccgcacttctcagaaccgaacgcggcagagagcgccagcaaactgctctatgttgttgcctctcgcccccgaaaaaacctgcaccttatcgctgaaaccggccggatcagcgggattggcgtgccttatgaaaccactcaggtacttgctgagcacggctttgcttatgatcttatagatggtcccggctag

SEQ ID NO: 79178 - DNA, 2187 bp, Nocardioides sp. Root1257
gtgcaaattaggtgctttcgtgttgagaacttcaggcgactcaagaatgctcgggttgacctcgatcggcagcgcaccatattcgtcggcgcaaacaacagcggtaagacgtcggccacgcatctgttccagatgttcctgtcgcaacaaccccgtgcgccgtttcagatctatgacttcacggccgactgctgggaggtctttgactcgttcgacgtcgacggcggggatccagacgtcgagcttccgcgaatcacgttcgatctgtggttcgaggtcgacgaggacaacctgcatcgcgtgctcgaactcctgccaagcctggactgggaaggcgagcccgtcggtgtccgaatggtgtacgcacccagggacggcgccaagttggctgcgaactttaaggaagcgcgtgcgaaggccaaggcgaccactggcgacgtgcagacgtcctataagccgtggcctcagaccatggtggagtacctgacgaagcggcttcagcaggagtacgagatcaagtactacgcactcgacgccaatgagtgcgacgaccagtttgtgctcaacgacgggtacgatccgttcttcctcggcacgcacctaaccggcgcgtcgagcatcgttgactcgatcatccgcgtcgacttcctcaacgctcagcgtcacctgtccgatgtcgactcgcacggcaggagtgaggacctctcgaagcgactgagtcgcttctacgagcggaaccttcagaagttggatagcgacctggacgccctcggggctatcgccgaatcggaagagcggctgaacaagcacttcgccgacgtcttcggaccgaccctggagcggctgggggaggtgggatacccgggcatcgccaatcccggcctggttgttaaggcgtcattcaacgcgcatggcatcctcagcacaagcgctaaggtccactactcgctgccagcaccggcgggcgcaggtgcgggcagcgagcaaatgctgcccgatcagtacaacggccttggctttaagaacctcatctacatggtcgtcgaggtgctcgatttccatcaggcatgggcggaggccgagatcgaccgtccgccgatccacctcgtcatgatcgaggagccagaagcccacctgcatgctcagctgcagcaggtgttcatccggaagattctcgaaatcttgcccgcgcctgaggcggacttccagacgcagctcgtggtcacgacgcactcgccgcacatcatctatgagagcaacttcaagccgatccgctacttctgccgatcagtcgcgccgaatgggctgcactgcagcgacgtcaagaacctgtcggtgttctacgacgatgaagaggtgtcgacgcgggacttcttacagcagtacatcaagctgacgcactgtgatctcttctttgcggatgccgccgtcctagtagagggcaacgttgagcgcctgctcctgccgcttgtcatcgagcgattcgtgcctgacctccgctcgtgtcacctgacgatcctggaggtcggcggtgccttcgcgtacaagttcgccaaactcctggacttcctgagcctgccgacgctggtcatcacagatctggacagcgtggctgttcctgaagctagcggggaggacgacgaagacgccaagcaggcatctgcctgcgcggtcgacacgcctggggccgtgacgtcgaacgaaacgctgaagcagtggcttccaaagatcggtgggatcagcgaactgctggcggccagtgctgagcagaaggcacccgccagtcctgatggcggccccggcttggttcgtgttgcctatcagacctacgagacggtgtcgtggcaggcggccgatgaggaccgagctggtcggacgttggaggaggcgttcgctcttcagaatctcgactggacgcagagcgtggacggcaaggacctgggactgcgcatcgctaaggcgtccgaactctcgatcacggagttgcacgagaagctcttcaaacgcgtcaaaggcacgcacttcgacaagaccgccttcgccctcagcgtgattgcggcggccgagcagtcctggaagtctccggcgtacatcgtcgagggccttgagtggctgcgcgagcaactggagcttgtcgtgccggaggagctcgccagccaggttgctgaggagtccgactcagaatga

SEQ ID NO: 79179 - DNA, 1881 bp, Nocardioides sp. Root1257
atgacgtcacgagtcgacgcgcctgacaccgacgccgatcgccagattcgagagattctgaaccaggatcacctgatcgggttcactgtcgtagctggcgcaggatcaggcaagaccacgtcgctagtgaaggcgctggcacatgtaacgagaacccgcgggccttcgctgctcgcaaagacgcagcgcgtcgcctgcatcacctacacagaaattgccgcgcgggaaattcacgaggagatcggcaacgatcctctcgcctccgtctctacgatccatagcttcttgtgggcgttggccaagccgttccagaaagacatcggcctctgggttgcgacccgcatcgatgagcagatcgccgggcttctcgagaagcaagcgaactacaagcccggcacgcgtcagacgacaaaggacaacgacgcggcggctctcgagaagcgtcaacaccaacaggccgccgtaaagggcgtcaagcggtggacctacggcatcggggctgactacgcccggggcatcgttggccatgccgacatcatcaagatggtgccggagatgatccttgaacgaaggctgctggcgcagcttgtcggtcgccagttcccgttcatctttgtggacgagagccaggacacctttcccgaggtcgttgaagcgttgaagcacgtttggtcgctcgcggccgggaagatgtgcctcggcttcttcggcgacccgatgcagcagatctatcagcagggcgttgtctcggtgtcgctggagcctggctgggtcaacgtcgacaagcctcagaacttccggtcttcgcggcgggtgttggcctgcgtcaatgctgtacgtgccgaaggtgacacgctccagcaagtgagcggtctgtcggagcagcccgcaggagaagcattctgcttcgttcttccgtcagacgaccaacgtagcgaccgactggaactcgttcgtgtttggctggaccaacacagcacctcagggaactggactcgcagcgcacacgagggcggctccaagatcctgatgatcgtgcaccgcatggcagccaagcgtctcggcttcgagaacctgtacgcgtcgttccacgacaacaagtccagtagcctcggagacgcattcgacgaaggcaacgcgtggcccctgactccattcagagacgtgatcctgccgctctgcctcgcgaaggaggccagttcgcccgccgttctggcggtactgagagagagcagtccgcttgtgcgtgtggggcaggcatcccggcagctcaaggccgcactcgcatcaagcaaggcagccgttgaggagttacgccaactcgcagcagatccgagcacagcgaagctgggcgacctgctccgcagtgcagccaatagtgaactcatcgaactcgaccctcggatggctgcgtacctttacccggatggcgaacacggtgacgtcgtcctcgacgagcgggttgtcgacgtattgaacgccatggccgagtgcgtcctgtccgagttggagggctactacacctacgtgaagcaggagtcgccgtactccacgcagcacggaacaaagggatccgagttcgagcgcgtcattgtcgtcctcgacgacaatgaggggcggtactcgctctactcgtatgacaagttcctcggcttgaaggatctgtcggccaccgatgtcgacaaccaatcgagaggtgtcgactctgcgatcgagcggacgcgcaggctgttctacgtctgcgtctctcgtgcgcgggagtcactcgctgtcgtcttgttctccgatgacgtggctcgggccgccgaggcagttcgccagtcagcgattgggcagcatgttcaggttctcaccgtcgatgatctgtcacctctggcctga

SEQ ID NO: 79180 - DNA, 1875 bp, Massilia sp. Root418
atgtcgatttacgctgccgacagcggcatcgccgttacggacgttcgtgtgagcaattttcgttcgttgggcaacatcgaggtggagctgggagacctcacggtattgatcggcgcgaacaacgccgggaagacaagttttttggacgcgctgttcgccgcgatcgtcgtggggcgcaagaccttgacgtcggatgatatccggcttgccaaaggcgaggcgatggcgcccaaggatcgtgtggtgactgtggacgttcggatttatcccatcggcgccgatggccggaaatccggctccctaccggagggcagcttctggactgcgctgtggggcggcgcgatcgttttggatgccaatctggatgagttcatagcgtttcgcactacgctgacgtggagcgtggcaaaggcggactatgtggttgaccgcaaaccgttgtcggagtggcgcgattttgccgactggctggcgacgcctgtaagcgagaaatccataaccgtcgcgcagctcgaacccatcgcgttgcactacatcgatgccaagcgggatttggatgacgatctgcgccggcaaggttccttctggcgccggatgacggacgatctggggctacccgccgaggacattgaggagctcgaagccgcgctctcgtctatcaatcagcagattgtcgataagagcgaaatcctcaagcatttaaaagacaacctgtctgatctgcaaggcgtggtgtcggcggacagcgcgggaatagacatcactccggtggcgcgaaagctccgcgacttgtcgaaaggcgtggatgtttcgttctccacatcgggcgctcaatcattcccattggctcggcatggcatggggacgaggagcttggcttccctgttggtttttcgggcattcgccgcatggcgcaatttgaaagcgaaggaaggcggcgacaagattcattccgttttggctcttgaggagccggaggctcacctgcatccgcaggcccagcgctcgttgttctcgcacatcaaagccatcgccggacagcgcgtcgtcagcacgcattcgccttactttgcgggccaagcccagttggcggatcttaggctcttcatcaagaatggcggggagacttcctcgactaggcttaacctggcggagctgagcaatccggacgatctgcgcaagcttcaagagacggtgatcgagtcgcgcggcgatctgctcttctcccgcgccgtggtgttcttcgaaggtcagaccgaggagcaggcgtttccaatatgggcgcaagcgtattggggcgtgagcatccatgagctgggattcacgtttgtgcgggtgaacgggacggcctatttcccatttgtatggctggcgaaaagcctgcaaattccatggttcatcgcggcggatggcgagcctcagccgttagcaaagcttgaggacgcgctgaaaaaggctaaatgcaatgcctccgcgaagtgcgacaacttggttgttcttcccaatggacagaacttcgagagccatctcatcgtgcacggctatctgccggaaatcgagctcgcgctcaacgagcttcacggcgtagagaacgcgttggataggcatatagagagcgagaatggaaaatcgtatggccccaacaagggcgttcgcgactatgctggcgaagatggtaggaagcgggcagcgaaagacgccatggggttggccaagaccaaattagccaagccgctcgctcgcatcatttccgagcttgaggatgagaagcgtcgcttccctcctggaattcgaaggttatttgatatcattgcaaaacatcaagggttgccccaactcgcgagtgataatacgaaggaagatgaggagttatga

SEQ ID NO: 79181 - DNA, 1833 bp, Massilia sp. Root418
atgagcgtgccagccaaggtcagactatccacgcagcaaatggaggtcgtcagccatgttgacgggccgttgctcgtcgtggcggggcctggatctggcaagacgcgagtgctgacggaacgcgtgagatccctgttgaccgaggttcccggccacttccgagtcttggcgttgacgttcacaaacaaggccgccgacgaaatgcgggagaggctgacggatcttggcgaggttcgtcagcgggcttttgttggaacccttcatagcttttgcctggtcatgctctcggagcgaggcaagttcgtgggcgtcgagggaacgcccaatatcttcgagcagtttaaggaccgcaaggatgtgttgatcaaagcgatcgcggacgatcctttgctggaccaagagatcaacaacgtcgaagacgccaaagagcgaggcaagcgagttgatgattggctgcagatgatctcccgcatcaaagcccaccccatcacctgcgcggttctggacgacgagatggagcagcgcgttgtggacgcctacgacgcgggcatgcgggcatgcaacgcatacgacttcgacgatctgttgttgcttacgtatcagcttctcaccaacaatcccaagctagcggacttttatcggcgcctgtatcggtttatctgcatcgacgaggctcaggatctcaacgaggcacaatacgcggtggtgtgcgctctatgcggggaatccttcaaaaatgtgatgctggtcggagaccccaagcaatccatctatgggtttaatacgtcaagcccgaaatacatgaagcgtttcggagaggactttggggcgaagcgaatcgagctcacagagaacttccgatcctcgcgcgcggttgtggagaaagcgaagtccttggaccccaactattcagtagctggccaagtgccaatagctggcgtgtgcgaatccatggtcggctccaccccggaggacgaggcccgaatcattgccgacaaaatcgaagagctcttcgctttgggacatcccgatgtggaggggcagatcacggcgtcaagctgcgcggtgctggggcggacgcgcttcgcgttgatagaggtggagaaaactctgaaagcccgctcaattccgttttacaagcgcctgaccgccaaccatgagaacgagtcggatttggttgaggattttcaactggcgctacggttgctggcgaatccaagagacaggttgcactttgccgcgctggctaagcgctggggcgtgagcgctccgcgcgatgtgatcgaggcgatccccgctatcgaagcgatggcgagctcgtcgtctgaggcgcgggctccgcgcgtaacggaggcgattagggcggtgatatgcgacgcgttaaaattcgaccttatgcccgcgtttgagaagttgaggaattacgctgacatgctggaggaagccccgcgccaggcgatctatgaggacgccgcggtgttcagcttggaatgggatcagtatctcagggcggggcggcccggtcgctccatcgcgagctttatgagtaacaaggcgttgggttcgacccaaaaagcgacccgtgagggggtcggcctcttgaccgtccattcggcgaagggcttggagttcgacgtggtgttcttagcggggatggcagaggggacgttccctgattttcgagctcggcccggcccgacgatggaggaggagaagcgcagcgcttttgtggcggtcactcggtctcggcggttgctgtatctcactttcccacgcctaaggcaaatgccgtggggggattggcgccaacaagccccatcacgttttctttga

SEQ ID NO: 79182 - DNA, 1821 bp, Chryseobacterium sp. Leaf405
atgtatatttcaaatttaaagctttggaacttccgaaagtatggatctcatacttttgatattgacactcctgatttaattgtttcatttaacagaggattgaatattcttattggggagaatgattcgggaaaatctgcaataattgatgcaatcaaattagtactaaagactcatgcgtatgagtggataaaggtggaagagagtgattttttcattcaaggaaataaaatttctgaagtattaagaatcgaaatcgaattttctggaattactaacaaggaggcagcacgttttacagaatggtgtggtacagctgatgaaaaagttatagttggtgataatgagcaaatattacgcagacctaaattatttcttatatatcaggttcaaataaaagatgggaaaataattccgactgatgtgagagctggaatggatggtcatggtaacacattgactgcagaagcgaaggagtatatcaagtgtacttatcttaaagctttaagggatgcagatagtgaattgactgccaaaaaaaattctagattgtctcaaattttaaaagaacacaaagaattcaaaataaggcaaacaaatggattacatgaatttgaagaactatttgatgttacaagtcatactatacgtgaaaagtttaaagaggagggcgtaggttataatataaatataaaaaaagttgttgacgattttgtttctgcattcattggaaactcttcaaagtcatcttttgacttaggtccaaccaaaattagcaatattcttgaaaagatatctctaggaattgctgattcaaataatttgggactcggtacaatgaatcgtttgtttatggcagcggaattgttgcatcttaaaaaagctaattggaatggactaaaattatgtatgattgaagaattagaagcacaccttcatcctcaagcacaacttaaaatcataaatagattgaaagaagaaccagatatacaatatattcttacaacacacagtccaaatattacttcacaggcgtctttagaagatattataatatgtaaaaataataatgtttacccgttaggagaaaagtttacaaaattggataaggacaattataaatacttaaaacgctttttagatgttactaaaagcaatcttttcttttcaaaagggaacattattgtggaaggttggtcagaagaaatattgctacctgcattagcaaaaaaaatgatctttgatttaacaaaaaatgaaatatcaattgtgaatgttgcttctacagcatatttacattttgctaaaatattccttagacaggatgggcagaaaatgaatgtacctatttcgattgttacagatttagacaacagaccagatgaaaatggagtttttaaaaccttagatgaagaaagcgaaaaggtcaaaacaaaacaagaaaatcttgctattttaaagacaggatttaacgaaactgacataaccttagaaattgctaaggaatggactttagaatggtgcttatataaatcatgcttatcaaaaattttcaaaaatgctgttagtgaagttcattcaggaacagatgaatttaaaaaagatctaaacgataattttaaagatacttttgagggaaaattcattaaaaaactcttaaaaaaagatggtaattctccaatagataaggtggcagttgcaagtgtattcgcagaatatttggaaaatgataaaactatttctaaagagcaaatagaaaaagatgaatatctaatgtatttaatcaatgctattaaaaatgtctgcaaaaatggaaattaa

SEQ ID NO: 79183 - DNA, 2253 bp, Chryseobacterium sp. Leaf405
atgctattaaaaatgtctgcaaaaatggaaattaatcctaatgatattagaagggctgaagaaatattaataggaggagctgagtttgatcaagaaagaagagaattcattcactgtatggaaactctagatttactagcagttcctggaagtggaaaaacaactgcactgttagcaaaactatattgtattgctcaacagatgcctctcgagcataatcagggaattcttgttttggcacatacaaatcatgctatagaagaaatagagaaagtactaaagcctatttgtcctcaacttttttcatatccaaattttgttggaaccgtccaaagttttgcaaatagatttattgcaaatcaagcttgttttgaactatttgggagttatataagaaaaaatgatgatgaggtctcgaatgatgagctgaaaaacatgttttataatataaattatcaatctaaacttaatggatttatttttaatcaattatattcacagttttcagttatcaaaatagaatatcttatcaaatatttcggcttgacacttgcagaagccaaaatcaaacttctttctttaaaaaaagaaagaaaaattaacaagaatgggtcatgtaattatttagctattaaaagtattgcaaaaaatgatatagatccaataaattcctttttgagaaaggtgcatgatgaatcaattacaaaatttaagaatgaaaagcagactttttgtttaagatataaaattgattttataaaaagcaagttcacatcaaattctggggatttaagttttgggtctgaatcaggaactgaattattaagttattttacaaaagcatttaaaaatggtattttgcgatacagtgattcaatagcactctctctttattatctaaatgtaaataaggagttaatttccatcttacaaaatagatttaagtatgtttttatagacgaaatgcaagacctagatcaagatcaagtagatatgatcgaaaatattttttttaatgaaaaatcaaatactgttattcaaagagttggtgataagaatcaagcaatttattcaaatgtatctgtcgtagatgaaattgtttggaagactaggaaagaaatatcacctgaaatatttactaaaaatttcagtctgaataattcgtataggctttctccaattattgctaatctcgttgatggcttcgttttagatagggaagaaggatataaagttataggaatatctaataatcaaaatttaaaaccatatttactggtttatgataatgaatctgatgcagataaattaaaagataaatttatttctttaataaagcatcatggattagaacagaattcaaaaaatgtggagcgaggttttcatattgttgcatggacgactgataaggaagaggattctgataaatggtatttacgaaaattatttcctgaatattctaaagaaagtagacagaaaaaagaagattttgattgtctaaggaaatatgtttttttatttgatcaaaataaaaaaactcttgaatcaatcagaaaatcactcttaaatggcattattaggatattacgtatcgaaaagatttatattcatgaaaaaactgagaagcattatcgaaaatcaagtcttattagggttttaaaagatactaatgaaacattttatcagtatttcaatcaaaaattatttgattggagttattcgattgttgttcataaaaattatgaagatatctttgttcaatattctacatttatagaagatgaactcagtaacgttttgtccaatttttcaattataaattcaagtagttttataaatatggaatatgattatgttgctacagaaaatttcagcaataataaaacttgcataggtgaacttcaaattaaactaggatcaatacattcagtgaagggtcaaacacactgtgctacaatgtatttagaaactgattattacaatgttgaaacacataaactgaatgttgaaatagtttctaaaactaaaaaaagaaaacaagttttgggaagaaatcctttgttttttcaagagcaaaatttttctcacttaaacaaggctcgttcaaacgaaactttaaaaatgatgtatgtaggtttctccagaccaactgatcttttatgttttgcagtaaggaaagaaaatgttgtaaatgatttaaaaaaatatagagaatcaggatggaatattcaatttgtcgacgatgacctgtag

SEQ ID NO: 79184 - DNA, 1854 bp, Rhizobacter sp. Root1238; identical to SEQ ID NO: 79168

SEQ ID NO: 79185 - DNA, 1848 bp, Rhizobacter sp. Root1238; identical to SEQ ID NO: 79169

SEQ ID NO: 79186 - DNA, 2127 bp, Bacillus sp. Leaf75
atgtatatttctgatttagagatcacaaactttaggaattttaaaaatgctaatttcaaatttgaaccaggggtaaatactttaatcggagagaatagttctggaaaatctaatgccctatatgcaataagattacttttagatgatacattgccgattaatgcttcaaaatttttagaatcagattttaatcaaaatattattgattggaaaggtcattggatcgtattaaaacttacttttaaagatttagattcgagcgaagctgccagttttttagcacatcattctgaggacgtaactactgatgaatcaataggtacttatgcactctattatcgcccaaataaatctgtgagaaaacgtttatatgaatttacacaacaatcaagacatattgaagatctggatgaaatattaaaagatataactgtgaatgattatgaaacagtttttacctgcagagtaaatgcagattttaatgatgaacaaatgtataaagagctagttggagattttgaggaaggaattttcccagatccagaagacgataatgctaatattttaggaaatatttcaccacatattacgctgataaaaaaagaggtttcatgtacttttgtaaaagctttaagaaatgtaatatctgaattaaaacaaaggaaaagtagtcctttattacaactcttacgtggtacagcaaaggatattgaaattgaagaagctgatgcaattaaggaacaaataaaagcgttgaatgaaaatataagtgaattaaatgaaatagatatattaacgaaaaaaattaaagcttctttaaataaaactttaggttatacatattcacctaatgtaaatatcaagtctgaattacctgaggaaatggaaactttgcttcactcattaactttatgggttggagacgatgtaaatagcaatcaagggaaattagatgacgtaagcttagggggcgcaaacttaatttatattaccttaaaacttttagaatatgagctttatcaagatcaagaagaaaaagcagctcacttcttattgattgaggagcctgaggcgcatattcatacacacgttcaaaaaactttatttgataaatatcattttgagaacactcaggttattataactactcattctactcatatttcttcagcaagtaagattgattcagtaaatattttaattaaagaacttggattttcaaaagtctgtcaaccgagtaagggattagatgttgacacttgtaaaagaatagaaagatatttagatgcaacaaggtcaacattattatttgctaaaggagtcatattagttgagggagatgctgaacttatattaataccagctatgtttaaagctgtgtttggtcttagcctcgatgaaataggtgtaagtgtaataaatatgagtagtacagtatttaaccatattgcaagcttgtttgatgatcaaagaattcatagaaggtgtgctattattacagactttgatgaagcaatagatgtccttcctgaaaatcctaatgatgataataaggaacaaaagaaaatgcgtgattcacaaactgctggtcaagaaagagcagaagttttgaatgctatctattctaataatccatgggtcgaagttttttatgcatcgcatacgtttgaaattgattttgcaataaactttaataaacatgaaataaaagaaattcttcctgctatttatacgagacaacacgatattgatgaggctaccaagaaattagattcaggtaataaaatagtagttggaaaagaagcaattagattagctaataaagtaggaaagggatggtttgcacttctattgtccgaaagcattgatgtgtttacttttataccagagtatatattaaaagctattgcattttcttcacccaatcttacgagagatcatttaatagcaatggcaagttatagagttaaaaatcaagaattacatttaagtgatgatggggaaatatctttggaaaatatgtcgttagaggatttagttgaaataattaaagaggctaaagatgatgacgatttaataaagctgataaatttattaggagttgaattaagagagtatgcacattaa

SEQ ID NO: 79187 - DNA, 1800 bp, Bacillus sp. Leaf75
atgcacattaatttaaatccatttcaaaaagctgcaatcgatgaagaagaaaatgcacttgtaatagcctgtccaggtagtggtaaaacaagagttttaacactaaaaattgctaaagagcttgaaaagttaaaaaagagaacagatagaatcatagcattaacatttactaaccgtgcagctgatgaaattgaaaaaagagtacatggcctgggtatagatgtttctaaattgtggacaggcactattcattctttttgcttacaatggattattaagccatacggaagttatttgccagagctccaaaaaggattttccatattagatgaatttaaggcacaggatttaaaaaatagttttaaaggggattttgatattcctggatatgaggattttattactaggagggacagtgcaggaaattatgtaaatgagaaaagtaactttaatgaagctgccgaaacctatcataaacatatactggaatgtaaattaatagattttgatttaattttatatttttcatatttattggttgaaaaatatcctaaaatcgctgacaaactttctagaatttttaaatatttttttattgatgaatttcaggatactcaagatcttcagtacaaacttattggaaatatagtaaaggcagcagagggtgaatgtaagattttccttgtcggagatccggatcaagcaatatttaaatcattaggcgggggtgtaaaatctccttcggaaataagccaagaaattggaggttatagcgttaaaaagttagggctaaatggtaattataggtcaacacaacgtattatagatttatacagtaattttcaaagtacaggtttatcaatagaatctttgacagattaccatgatgaaggtggaattattgcgtttgatagagtaataaataaagataaattggtagagaaaattacaggcattatacaagaacaaatttcgaatggagtttctcctaatgagatttgcgtattagcaccgcaatggaatttccttacctctatggctagaaaattgaaatcacatttaccggatgtaacgttcgatgctccaggtctaactgttttgccacgtgaccgagacaatttttggtttaaacttacaagaattattttaattaccaaagagcctgataattatttgattagaatgaaatgggcaaagcaactcttagaagaattagttatgttgaatggtactgttgtttatgctgatattgagagctgcaggaagttcttaaaaacaataaattctataaatatacaaaaagaagatgcagttgaatttttagaagcatcctttaagtatatatttaaaaagattggctttgattatgcatccagtgatttattgatggggcaatgggatagtttttttcatggactaagtcgtcgttatgagtattcagactttagtgatattcctaaagatattaactatatgaaaaagatgtttaatacaaaagaaggtgtggttataaatacctgtcaaggtgttaagggagaagagtttcatacagtaattgcttttggtcttttaagagggtatatcccacattggagtcaaataattaatcaatcaataagtaatgagatagcagaatcaaataaattattatatgtaatatgttctagagctaagaaaaatttatttttattttctgaaaatggtagattcactaaaaataaacaagaatatcaagtcaacaatcagttaaatacgattgcttttgagtttaacagtctaacatcatatagaacggagtga

SEQ ID NO: 79188 - DNA, 1611 bp, Phycicoccus sp. Root101
gtgcgactgaccagagtgaagatcgagaaccacagccgccttgcagactctgagatcgaagtccggcagcatttgattctagtcggcccaaacgacgtcgggaagtcgtcgttgctcaggtgcctcgacttcctcctaggcgcaagcaacgcgcagctctacaaccggatcactgccgaagactttgctgatccggctctgcccttcgtggtcgaagccgaccttgcgggcctcagcgctgaccaccacgctctgttcccggacgaggccaccgttgacccgatcaccagtgtgatcaccctgactgtgcggctcgcagtcgtcgtggacgccaacggcacccttggaattgaccgcctggcaccgcactcgggcaccaaccggcaattgtcccgagcccagatggacgcgctcggttggaccctcctcggcgcgaccgcgatggcacgcgacctgcgcgacgaccgccgcaccgcgctcgatgagatcttgcagcgcgtcgacctcggcgccgagaaggcgggcttcgatgccttggtggagcaggtccagaaggggctcaagaactccaagattctggaaggtctgcgtgacgaccttgcgggacagttgtcgaaagcactccccatcgcgatagacaagggcgcacttgagttcgtcaccgccgcgacagccgacggcgacgtgcttgcagacgttcggctccacgtcgaacgcggcggcagctttaagaacatcacggatcagtccgatggccttcgggcgctctacgccctcgcgctttacgacctattcagcgtcggagcaaacatggttgccgtcgatgaacccgagatccacttgcacccgaccagtcaacggagcttggcgagcctgctcagggacggccccaaccagaagttgctcgccacccattcaccagacatcgtcagcgcattctcgccagactcgatcgttgccgtacgtgccgggggaacgctcgtccagccgaaagccgggttcctgtctgctgacgagaagatggtcgtccactggtgggtccgggacaaactggaaccactcaccgcaagccacgttgtggcagtcgaaggggtctcggaccggatcatcgtccaggtcgtcgctgacctgaccgatcggaatcttgatcggcttggtgtatcgatcgtcgagaccgacggcgccggcgacatgggcgccatcatcaagctattcggcgccgacggattcgaagtcgatatgacgatgcttgtcgacgaagacgcccgcaacgacactgccaacaagctcggggtggctgcggctgacctggagagcaacgggcacttcgtgtccggtcccgacctcgaggcggagtacatcgccgcgatcggtgccctggacacttgggtggctttcggaacctcaggcctattcacaaagaaccagctcgccaactgtgtaatgacaggacccggcggcacgcctactcccgacgacatcaggacgttcgtcatcaagtaccgacacaaggttcgcgccgcaatggccgcggccaaagttctcgacgatgcgacagctcgcaagatcacgagcgtgaacgcaaccctgacgaaagtcgccgggaagtga

SEQ ID NO: 79189 - DNA, 1686 bp, Phycicoccus sp. Root101
gtgaaaacacccacgcccgcccaggcggaggtacgcgatcacgaatccctagcgctccttctggtagcgccggctggttgtggcaagacagaggcgcttgccatccgtgttgcgggtctgatcgaggcgcaacgcgtggcgcgaccccgccgcatcctggtcaccacgttcaccaaccgagcgaaggacaacctgcgcgaacgtctcagggagtacgtccccctcgcgacgcagcgcgagtacgtcactgtggccaactttcatgggttcgcgacccgagtcatccgagcccacggcgccgtcatcggcattgatcctggcttagagatgcccgatagcgattgggtgacagaacgctgcttcgagctaggcatcggctggggtggcaaggacgccgtcactgagatcttccgcgtcgttaagcagctgccttcaacagacgttcaagttgccgcagagcttgcggcccgcggcaacaagtgggcgatccagatcgagcatgaacgactggctgctaacagggccacctacgacgacctactccggtatgcggagctgattctcgccaacgacgccgtggcgggcctgtaccggagccacttcggggcagtgatcgtcgacgagtaccaagacctcactccacaacaattgcgcgtcctgcaacgcttgagcgacgggaatatcacgttcgctggcgatcttgcgcagggcatttaccggttcgctggcgccacgccaaccgagatcgacgcgctgatgcgccccctgtgcgagcacgtcatcaccttcaacgagtcccaccgctcctcgccagcggtgctggacatggtgaacgcgatgaatccgctcacaggcggcgaagacctcacgagtgccgacccgagccggtggcccgctggtggactcgcgggcgccatgacgttccctcacgcaacgagcgaggccaattgggtcgtcagagccgcgcgactcatcctcaagctcgcaccaaaccaccggatcgcagtcatgtcgcgcattaagagccgtgtccgtttcgtcgaggcagaacttgggggtacggatgtgcctgtccaccgttgggaagacgggatgctcgacaccgagaccgcgaacatcgtcaagtcgacactgacccgactaaacgtcgccgacctcggactcgcgaccgacaaactgaccttcttacgcgaactcgccggcatcgatctcatcgacgagtacgacacacgccgcaatttggttgacgctctgacgtggactctcgagcgactgggagaaggtctacatcccgaccggatcgcggaacggatccgcgtcggtgaccagacgacactcatcaaggcaccgggcatccatctattgagcggtcatgtcggcaagggccaacagttcgactgggtgttcatcgtcggcgcagaggatgacaacatgccgttcttccgcgctcacaacagtgacgtcgaactcgaagaagaggctcgcattcttggtgtgatgctctcgcgagctcggcacggcgtcgtcgtcacctatagcgaggtagtgccgaaagtcgacgggcacgacaaatcccgcgcagtatcgcggttcgtagctcagctcggcccagcgagcccgcgcgaccgtgatggtgtcattcgatggctcaacgatgcgccctgggacgacctccgcgtgacgtag

SEQ ID NO: 79190 - DNA, 2328 bp, Sphingomonas sp. Root1294
atgtacctgaagaaggtgtcgatccgaaattttcggcgtctaagcaatgtcgtgatcgatctagcgcccgatatttcgatcttcgttggtgctaacaatagtggcaagacatccgttggccacgcgcttcagttgtttaccggccggggcaagttcagcgtccacgacttcagcgcggatcaatggccgcagattgttgcgtttggcgagggagaggcggaagccgaacttccgtcgatagagatcgacatctggctggagatcggagccgacgacatccaccgcgttgtcgacctgctgccgagcctcgcctgggaaggtgctctggtcggcatgcgcgtcgtcttcggaccggtcgatcccaatatgacgcgggtccgatataccgaggcacgccagcgcgcgcttgaggccatggcgccgcaggacggtgaggcgcttgccttcgatccttcgccgcgcaatctacaagagtatctgcgtgacaagctcaacgacgagtacgagcttcgccacttcgtgctcgaccccagacggttcgatcctgctatggtcgcggaggttggctatcagcctaaacagctgaccgggcgggaccggacgggcgccaagatactcgaaagtttactgcgcattgattttctacatgcccagcggcatttgtcggacctgccgggcagcgctcgtgccgagaacctctcacgggtcctcagccgcttctacgatcgcaatctcgagcaaaggggcgaggatctcgtcgcgcttcgggcgctggcggaatccgaagcgctgctcaacgagcatctggaacgcgtcttcgcgccgacgctgcgcagccttgcccggcttggctatcccggcctcgccaatccacggctcatgatccgctctgcgctcgacccggagtcgatcatgagcagtcgcgacgggacgcgcgtccattatgcgctcggcccagacgacggcgcgaccgagccgccgacactgcccgacaactacaatggcctcggcttcaagaacctgatcttcatggtcgttgagttgctcgacatccatgcgcagtggctgggcatcgaggacaatcgcccgccggtacatctcatcttcatcgaagagccggaagcgcacctgcacgcccaactccagcaggcgttcatccgcaaggtaatggatatcctcgcactcggcgaggaggaccaggtccattataccagccaggtcgtggtcacgacgcactcgacccacatcctctacgagcgcggcttccgtcccatccgttatttccggcgcagccgttcagaggcaatatcgacgtccgatgtcctcaacctatcgatattctacgacgacaccgatccgaacatccggacctttctggaacgctatctgagactcacccattgcgatctgttcttcgccgacgcgaccgtgctggtggagggcaatgtcgagcggctgctgctaccgcagatgatcacgagtgccgcgccgcggctgcaatcgacctatctgaccgtgctcgagatcggaggtgcctttggctatcggttcaaatccctgatcgagtttctggggctaacggcattggtcatcacggatctcgacagcgttttcgccgcgcccgtgcttgaagccgacgaggaaggcgaaggcggcgctgatggcgcggatggcgcggttgtggcagccgctctggacgaaggcggagcgctccccgcggctgaagcggaggacgaggatgacgaccaggaggacgatgcggctgaaccagcggccgacgtcgccgagaagcccggcaaggcgtgcattgcgggccatcccggcgcggcgacgtccaatcagaccctgctgcaatggctgccgcggtgcggcaccgtcgaagcattatgggccgcgaccgacgacgactgcacccagccaagggccaatgacaatcaggcgcttgtccgcgtcgcctatcagtgccgcaccgatgtgacctggggtgaggacaccatggcgcttgccgggcgaacgctcgaagaggcctttgccttggaaaacctcgcttggtgccaggacgtcgcgcgcaaatccttacagctgcggattcctaaggcgggcgacaaagatctgacggatctcgcgcggcgcatccaccgacgggtccaggccaagagcttcaaaaagaccgacttcgcgctcgcgttgctggccgaggatccggcgcaatgggcggtgccggcttatatcgccaatggtttgcgctggctcgagaatgagctcgcaccgctccccgcgggcggactcggtcagggcgacgcagtgaatcccgagattgccgcatga

SEQ ID NO: 79191 - DNA, 1869 bp, Sphingomonas sp. Root1294
atgaccagccgcatcggcagccctgacacgccggccgatctccaggtgcgggactgcctgggtgaggcgcgctcgttcgtcatggttgcgggtgcggggtcgggcaaaacgacgtcgctgattaaggcgctggcgcatctcggcgaaacgcgcggaccggcgctacggcgcgccgggcagcagattgcctgcatcaccttcaccgaagtcgcggtcggcgaaatctcgcacgatgtcggcgtgtcgccgctatttcacgtctcgacgatacacagcttcctgtggtcgatcgtccgtccgttccagaccgacattgcggcctgggtcgtcgcgcggatcgacgagaaaatcggtgagcggcaggagcggcacgcaaagcccggcacgcgcgccgcgacgagggtacggctcgagcaggagattgccgatctcgggatcgagcgcgaggccatcgggcgcgtcgagaagttcacctatgaaaccggcagccgctatgctgagggcattctcgggcatgacgacattttgcggctaacgcccgcctgcgtcaccgttcatccactgctgcggcggatcgtcgcccgccgatttccctatatcttcgtcgacgaaagccaggacacccaacccgcggtcatcgaggcgttgcggcagatcgccggcgaggagccgctgtgcgtcggcttcttcggcgacccaatgcagaagatctatggcgccggcgccggtgcgatcgcgctgaacgccggctgggccgacatcaccaagccagagaatttccgctgtccgacctcggtgcttggcgtgatcaatgcgatccgcgcgccgggcgacgggctggcgcagattcgcggccgcacggtcgtgatcgacgatgtcgaacagccggtcgagggcaccgccaacatcttcatcctgcctgccgacaaccagcgctccgagcgtctcgctgcggttcgctcatggcttgccgaacagaccgcggacgatgcctggctgagcgacctgcgcgacggcgatgtgcgcctgctcgtgctggtgcaccggatggcggcgcggcggctgggctttgccgatctctacgcggccctcaacgacggcgcaccccagagcatgagcgaagggattgccgatgggaccgcctggccgctgcgcccattcacccagcatctgctgccgatgatcggtgcggcccgggccgacgaccagttcgcgatcatgtcgatcctgcgcgccgagagcccgcgcctgcagtccgaccggctccgcggccagccggtcgcgccggtgctcgccgcgcttcagcaggcggtcaacacattgagcattatgctcgccgagggatcgctatcgaccgtccggcaggttttgcagcatgtccgcaatgccgaactgcttagcctcgacgatcgcttcggtgcgcacttcgtggccgagccggtcgatgacggttcgtcgggctatgcgaatgtcgccgcgttcctcgactgtggcgtcgacgagctttgggcgcatcgccgctacatgctcgaagagtcgcccttcgccacgcatcatggggtgaagggtgcgcagttcgagcgcgtgcttgtggtgctcgacgacgaggaagccgcctacaacctctactcttacggcaaatatctggggttcactccactttccgacaacgacgaagcgcggattgcggggggcgaggagtcggtgctcgatcgcacccgacggctcttctacgtttgctgttcgcgcgccgtgaaggaccttgcggtagtcctgtttgtacccgacgtcgctgccgcgcgggcggccgtgaccgccgcgcacatctttcccgaagccacaatccgcgaactgcatcagttgaattaa

SEQ ID NO: 79192 - DNA, 2136 bp, Devosia sp. Root436
atgcacatttcacgactacagctcgtcaactaccgcaatttcggcagtgcgaacgtctatttcaagaagggcatcaacacgctcattggcgagaacggctcgggcaagacaaacttgttccgcgcgatgcgcttgctgcttgatgacgacatgctgcggatggcttaccgcctcgatgaaagcgactttcaccggggccttgataactggcgcggacattggatcgtcatcagcctagaattcgacgaggtcgcccagaacgaggcgttacaggcgctattccttcacggcgtcggcaatgtcgaagatggccaggtcggtcgcgcgacctacaacttcattttccgcccaaacacagccatacggcttcgcctggcggaactcggtgagggcgaccgcgacggcctcgttcggctgcgcaacgcgattacgctggacgactatgaggtcgtgtttaccggcaagagcacggcggatttcaccgaccctgaccagtatcgcgctcttgtgggtgacttcgatgctgtccgatttcccgacgagatggagccgtccgagatcggcgggcgggtgccgaaggttctctccgttgcaaaggaaatctcgttcacattcgtgcaagcgcttcgcgatgtcgtcacggattttcagaacaaccgcaccaatcctttgttgagcctattgcgaagcaagagcggcgagatcgaccaggccgcgcttgcgccgatcaccgccttggtcgaaggcctgaacacggcaatcgaggagctaccggacgtcggcaccattcgcggcgatatccggcagaccattcgcgacgccgcaggagagacctattcaccggcgggattgtggatccgctccggcgttccggcagaagccgagcgccttttccagtcactccggctgttcgtcggcgagtccgatgatggctacgaaggggcgatccatgagctgagcctcggcggcgccaatctcatctaccttacgctcaagctcctccatttccgctaccagaaggagaagcaggtttgtgccaacttcctggtcatcgaagaacctgaggcgcacattcacacgcacatccagaggacattgtttgatcggctgaactaccccgatacccaagtcatttactcgacccactcctcccatatttccgaggtgagcaacatcgagaacgtcaacgtactcggccgcgtcggccgacgctgcgaggcgtatcagccggcagccggcctcccacccggtcaggtacggggcctccagcgctatctcgatgcggtgcgcagcaatctactgttcgcaaagagcgtggttctggtcgaaggcgatgccgaggaaatccttgtccccgcgctagtcaaagatgtccttggcgtcagcctcgacgaactcggtatcagcctgatcaacatcggcagcactggcttcgagaatgtggccgtggtgtttcacgacactcgattgcgtaaacgatgcgcaattatcaccgatctcgacgcagcatttatcgataccgtgcccgcccccggcgacaatgatgcgacacagaaggcaaaagctaaggtcttgggctcgcagcgttccgggatagctcgccgaattcgcctcgacggcttcgtcgcgggcaacccgtgggtcacggtccactatgcaccgcacaccttcgaagtggactttgttgcagcaggcaatcaacgcccggtcgtggcagcgttgcccgacttctacgtccatgctcccaccatcgcccttgctaccgctgagcttggttcgggcgacatagcgcagtttggcaccagggttctgaccgtcgctaacggcgccggcaaaggctggttcgcgattcaggtcgccaagaagatcgatcctgatacagagctgcccgactatgtcgcccaagccctattcgcagcgcactccccgtcccgcgcgatgatcgccaacatcatcctctaccgcctcaagcgcctggagatagacagacggggaaacccagatacgcttgcggtgatgttcgcgcatgttgaacgattcagcgcgggtcaaatagaactcgatgcgctgcttctcgaaatggctgcggcgttccccgccgatcagatcagccgagtcctgaaccacctcacatga

SEQ ID NO: 79193 - DNA, 1794 bp, Devosia sp. Root436
atgacctttgtttggccgaaaggcgacctgaatgacgagcaggtcgacgccataactatccctggcaatgtcttcctgaccgcctgccccggcagcggaaagacgcgcgccttgacctacaaggccgcgctcgaactatcgcggctggcaaccacgaagcaacgggtcgttgcgatcacctacacccatcgggctgcggaggagattcatgagcggatcgaggccctaggcgttggaaccgagcacctgtggatcgggaccattcatagcttttgtatagattggatcctacggccttacgcgatctatcatccagcccttcgacacggctttcgagtgattgacgctcacgggaccgaacgccgcctggaggaacattgccgcgccttgcgcaacggggtcaggccattcgactgcagctacagctactcaactcggggatgcgaactgcgagatacccacgggaggtcgcagcaggcggttgggagtgtcctcaaccgctattgggcggacctagaagcgaagcgccagatcgatttcgagatgatcctgcaattcgcctacgagctgatcgcaaccgtgccgtcgattgccatccttctaagccaactgttccgcttcatcctggttgacgagtatcaggatactaaggagatacagtacggcatcatcgcccatgtgatgcgggcgggcgccggacgaaccaatgccttccttgtcggcgacgccaaccaagccatctttggttcgctcggtgggtacgcgatcactcgtgagcagttcgcgcaggactgccaggcgccgttcaccccgaaaagcctgtccatcaactatcgctcctcgacgcgcatcgttgactacttcacgaactaccatgtcatcccagccgcgatcagcgcggagggcaagaaccgattgttcgaaagcgcgatctcctatgaccacacgaccccgagccggcaactcgaagatgagcttgttcgactgctccggtacaacatcgagaccgtcgggatctctccccgggaagtctgcgtcattgcccctcagtgggtggccctcgccgatatcacccggaggctcgtggtggccatgccggagtacagctttgacggacctggaatcgcgcccttcgcccggaacattgacaacttcttctacaaggtcgcgcgcctggcactaaccgagccttcaccccagctcttcgttcggcgcctgcgatgggccggtgacatcatgctcgaacttgagcgggctgaggttcaccttcgtggggtatcgccccggggcctgcttagcatgtgcaatgcgatcgcgatcgacgaagaggatggcctcaaccacctgaggctgttctttgacgagttcttgacggggctagggattgtcctcgctgattaccccgcacttgctaatcaccacgagacgttctttggggattcccaggcacgaattaaccgtctccaggaagacgggcttcaaggaatctccgacatcgcgatgttccgtcgcgtgtttgcgagccgttctggcataaccatttccagcatccacaatgtcaaaggcgcggagttcgacgtcgtgattgcgtttgcgctcctgcaaggcatggtgccacactttggtgacctccaggttgagagtgccaagaagctcctctatgtcatctgctcgcgggcccggaaaaatcttcacctgatctccgaaaccggtcgcatgaatcgcggcggcccatacctaccgaccgaagtcctcgcaagttacgctttcaactacgacgacgttcctgattga

SEQ ID NO: 79194 - DNA, 1764 bp, Rhizobium sp. Root1334
ctgagggaagagcaaggtagacatttcaaacctggtcgccggagtgttcgcttcgaccatattaccggaaccgtgcgggaggatgaatacgtagacttgctgaacgaagcggtgcggatcgacgacatcatttcttttaagagaatcaacgctcgcagatcggtttcaaacaaggattcagatcgcagcctttcggcaatgtcggcaaaaatctacaacgccatggcttctgacgctggagacgaagaggtttttgaaacgttcaaggaagcgcttaccaacaccgatgaccagttggatggcatctacgccaacctgttcaaggaggttatctccgacgtccgaagtttcggcggaatcaaggaaggcgacacggaaatcaagatcaggtcgaccttgcagcatcgtgatctgctgcaagagaatacgaccgttatgtatggtcagggcgtcgatctgaccttgcccgaaaaccacaatggcctgggatatctgaatctgatctcgattatcttcgagatcaaaatcatcctcaatgagttcaagcgtggccagaagcctagaccggccgacatcaatttgctctttatcgaagagcccgaagctcatacgcatccgcagatgcaagccattttcattgccaacattaaacgtcttgtgggccgagccatcagaaatgccgacggcatctcacggccgttgcagacggttctatcgacgcattcatctcatatcgtcgccgagtccgatttcgacgacatcaaatattttaggcgcattgaaggtctcactcagtcgcgtagtctgaaagaactggacgggctctacaaggcggctgggaaaacgggacactacgcctttctgaaacaatatttgaccttgaacagatcgcagctctttttcgcggacaaggcgattcttgtggagggagatacagagcgcatcctgcttcccgcgatgatgcggaaaatagaccagatcgacacagcaaaggcttgggcggatggcgctgtccagcctgtcgcccttctttcgcagaacatctcgattatcgaggtcggtgcgcattcccaaatttatgaaatctttcttcagttcatcggcgtcaagacgctcataatcacggatatcgactccgcaatcgaggagctggaattcggcgaccttggaatccccatactgaataagcagggcgagcagaagaagaccgtccgagcgcacgggatcgaaaatgccacacacaccacaaactacgcgcttcagttcttccatggtgtagggcctgacatctcatacttcgtgggcttaacttttgaacagaaggtcgtggggaaggaccctgatacagggaagtggggacctaaagttgaagggcaggtcctctgcgcctatcagatttccgagaatgatggcgatggaaatgggtatcacgctcgcagttttgaggatgcgttctttcatgtgaaccgcgcgtttatcagcaactcaacggcggaagagcctgacattcagaaggccggttttcctagcctggtaggaaaacacctcaaaaaatacctcgccggtgggtcgtctttcgaaatggctgaagatggaatcaccaggaaaccgtcgttcgccattgaaatcctcctgaacagtgcgacctccacgtcgagcgtcgcctctcctctaggtccagcaaaggaattttcctttgattttgataattggaatacccccggttacatcgaggagggccttcgatggatcaaggtgggctga

SEQ ID NO: 79195 - DNA, 1899 bp, Rhizobium sp. Root1334
atggatcaaggtgggctgaatcttgaaccggaagtgatcgaggtcctgaagcacgtagccgctgggaggaatttccttctgagcggtggggccggaagcggcaaaacgtactcgcttgtccaggtgataggggagttgctgcggaccgatcctagcgctttcgttgcatgtatcacatttacgaacgctgcagttcgggaggtagagtcgcgaatttccaatgagcggctaactgtacgaacaatccatgattttctttgggacgtggtcagcccgtttcagcaggaactccgaaaggttctggtggagctgctgagcggagatgagcctaagttggaacccggaacagtcgttgtgtccgggaacatgttcgccggaaaaaaggtccagtacaaagaattcacgcgggttggtgatggtatcgtttcgcacgacgaggtcatcatcatcgcccatgccatgtttgaaacctacccgaaaattcgcgacattcttcgcgaccggtaccgctacatcctggttgacgaatatcaggataccgcgccggaagtcgtcaaaattcttctcgattggctcccactgagttcgcggcaaggcctgtgcggcttttttggagatgcgatgcaatcgatctacgacgagggggtcggatcgatccagccttacgtagtcgccgggaccgttgacgaagtcaggaagcagcaaaaccgtagaaatccccgtttagtttttgaactggccaacaacttgcgaacagacggtatcgtccagggcgcatcaaaagacctcaatgcgcccaacatgatccagggtaaggtcaaggatggtgtcatcagattctatcactcgacgggggatgacagtcggctgcagaaagtccgcgaccaactaggttgggacttctccgatgttttggaaacgaaagagctgaaccttacacataatttgatcgccccacaggcaggtttcggcgacttgatggaaatctacgacaaggatcgcgtccttgctttccgaaatcgcatcgtcaaattcatcaaaacaaacggcaacctcaacgactatcaatccgaaacgtttggtaaggtcgtcgcttcccttcaaaaggggaagacaggtaatgctttacgtgcggttagcccgacggcggggatgcaggcattcatcgatgccaatccaaagctgttagaatacgcaaacgagatagaattccaccaatttcggcgactgtatgttgataaagatcaactgatcgatgacaagaagcataccgaggaggaaataactcgaaagggatcgaagcggtgcgatttcgtgaagcacgtcttcaagattcagtccgtcgtccatctatatgaacagcggcggttcaatgagtttttgcggaagaccgaatttcgcctgactaacgcccaggacaagctgcgcattcaaaaatgcgtagaagacattggaacaatgaaagacagtccgatcctggatgtgatcgacttcgcacacgacaacggactgtgcatcaaagatgacaaatttgccaacttccgggcagaaaagcgctacctctttgatcggcttattggcgtcgcgttttcatctttccagaagctctacgaatacttggagggtcgcactacattttccacacagcataaaatcaagggccgggagtttgaacgtgtcctcgtcttgctcgatgccggtgagtggaatcactacaatttcacttacctgttcgagggtagcggtacggacagcgtgatagagcggaccggaaaattattctatgtctgctgcactcgcgcgaaggacgtgcttgctgtctatttccagaacccgacacctgctgtgttgaaacaggctgaggcgtggtttggaaaagagaacgttgtggaagtttaa

SEQ ID NO: 79196 - DNA, 1776 bp, Aeromicrobium sp. Root495
gtgactaccgctgccgtcgccccagccacgaggcacgcggcgctgtatgtcgagagagtcacgattcggaacttccgaggaatcgtgtcgtgtgaagtcgagttcgagcctggcctcacactcctcgtcgggcggaacaatgtcggcaagtccagggttctgtctgccttgcacctagcgttgggcggtcgtgtcgctgacgtagacgacttcaccgtcggatcgtctgcggaacccgagatcgatgtcgtcctcgcgcccagtccgcctcctgcatccacagacgagcaagcgttcgaggacgacgaaggtcggctgatgggcggcgatgcacagacgatcagcgaccccccgtttcgtgagcgcttcgcctggcgcgcccacgtccgacgctcggccgaagggcttggcgctcgatccgagttcaagatcctgacgttcgacgccgccagcggcaattgggtcgagcgctctggggcaaaggaccttggacgggatgctcgggggctggtggcgtcggaccttgtcaacactgggcgcgacttgatggaggaactcggtcgtcgtggctcgggtgttcgcaaggtgctcagcgacttggacgttgacgacgtgacacgggccgatctggagctccgcttggcgggtctcagtgccgacatcgtcgcgggaagcgggacactcgcatcggttagtcggtcgctggatgcgctaaaccgcgccgttgggagcatcggagctcccggcatcaacccgatccccatcaccctcgaggaactggctcgctcgctgtcgatcgaccttgacagcggacatggggcgcttccgatcagaatgcatggcgctggtgcgcggagtctggcctcgctccagatccaaggcgtgctgtatgaacgcttgctcggtgcggacggcggttcgctccgcccacatcctgtaaccctcgtcgaggaacctgaagcgcacctgcacccgcaggcggcgtctgagttgccgcacctgctgaagtcgatccgcgggcaggtcgttgcaagcacgcactccagccaggtcgtcacagcctcggatccaagagcgatccggctcttccgggaggacggaggttcgctggccgtagtggacctcggtcccgcccccagcaatgctccgggcacgccacggccctttcgcccgagccaccacaccgaggagatggagaagctcaagaggcttgccgaacgacccttcggtgagatcctcttcgcgagtgccatcgtggtcggggacggtgcgacggaacgcgggttcctgccgccagttttgaggcacgccctcggcgcaaaggcccacggggtctgcgtcatcgaccccgagtcgatggcgacacagaccgcccgcgcggttgccaagttcgcgaatgccatcggggtcccctggttcatcttcgctgacagcgatcctgctggcgttgccgctgttgagaatcttgctacaacgggagcttccccagcgactgtcatctgggtcggcaagccggacagcgccgcggccaagggcgtctctggagcgatcgaggcgatgatcgtggacttcgacgaggacgtcggtagaaccgcgtgcgaacgggtgcgtcccgatctcgcgcccgtcgccaatgtcctatcgactatgaaggacttgaagggatcgatcgggcagaccctggcagacgtcttgctcgaacgctacgaggactccaccacgtggccgtcgccggtccaggaaatgatccaagctatcgacggagccctttcatga

SEQ ID NO: 79197 - DNA, 1812 bp, Aeromicrobium sp. Root495
atgaccacgaccgacgacttcaacgagccggtgctgagtcccgagcaacaggcagctgtggacagcaacgcgcgtgcgcttgtggtggtggcgagtgcgggaagcggcaagaccgaagtggtcgctcggcgaatccaacggttgctccttgaagactccggcggcaatgggcgggtgctcgctctgacttacacggtgaaagcagcagacgagcttcgcgccaggctcgatacacggcttggagcgctcgcacgtcgtatcgacagcgagaccatccacgggttcgcgcacagcttgcttcgcgcccatggaactcgaatcgggcttccgcttgagccggagttgttggctcgcgacgaggaccgcgtggagctctttcgttcgtggctgcgagatcgcggcgacgcggagccagaagatctcaagagccgtctcatgggcttcgacttggcacgtgccacgggcgaacgcactgacggcctgaacgactggctgcaagcgctcgatgacaatggtgctctcgactatccggcgcttctaacgcgtgctacggagctgctgacggtgggctcggcgcggcgccagatacgacgcctctacacatccatcgtcgtcgatgaggctcaaaacctgactaaggcgcagtacgacctgctcactgagctggtatcggaccaaggtgaggtggtcatcccgaccatgctggtcggtgatgacaagcaatcgatcgtgagcttcgccggggcagatcctcgcctcataggagtattcacagaagccttcgttgccgaacgccacgagctccacaccaacttccggtccgccacggtgctcgccactgcgtcaagcaaggttgcggctgcactcggccacgcggtcagcgaagaggcggcattcgcggctccaggcatgatcgacctcgaggcgctcgcgacagaagccgaggagggcgagagggtggcggcctgggtcgaaggcctcctggagagcgggcttcccgagggggcgctcggcatcggcgaaaacaattcgctccgcgccgaagacatcgcagtgctatccaggtcagcggccggtcttcgtttcgtagcgtcggcattggccgagcgggagattccgttcgctctgtccagcacgccgaatgaatggctcacgaccgtggccggcagggtcgttcttgaggcagtgtcgctgaaggcagcgcccgatcatcattcgacgtactgggagctgggcaggctccttggtgtcgatcttgccgaggagtcgacagatgcagtcagagatgccgtctttgcgtccgatgacgagttgatccaagccgtcgcgggcgtagtcgaccttacggatgtcgcggagctcgtccccttcctccagggaacggagctgcctaccggcgtggctgacgcagaggcggcgaactggcagaccgacgtgctccagttctcgaccagttgggctcagtttgatgggctaaccgcgcggtctgacctgacctggggaaacttcaaactgcactgctcacgcgcgcaacgtggggacgacctcgcgtctggcgtccgccttcttaccgtgcacaaatcgcaagggcgcgaatatgcggccgttggggttgttggcttgaacgacggccagttccccgacttcagggcaacgtccgattcggcattgcgtgacgaacttcgaaccttctacgttgcgatcacgcgcccgcgtcgagttctcttgctcacgcgagcgacggcgcgagacacgaggtacggtccgaggacaacgcaaccgtcacgattcctgtccctcgtgtcttcataa

SEQ ID NO: 79198 - DNA, 2328 bp, Sphingomonas sp. Root50; identical to SEQ ID NO: 79190

SEQ ID NO: 79199 - DNA, 1869 bp, Sphingomonas sp. Root50; identical to SEQ ID NO: 79191

SEQ ID NO: 79200 - DNA, 1938 bp, Microbacterium sp. Root1433D1
atgttccttgaacgacttacgctgctgaactttcagagcttcgggccgacaccgacatctatctcgttcgacgagaaactcacagcgttcctcggcggcaacgcgaccggcaagacagccgccagccaagcactgctgcgcctgttcagtgtcgttgccgagcagcgcgccatccggttgtccgactttcacgttcccgccgatgaggaggaagcgccggtttcacgcgagatgcgcatcgaagcggtcttcgcgttccccgaactggacgaccccgactcggatgctgcgcagacggtaccggaattcttccgacacatgaccgccgacgacgacgggcaactgaagctgcgcatcgtgttggagtcaacgtggacagatgaaggccccgcctccggcacgattcgcaccgagcggaagatcgtctacacattcgacgatgacgtcgaaggtcgcaccgctcgcttcgatgaagctgcacgcgagaagattcaggccatctacgtcccggcgacccgcgacggggcgcgcgaggtgacgggcttcctccgcggcaggctctggagggccagccagtggtccgacacgttccgagaccacctcaccaccgcggccgatgagctctccacgaagttcaaggatgagctggtcgtcaaatccgtgacagaagccatcacgaccaggtggcagcaactgcaccatctgaagtccgagacaaaccccaccttcgagccaatcaaccgtgtgctgcgcgtgatggtctccaacgcggagatgctgttcgagccgtcccctaccgggcgtactcggtcggccggggagctcagcgatggtcaacgctcgctcctgcatatcgctctgaccgcagcaacattggacatcgaacgtgagatcgtgggcggcaagcatccggacacattcgacctcacaccgtcgtcgctaccggtcctcacgctgctcatcctcgaagagccggagaacaacctctctccgttcttcctgtcccgcgtcgtccagcagctgctgaatgtcgcggagcgcggcaggtcccagaccatcatctccagccactcggcgagcgtcgtgtcccggatcgaacccgaccagatccgccatttccgcctacgccgcaagaagctgacgacgaaggtgcgggaagtccccctgcctgcgcccaacaccgacgcgggcaagtacttgcgccaggcagtacgttcctaccccgagctgtacttcgcgcgcttcgtggtcctcggcgagggagaatcagaatccgtcgttctccccatcctcgccgccgcccgcggcatccacatcgaccagtcgttcgtcgctgtcgtcccgctgggcgggcgtcacaccaactacttctggcggctcctcgacggcctcggtatcccgtacgcgacgctcctggacctcgacttcggtcgggcaggcggtggcggagaccgcttgaaggacgtgtgcaacgagctggagaagatcggctacgacccgttcgatggagcacccggaggggcaacgtcggttgccgacctcaagggtctcgacaccatccagaagatcgcaccgtggctcacgcatctccggaggtacggggtgtatttttcagctcccctcgacctggacatgcgtctgctcatggagttcccggacgcctaccgcgtcaaggtccccggaggccgcggcccgatgtcaaagacgatcccgcggtctgctgtcctcggcgctgcggacgttaggcccaacgtcgctctgtgggatcgtgccgcccggatatcggatcttcgctggtaccgatacctattcctgaccaactccaagcccagcagccacctccgggcgctcgctcgagtgcccgaagccgatctcgcgagtcttgacggaggcctcgggaagctgttggaccgcatcggcaaggcggtcggcgactga

SEQ ID NO: 79201 - DNA, 1896 bp, Microbacterium sp. Root1433D1
atgctggtgagcgaggacgactgggaacccctcggcgaaggcatcgacgatctcgaagaatcggcctgggcggccctgaaggcagggtccgcgtccgtcgcggcggggccaggctcgggcaaatcggagttccttgcacaacgcgcaggatttctgttccagaccggccgctgcccacacccgcaggagatcctcgcgatctccttcaagaagtctgccgcttcgaaccttcgagaccgcgtgcagaagaggctgccggagtacgcgcccaggttcacctcgatgacgttcgacgcattcacgaagatgattgtcgaccggttctccgcactattgccggcaccgtgggcgctgaccgagtaccagatcgggttctccaacgagcgtgagatcaagagcttcctcgacggcatcgccggctccgcgcccccgcacttggaagacgacatcctggccatccgcgcattcgatttcctggccaagtacgtcggcgcaacctctctggatgacgatcttctgtctccgcagacggccgaagcctatgcggtacacgcatggtggacgcagaactacattgggcgcgcacgtccgaccgtggacttcgtgatgcttaaccggctcgcggaactcatcatccgcacgagccctcagctacgaacggccctggccgcgacctacccgttcgttttcgtggacgagttccaagacaccactttcgcgcagtactcgttcctcaaagaggtcttcgcaggttctggcgcgcaggtcaccgccgtcggtgaccgaaaccaacgcatcatgggctgggcgggcgcgctcgacgacgcgttctcggagttcgaagtggacttcactgccgaacctttcgttctgaccgccaactatcgctcctcgccggagcttgtggagctacagcatcgcttcgcgaagatcctaagcccggaggcgagcaagcagacctcccacgtgctgagtgagacgggtgatacacccgcgcaggtctggtcgttcgcggacgaggactccgaagcctcaaagatcggtgaatggattcggcaggacatggacgattcgggccggacggcgtccgactacgcgatcctcgctcgccaacacgtcgcacagatggaaccgcgattccgggcagcgttcgaagaacacgaccttcgtgtccgcaacgatgacctcctcgtcggcgtgatccggctgcaagaccttctcagcgacgagctcgcggccctcctcatggacgtgatccggctcggagcttctatcggtggtgaacccgatgcctggatgaacgtcacctccacgttggaggcgctgcccgagcagacgcggcgtcgacgggactcgtgggaggaccggttgagcgtgttcctcaccgacctgcggacgtggttccgagagacgaacgagtcgctgccggcaacgaccggtgggacggagcttgcgtcagccgtcctcgaccgagtgacgagcttcatcagcatggaggagctcagcggctcccgccgattcgcggagaaccgtgacgaggtgactaccaagctcgccgctttcgggattcgtttggcttcagtgctggaggaggcctcggcctggaacgaggtggcggacgtattccgtcaggacgacgcggtgcccctcatgacgatccaccgcagcaaaggcctcgagtatcacacggtgttcatcgtcggtctcgacgacgaccagtggtggtcgcacgccaacaactccatcgaatccacgatgacgttcttcgtcggggtctcccgcgctgcggaacgaatcgtcttcacccatacgacccatggagtctctcgccggaaggtccgcgatctgtacaacgagctcgaagaggctggcgtcccgttcctggaattggattga

SEQ ID NO: 79202 - DNA, 2259 bp, Caulobacter sp. Root1455
atgaagctcagcaaagcggcgatccgaaattttcgccggctcgaggacgtcaccatcgacgttgaggagcgcgagaccgtctttgtcggcccaaacaacagcgggaagacctcggcgaccgccatcttccgcgcctttctgggcacgcgtgagttcaagatccatgacttttccgtcgcgcggatcgctgcgttcgacgcctttggcgaagatcttgaagcgccccagaccgttcaggccgagcaggccgatccgttcgcggcaatcctaggtgaagcgcccgttgaaccagccgccgcggcagcgccagcgcaggaccaagcccaacctcaggaggatgcagatcccgccttgccggctgccgatccgccgccgctcccggaaatcagtctggacctctggttcacaatcgatcccgacagcatcgcgtttggccgggtctacacgctgctgcagagcctgtcggatgagccgaaggtcggccttcgcctgaccttcggcgttgaggagcccaaaaagcttcgcaccgagtatcaggccgcctatccaaaaccggaggaagggcccagggccaagacgctgttcgagtacctcagcatcgaaggcaatctcagccgctattgcgcggtgcgtcacttctcgctgagcgaaacgccccaggccgacggctcggcctccgtgaaggccgttcgcctggatcccgacgagggcaagcgcctggtcaaaaatctgatccgcgctgagttcgtcgacgcccaacgcaatatcaatgacgacgagggcgcgcgcgcaaaccgcctctcgacggcgttcgcctcgtactatcgcaaaaatctggaacagattagcgccgcggccgaggcccagagcgtgatcgacgccaacaacaccgccctgaccgagcactatggctcacagttcaagtcgctgatgaacctgatccgcgacctgggcgtgccctcgatcaacgatcgcgaactgcagattatctcctcgatgagcccagacgcggcgctcaaaggcaataccgagctgatctatgtggacgccggccgcaaccaccgcctgcccgagccctataacggcctggggttcaaaaacctgatctacatggcgatccaggcccgccactttcattcgcagtggatcgcaacgaccgagaaccggccgctttgcctgctgatcttcatcgaagaacccgaggtgcatctgcacgctcaggtccagcagaccttcatcaacaacatctggagcgtcatcaacgacagcgccagggaagctggcgagccagagctggtgccgcaggtggtggtgaccacccattcctcgcatatcctggacaccatcgattttgaaaaggtccgctacttccagcgctgccacctggaaggcgagaccgatctcgacagcatccgcaacgcgtccatcgtgcgcagcctcaaggccttccgccccgaggacgagaccaagagcgcaagcttccctgtcgatgagaccgacgacgcccagcggctcagcaccaccgaggccttggcgttcctgaagcgctatctgcggctaacacactgcgacctgttcttcgccgacgcggcgatcctcgtcgaaggcgccgtcgagaagctcttgatgccgacgatgatcgacaaggcggccgggcggttgagggggacctatttgacggtgcttgaggttggcggtgcctacgcccaccgcttcgagggcctgttgagcttcctaaagatcccctacttggtcatcaccgatttggactcggtcaacgccaagggctatcccagcgcctgtcgcggcgacacgcccaacgctcgcacctccaatgcgaccctaaagaagctctgcaatgtcagcaccgtgccggcgcttctggcgttgaccacgcaggacaaacaaagcgccgagaaggatcgctgcgtcgcgttccaggtcgccgtgcctgttgaagtcggcggcgtcgcgcagcaggcgatccctcgaacgcttgaggaagccatcgcctatgaaaacctcgccgcgttgcacgccaaatcgatgtcgatcggcatcgacgtgcctacgacatggccggcgcttcaccaggccgtctacgaccagatccgctcggacaagttcaagaagacagcctttgcgatgagccttctagccacggacgccgactgggcgacaccccaatacatcgcccagggtcttcagtggctcgaagggcgcctctgccccacgaagatcgtcggcgaggcggtttga

SEQ ID NO: 79203 - DNA, 1848 bp, Caulobacter sp. Root1455
atggccaagcgaattgaaaccgaagccgataagcaggttcgcgcctgcctggacgagaaacgcagctttgctctgatcgccggcgcgggctcgggaaaaaccagttcgctgatcgacgcactggcccgcatccgcgaaacggatgggccccgccttcgacgcgatggtcagcgggtcgcctgcatcacctataccaaacgcgcggtcgaggtaatcagggcccgtctggggtttgacgacctatacttcgtatcgaccctgcacagcttcctgtggggccagttggccggcttccaagaggatatccgccgggtcctgatcgaggaccgcctgccagcgctcatcgccaagtctgagcagaagatgcttgagaagggcggccacaccaaggagggccaaaagcaccgcgacagagccgatcggttcaaggaagagctagatgcggtcaagctggttcctggctttacctacgaagacagcgattttagcaactatgtgaagggcgaacttggtcaccccgacatcatcgagatcgcctcctacctcctccgcaccaacaagatcttccggcggatcaccgcgcttcgctttccctacattttcgtcgatgaggcccaggacaccttcaaaggcatcgtggagggcttgaacttggtctgtgccggcgagggcctgcccttggtcggctattttggtgatccctggcagcaaatctatgaggatcgcgctggcgactttggcccgccgcctggcggcaagctcatcaccaagaccgaaaacttccgctgctccgaaagtgtgatcaccttcctcaacgcttttcgcgatgacgtcgagcagtacccggccggcgacaacaagggacgtgcaggccgtgtcgcggtgcggctgatcagggccgaaaagcccgaaggaaaacgcaacgtctattccgacgaccaggtcgcgcgcgccctcgagcggatggacaacgccctggacgcctggggctggaaggatcgcgaagacgtcatgaagctgctgctggcgcgacagatgatcgcccgccggctcggtttttcgacattgaatgacctgttcaacgatgagaccaaggcctcctcgcgcgccaaggacgcctatgaggaaggcactcactttctcctcattccgttcctcacaacgatctgcccgttgctccgggccagggaggccggcgagagccatcgagtgatcgaaatccttcgacgagaaagccccgccttcgcgattgacggagagaacgccgccaaatcccttcgccacatgctcgaagcctcgcaggccgcaatagacgagctgcacaagcgttggaccgaagagaaggtcggcgaaatcctgcgccattgcgccaagacccggctgatccgcgtctcggatcgactgcgtgagcatctggcgcgcgcgccacgcgccgaagcctatgacccgacgttgcatgtgcaggagaaggccgattggctggcggacgccctcttcgacatggtgcccgcccccctggctccctatgccaagttcatccaggagaactccgcattcagcacccagcatggggtgaagggggaggagtatggccgggttctggtcctatacgacgacgtcgaagccaagtggcaccactacaattttaacaagatgctgacgcccaaaacctccggtgatcccaccgagggtcagttggaaaagagccgaaaactcgcctacgtctcgttctctcgggccgaagatgagttggggatcatcctgttcacccctgcgcccgaggcggccagagccgagttgatggagcggttcgccattaccaccgagcagatcagcatcgacggctag

SEQ ID NO: 79204 - DNA, 2319 bp, Caulobacter sp. Root1472
atgaagatcgacttcatcgagattgggaacttccggaagctgcaatcagttcgtatcgacctagcagaagagcggacgatattcgtcggcgcgaataattctggaaagacctcggccatggttgctctgaggttctttcttatggagcgcgcccgattctcgatcaacgacttcaccctaatcaattggcataagatcaatgaatggggcgaagcatgggatgcggcttacgaagccaagcagccccttccagctagccaatggcgggagctggtccccacactcgatatctggctatccgttgccgataccgagttccactatgtacgcggcattctgcccaacctcgattgggacggcggccaactcggcgttcgtctcgtgctggagccgaaggaagctgctgcgctccagcaggagtacgtgacggtccgcgcagccaacaggaaggttcagtcgcaggcagcagccgccaagcccgagggagctcagaacgtcgaaaaggcggtccagctctggccggaatgccttaccgactttctggcgaagcgcctggggcaactcttcaagatcaacgcatatgtactagacccggacaaatgcaagccgacggaagtaggcatcgccgcgttgcaggcgttagctgacgaagcggagccgctggacagcaatccgctcaagggtctgatccgcgtcaatgagattggcgcccagcgcggtttcggccaggccgacgacgaccgcgatgaagatgatgatgcgggcggcccctcccagactggaaatcgacgcctttctgaccagctaaagaaatactacagcgcccacctcgaccccttcgagttgccagacgcaaaagatcttcacgcgctagaagcgattgaaaccgctcagcgagcgtttgatggccgcctgaaagagggcttcgccgacgctatcaaggagatggaaacgctgggctacccgggcgtcacggaccctcacattgagatcgccacgcgtgtgcggccaatcgacggcctcaaccatgaatcagccgttcaatacgtcgttgccaagggcgcagcgggcgtaaaggcgctggcgctgcccgagtactataatggtctcggttatcagaacctcatctccatggtcttcaggctgatgagcttccgcgacggctggatgaaagtgaaaaaggcagcttccaaggcggccaagcttccccaggacgagaacgcggaaacgacaatcccgccacttcatattgtccttgtcgaggagccagaggcgcaccttcatgcccaggttcagcaggtgtttattcggcaagcgtataaaatacttcggaataatgcagcattgggagcagacagagcgctcaacactcaactcatcgttagcacgcattcaagccatgtggcccacgaatgtgagttttcatcgctcaggtatttcaggcggctaccgcctagctctggcattccgacttcttgcgtagtcaatttgacaacggtttttggagaagaagacgagacgaagcggttcgtcacgcgatatcttagaaccactcacgccgaccttctattcgcagatgcagcggtcctcattgagggacctgcggagcgaattcttgttcctcacttcattcgaaaagaaaagcgttttgaacgtttgaacgaagcctacgtgacttggctggagattggcggaagccatgctcatcgcatgcgaaccctcatcgagcgcctcggcattccgactttggttattactgatctcgacgccggagacgaggacggcaagagcgtttcgccagtgcgtggcgccaagcaaagcacacgcaatacgacattaagaaagtggtgcccggaaatcgaagaactagacactttgatcgaccttgcagagccaacgaaatgtaaaaagtacgacgccgagaacttctccgtccgggtcgcttatcaacatgcaatgaaggtcgaatttaaagaacaggcagcggtcgaggcgcttccctatacattcgaggacgcgcttgtttacgaaaatctcgacctatttaagaacatcaaaggcgcgggcctcgttgccaaattcaagggcgctgttaacgacgcggccagcgtcgccgagctttcgaccaagcttcacaccatcctaaaaagcggcggaaaggctgcattcgcgatggacatgctggaagtcgagggcgatttggcgctgaagcctccgcgctacatcgacgggggcctgacctggcttacggagcaggtgaaaatccgacaggacgctctacttggcgggccacccattccggaggttgccggtgtctga

SEQ ID NO: 79205 - DNA, 1881 bp, Caulobacter sp. Root1472
gtgtctgacgcgcttgttgccgacaattcgcacctcgacgacggcacggacgagcagatcgcacggtgcgttgatctcacacagcctcgtagcttcttcctcttcgctggggccggttcagggaaaacgcggtcgttgatcaacgcgatcaacgtcgtccgcgagaagagtggcgatgtcctccgccgtcgcggtcagaaaatcggcatcgtcacttatactaatgcggcgtgtgatgagatcgtgcgtcgagccgagttcgaccccgttgtgcaagtgtctacaatccacagcttcgcgtgggcgcttatccaggggtttgacgaggatattcgccgctggctcgccaatgatcttgcccgatcaatcgccgaactaagggcggaggaggcaaaggggcggcccggcacaaaggcttcagcaacgcgcctagcaagcatcgcatccaaggagcgccgcttacaaacgctcccgacgatccggaaattcatctatagcccgactggcgacaaccgtacgcgagactcgctgaaccatgcggaagtgctcggcatcacggcagcatttctgaccgacaagccaacgttacggaaagtggtcgtcagccgctttccattcattttcatcgacgagtgccaggacaccaacaaggcgctggtcgatgccatgttcgcccttgagcaggcccatcgcggttcattcggcctgggtctgctcggcgatacgatgcagcgcatctatagcgacggcaaagcgaacatcgagggcaatcttccgggggaatgggccaaacccgccaaacagttgaaccaccgctgtccaaagcgtgtcgtccagctcatcaatcgcgtgcgcagcagcgttgatcggcaggaacaaacgccccgcactgacagtccggagggtattgtccggtttttctgtcttcctgccgacacgcccagtaagcccgaggcggaggccaaggcggcggcgcttatggctgagattaccggcgacgaggcgtggaaaaatccgacggaccggaaaaccctcatccttgagcatcacatggcggccacaaggatgggtttcacgggtattttcggcgctctcgctggcgtcggtgattttcgaactgggcttttggacggtacgctgcccgcaacgtctctgtttgcgaagacggtattacccttcatcaacgcgcaccgggcgggtgacaaatttgcgcttggaaaaatcgtgcgcgatgcgtcgccgctgctgcgcaaagatgcgctgaaagcggcccctgaacaaaaggcgcaactcgatcttgcgcgaaaggccgccgatctactggcccaacagttcgacgggaaggaccccacgctgcgagaaattgccagcgtgatcgcggagacgggcttgttcgcaatgcccgaaatcatcgccaacgtcatagcaaagaaggcgaatgggacccctgtcgccgatgccgaagatgaagcggccgaccctctcccggagcgcgtcgcggcgattgaagtattcctggagtgtccgttttctgagatcggaccgtatgcagagtacgtgtcagggaattccgcgttcgatacccatcagggcgtcaagggtctggagtttccgcgtgtgttagtagttatcgatgataccgacgcgcgcggcttcatgttcagctacgacaaattattcagcgctccgcatgttggcaacgacggcatcggagacaaagagtccacggcggatcgcacgcgtcgcctgttctatgtgacatgcagtcgtgccagggaaagccttgccatcgttggctacgccgccgaacctaggaacctagcgaggcagttagaggcgaccggctggttcgagcgcgacgaaatcgttctggggatctaa

SEQ ID NO: 79206 - DNA, 2316 bp, Rhizobium sp. Root491
gtgcatcttcacgcttatcggttgcgaaactatcgcagattcaagaatgcaaaaattgaactaggaaatgaaatctcgatttttgtggggtctaacaatagtggaaaaacctccgccactcacgcggtgcacacgttcgtttccggtgcaaaggatcgattgaatctctacgattttagcgcgtgttgctgggcagagtttgacgccatcggcgagatcgatctcggcgcggcggaacccgcggaactcagacttcccagcatagacatcgatctttggctagatgttcaggcctcagatctctatcttgtcatcccactcctgcctagcacctcatgggaaggcacgaaggtcggtatccgggtctcgtttactgcgaaagttgcctccgagattgttcgcaactatcaggcggcaaagtccaaaagcgcggaacttaccaaggatcttccggatacttacgaaccctggccccgatcactgacggattatttgcaaaaagaactcaagaacgaatatgagttccgatactacgtactagaccgatctcagttcgatgaagaccttaatgagaccgggggctatgcaccgacgcagctggagacagagccgggcggtgcggctgtactgagatcattgatccagatcgacaacctgagcgcgcagcgtcatctggctgatccagtcacagagaccggcggagcgggaagatcggaagacctgtcaaagcggttaagccggttttacaaaagaaatctggatcagaggcaggatgaccatggcgccctaaaagcacttgccgattccgagaaggctctcaacatccatcttgatgacgtgtttcggccgacgttggatcgtttatcaaagctcggatatcctggcatcaacaatcccgagctgaaaatcatgtcagccctcgatcccgctcatgtcatgagtcaggatgcccgtgtacactacgttctaggcgatggggcgaacgctgcaactttgcccgatagttacaacgggctcggcttcaagaatttgatttacatggtcgtggaaatcctggacgctcaggcaaagtgggcgagtgtgggtgaaaatcgaccgccgctccacctgatcttcgtagaggagccagaggcgcatctccatgcgcaactgcagcaagtctttatccgcaacgtgctggatcttttgaagatcccagacgacgacgacagcatattttcgacccaactcgtggtgacgacccattccccccatattctttacgaacgcggcttcaagccaattcgatatttcagaaaacaaaagagcgggacggagcagatcactgaagtcctcagcctgtctcgtttctatgattcgcagcccgcggaccgagatttccttgagaggtatctcaaactcactcattgcgaccttttctttgccgacgctgcaattctggtagaaggcaatgtcgagaggctgctccttccgcttatgattgaaaaggtcgcaaaaagtctccgatcatcctgtcttaccatcttggaagtaggcggcgcctttggctaccgattcaaaacgctgattgaattcctcggacttactacccttatcattactgatatagacagcgtcggccccaccattttggccccggccggcgttgaagctgcagaaccggacgacgatgaagacgtggaagaatttgaggtgccactcatcccagatggcgaggcggcggaagttgcagcgcccgcggacgacgcggccttagaaaagaaaccaaagtttacgaaaaagatgggcaaggcctgcttgccttcgctcactggtgctttgacgtcaaaccagacactgatcagctggttgccgggttcgcaaacaattgcagaactgcgggattctgaggatgcggacaaaactgcggacctagatgatggggccaaggtgcgcgtggcttaccagaccaagcgccccgtcacctggaacggtcacaccgaggatttgtatggcaggacacttgaagaagatttcggccttgagaatccaacgtggtcacaggcggcagcgcgcaagaatataggccttgtcgtccgtgggcccgcgcccaacccaacggcattggcagctggcttgcataagaaagtttccagcaagagcttcgataagactaagttcgcactcggtgtaatgacagaggatgtgtcgagttgggatgtaccgtcatacattcgtgatggcctagtctggcttaaggaacagatcgcagtcgaggccgacgagccgttgcccgcccctattgcggatggcgttgtaggggttgaagccgcatga

SEQ ID NO: 79207 - DNA, 1950 bp, Rhizobium sp. Root491
atgattagccgcgccaataagcccgatacgcaagcggacctcacgttaaagcagtgcatttcggaatcacctccgcgaagcttcatcatgaaggcaggtgcagggtctggaaaaacaacctcacttatcaagggattgtcgggggtggtagccctgcatggcgaacgccttagaaaaaaccgccaacgggtcgcctgcattacctatacggaaattgctgccggagaaatctggcgcgacgtcggaaacacccccctcgtacatgtgtcaacgatccatagtttcatgtggctcttggcgcggccgtttcaaagcgatatcagagactgggtttcggggcgtatccaggaaaagatcgccaaactgagggctgagcaagccgccttcggccccagagttcagcagcgtaccaaggacaaagctgtccgcgatctggcgagatttcatcgtcaggccgcgcagatcgtgacggtgcagggttttcgttatggcaccggcagtgactatccgaagggaatattgggacacgacgacatcatcaagctcgggtcatacttgctaacggaacggcctctgttccgtacgctgacggcgcagcaattccccttcgtgtttgtcgatgaaagtcaggacacgacggtagaagtcatcgcggcgttgaaggcaatcggcctgaacgcaacgtcaccactatgcctcggattcttcggcgacccgatgcaacgcatctatgcgacaggaacaggatcgatcgatccggaaccggattgggtggaaattcccaagccggagaactaccggtgctctaaagaagttctggccgttgccaatgcaattcgtcgcgatggtgacgatttggtccaagttgccggggagcggttcggaccggatggagcaatccccactcaggacggttgcgcaaagcttttcgtcctgcctgctgatcagaaccgagatgataatctcaagcgggtccgaacgtcgatggcgcattttacgaatgacgaggactgggtcgagggtccggacgatgcaacgcgtatcaagctgctggtgattgttcacagaatggcggcgaagcgcctgggctttggcgatctctacgcagctctcaacgataaagcccccgatagctttaaaaacggtttcctggacgcgtcggcttggccattgaagccttttgtttctttcattctaccgttagcggccgcatctgcagcgggtcgtcatctggacgtgatgcatcttttgaggcggttctcccctctcatggaaaaagatggattgaagggacgagatgtagcgaaacagctgggaaaaatagaccagctggtcgcgtctatcactcaggcatttgcggtggattctgaagcgacagtgaaggacgtcctagcaattgtgcagtcctccgggctctacaacatcgattcccgcctgtccgcatatctcgacccgccacccgtacgtcctgccgaagaattggtcgaagcggaggacgtcgccgatgatgaggatgatggcgaggaactcaccaaggaaattgccgccatggatcgttttctgtcatgctctgtacgccagtttcttcactacgaggtctatgtcgcggaagaatctcctttccgcacccagcaaggtatcaagggcgcggaatttgatagagtcgtggtcgtcctagacgatgaagaggggacacataaccagttttcgtacgaaaaatatcttggtctaaaagctccgtcagacactgatctgaaaaatcatcgggagggcaaggagaccacggtggatcgaactcgccgattgttttatgtaagctgtactcgcgcactcagggatctggcggtcgttctgtttaccgcagatcctggcacagcggctgcgtctctccggaatgccggaatatttacacctgcagatgtactgattgaagccgacctagccccgtga

SEQ ID NO: 79208 - DNA, 1926 bp, Rhodanobacter sp. Root561
atgaagcttcaaacgattcggctgtcgaacttccattcttttggcgaaaagccaaccgagctcacgctggaagacatcacctacctgatcggccccaacggatcaggcaagaccgcggcgctccaatcgctgtgtcgcctcttcgccttcgatccgtccttgcgtcgcatccaacgctcggactttcatgttccattcgacgaaacgggtgtacccgaagagcgccagctttggatagaagccgatttcctgtttccggaattggcagagaatcatgacaacagcacagtcgccccacactttggccatatgcgactggacgaggcagatggcattccgcgcgtgcgctttcggctcagtgccaccatggggttggatggcgatatcgaagaaaccttggtttatgtgttggacatcaatcccgacggttcaccgctcacggtcgcacaagtacagcgcgcggagcgcaaccatatccacgttcactatttgcctgctcgccgcgacccggccgatcacatcacctatggtgccaacgcgctcctcgggcgcatgctccgcgccataaactgggatgcagaacgtggggatatccgagatctcacaaataaaatcagtgacagtctcgcgtccaaccctgctgtaaatgcgttcagcacgagattgaagacagtgtggggaacgttgcacaagggtaactttttttctgatcctaagatcacgtttgtcgcctctgagatcgaagcattgttgcggcacatgtcggtctcattctcacctgggcacgatgagcaccttgtcgacttctctcggttgagcgatggccagaaatcgatgctttatctgtccctcgtgctgtcgtctcaggcaatcggtcgggctgttctagcagaagaagacaaatcattcgatgctgacaagttgcggccacccgtctttacgttgatcgccgtcgaggagcctgagaacagcctttcgcctcagtacctcgggcggatcatcagtgcactgaacttgatgaccggaaatggcgacgcgcaagcactgatcgctacccatgcgccgtctatgctccgtcgcgttgctcccgaacgcattcgatacctgcgtatctcagatgcaagaacgtcacgcatcacgcatattcacctgccaagcaaaacagacgaagcacacaagtttgtgcgtgaagctgtgcaggccttcccggaaatctatttctcccggctggtggtcctgggagaaggtgatagcgaagaaatcgtgctgccccgactcctgcaagccaaaggtgcaccagtcgatgagtcggctgtctcgatagcacctttgggcggtcgccacgtcaatcatttctggcgcttattgtcggctctgcagattccctatctgacgctgctggatctggacgttgcgcgacatcaggcgggctgggggcgagtgaagtacgtgaatgaccaactcgcgaagttcgaaccaacaaagatccttccttccgattggccgttaccgccgtggaactcggccgaagcaccgatccgtacacatcacttttttgatgacggaaaaaggaacgtctttattgaactggagagtcgggggatatttttctccgctcccatggatctagatttcgcgatgctgatcgcctttccggacgcttacgacgtacttgaggaggtcccggatgatgcgacgatcaaggctgttctagggaaaagccactacggcgcatcacagtacagtcaagaggaattgaagctgtttgggacctatcaccgcaaatttaaacttggcagcaaaccggctgcgcaccttgaggcgctagccaatctcagtgatgcggacgtgcttgcacacatgcccgaatcactcggacgtttggccgatgcggtgatcgcaagactcgcggagttgcccgagtga

SEQ ID NO: 79209 - DNA, 1677 bp, Rhodanobacter sp. Root561
gtgattgctgtcgaaacctggcagcctgcggctggcctgatacttgagccgagcgcgctgcgtgccgcaacagagggagagcactgcctagccctaacggccggccctggcgcgggcaagacagagatgcttgcacagcgcgcagactttcttttgcggacaggcacctgtttctaccccaagcgaattttggctatctcgttcaaggtcgatgccagcagaaatttgaaaggtcgggtgcagcgccgttgtggctcagagctggcctcacgctttgacagctacacctttcatgcctttgccaaacgcatcattgatcgtttccggcccgcactcacgggcgagtatgcgttggatgtgggctacaaaatcgtcggcaggaaagcggggccttcccgcaccgagattgagtttggagatctggttccactggctattcagatcctggagaagtcgaacgtcgcacgcaatgcaatccgacaagcctacagcgatgtctttctggatgagttccaagactgcaccaatttccagtacggactggtaaagctcgccttccaaggcactcacgttcgtcttacagccgtgggcgataccaagcaaaaaatcatgggctgggcgggtgccatggacggtatcttccagaccttcgcagccgatttcactgcgataccgctcagcatgtaccgcaactttcgctcaaagccgcgcttgctgcgcatgcaaaacgaaatcattcgggtactcgatccagcgtccgttatgcccgatgaggagctgatcggcgatgaaggcgaggttttcgtgtggcacttcgacgacagccgcgaagaggcggaacatttggcggatctgatcgcaggatgggtaaacgaagaacaattgccgccttcggagattgccgtcctggtctccaagcaactggatctctatgccgaccacctcatggctgctctggaggcacatggcatccccttccgcaacgagcaacagatgcaggacatcacggtagagccagttgcccgcttggttgtcgactacctgtcttgcctgtatggcaggcgtgagcccaaagcctgggttcggttgatgaaccagctgatcccctttgcagatgacgaaatccagtccaatgcacggaaagatattgatcgattgatcaagcagcagcgaaaagaagctgccatggctgatctggccgtggagcctttcgcaggctggtgggagtttgtgcgaactttcttgaaacagatcagtatcgaaaccctcgtcgcgctgtcgccggactacgaatcccatgatcggctcaaggaagtcatccgggacaccaaggcacacatcgaggagttgctcaagatcgagcccgatttgcccaaggcccttgaacgattttcggatgatcaagcggtacgcatactgaccatccacaaaagcaaaggtctcgagttcgactcagtgatcatcatggctgtcgaaaacgaaatattttttggcaacaaagatgaaaaccgctgcgcgttttttgtcggagtgtcgcgcgccaagaagcgactgattcttacccacgcagatcaacgggagcgccctgctggatacgccaaacgatgggatttgcatcgctctgctcaaaatgaataccttggttacgccatgccgtttgtgaggcaacaacattga

SEQ ID NO: 79210 - DNA, 2046 bp, Rhizobium sp. Root564
atgtacttaagaaaaattaagctcgcaaatttccgttcgtttcatgagactgagattgagcttcaaaaagaccttacggttttcgttggcgaaaataacggcggcaagagtaatgcaatcgatgcgatgcggcttttgactgtaccgcttagtggccgccgcgagatttactgcgaaggaaccgatattcgctttcaaagtacgcggccggacttcgagatggtcggcgagttcgaggaactgtccactggccagcaaggccgactaatctcagcggctacagacgtttcccttacccgcgccgcgttcggattgaacttcaccgcgaaccgcgttggcgcaaggccgacgttatgggcaggaaaagaaggcaacacgcccgagccgggttgtcatgagatgatacgccacgtctatcttcctaccctgagagatgcgaagcgttcgctcgcgtccggaaacccgacccggatcatggctctcctcacacatttcctcgatggatcatcgccagcggaactggcaaaggatctggcacgcactcactcacacgatgtgcatcaaaaggttgatggtgcggtcgacaagggactacaagccctaacttccggcgtgcggcggcaaaccgcttctcttgggtttgcatcggatgaagcactggtcgacatcgctcgcgaccttcgctttaaactcgctgatcacggcgtggatccagaagatctgcggtactcaggacatggttacgccaactcgttgttcatggcgaccattgcagtggaactcgaaaaggttcggacggccgatctaacactttttctggtggaggagccggaagcacacctgcaccctcaactacaggccgccgttctatcgtttcttcgcgatcaggctgcccaatctaggtcgacatctcctaacgatggatccttggccggagagcttcaagttgtcgtcgcgacacactcaccaaacctctcggcgtgggtggccaacgagaggctggttttgttcaagtcggtcgcagtgccagcaccatcctcggagagtgaaaagacggagcccgagccacagctggccgacacggctgtaatcgagagcagtgcagcatccgagacgtcctcctcggacgagtcgacggatggagtcgtcgtcgcgacaatgacggccgcagcgatgcgtagatcgacgcgcgtcattccgctttgcaaacttccccttgacgacggtgaacgccggaaaatcgatcgttatctcgacgtcaccaaggccgcactcctgttcggtggtcgcgtgcttctagtagaaggtatcgcggaggctttgttgcttcccattgtcgcgaaacaccacacgttgaaaagtcaccctgaaaagctgcggctgttcatgtcgactgtcttcgtgcccatcgacggtgtggattttgctccgtacataaagttgctgctgacatcggtaaacgacgcacgaatagccgatcgacttgttgttatgaccgacggcgacagagcggccgacgaggatgaagacgacgacggcgatgcgcaggacgagacaaacgaaagcgctggtaacgttccctcacttgtagcggaagacaacgctgagagcgcttcagtccaagaagaggtcgcgcaagcgctcgatagcgagaaggatgaagccgccacccaggcgaaaaccgtcgatcccgttatacctggagagcggcggaagagagagttcgatgatctggcgacgtcacttggagggattgctcaattcagggcgatagccagcacctactccctggaaaccgaactgatcgaggctggaaacgtcgacattctccgaaacgtgtacctcgaacttcatccaaggtcccggcgaaagtgggataacgctgctgcattgtcgggcgacgcgcgtgcaaaggcgatccacaaaattttcaagacgacccggaaaggcgatttcgcccagatgctggccaagcgaattgaggatggcgaggcgttcaaggttccggcttacatcggcgaagcgattgaggccgtggtctcgtga

SEQ ID NO: 79211 - DNA, 1698 bp, Rhizobium sp. Root564
atcaaccataccgggtcggcgtttatcaccgcctgccctggggcgggaaaaacacgcacgctcgtcgagcgcgcgaggacagcactgcaagacgggaaacctcgccgcggtgttgcatttctctcatttacaaacgcggcggtcgaggagctcgaagcccgcctcagaggcttacgcgtcctgcctgtgccgctcttcccgagcttcctcggaacattcgatcgctttctctggcagttcttcattcaaccgtttggtattccggacatcgccgttttaccccgtctcgttcctgacaaatccgactgggaaatagtgccgttcccaaatgctcaacctctcgcttttcgcctcttcgatagacagaccggagacgccgatgaagactcgttgaaagaagcgggttttgatgttgagaaacgcaacataaccgcatgggaaaccgctgcgatccgcacccagaaaactgctctgagcaaggggatgatcgactttgacgatgtgcgttggatcgtgtcacagcgcttaggagatagcagttttcgagagcgcgtaggaaaggcgctggccgcccgctttttcgaggttattgtcgacgaggctcaggactgtaatccctcggatcttgacatagtcgcttggttgaggacggccggaatcgcgatcaaagtcatctgcgatccgcaccaatcgatctaccagtttcggggcggcgtcgcagatgagctgataaaatttgcgaagacgtttcctgatgatcagcagctatcgatgaccggcaattttagatcatcgcccgcgatctgcgcagcagtcgtggccctcaagccacctgggggcgtggcaacaatcgacaagccgcttggcccgcgcaaacatgacagcacgccggtgcacatcctgtcctacccgggtacgaaagtcacgccggcgataggcgcagcatatcagaagatagtcgcggagtacgaaatcccattagacgtcgcgccgttgatcgcctcgacgcgaccaaccggaagtaatgctatcgggcaaccgatcgttggccgaaccaaggaaatgacgttgcttctagcagaggcggcgatgcaatatcattttgcctttgcgtcaggaaaccgcaaggaggcgctcgtcaatctgcatcgaactgtactgtacgtccaagagaagatcccatcgctcggcagctatcacgcccacgtcgccgatacgaaccttgatgatggtcggtggcatcccgcacttatcgcgatagcaaacgatctggttgtgcgcgaaggcgagacagcggagggttggctcgcgcgcgctcgatccatcctcagccccggcctcgtcggcacgcggaaaattggccagagattgaggaagcataacaacctcgagacagtcctttcccagccgcctctccaatcgtctccagcgagaacaatccattcggtgaagggtatggagtttcctgcggtatgcgtggttatgaccacccagacaagtggtggaatccttgactttattgaaggaaattcggccgcgaaatggggagaagatgctcgaaaaatttacgttgcggcctctcgtgctgaaagacttctcgtgatcgccgctccgcatagccgtgtattgcgtttgaaagctttgctcgagaagcacggctgtaatgtcgaagtgacagaactggcgagggatggatga

SEQ ID NO: 79212 - DNA, 1800 bp, Achromobacter sp. Root565
atgcgaattagtcgaatctcggtcgagaattacgccaacttcgagaacgtcaactttgccactgacgacagcctggtgattgtcggagagaacaaggcaggcaagagcaacttgctcagggctttgcgcttagtgctcgaccccatgctgcctgaccgtgaccggcaattgggcctcgagcacttttgggacggcttaggcgacgcgaagcttggcgctaccgtcaaagttgtcgtggagatcaccgacttcgaggacaacgacaacctgctcactgtcctgggcggcagcctagtcggcactgaaagcccagtcgtcgctcggctgacctacatgtatcgccccaaggctgcgcttgagggcgcggcgccgaaaaccttggcagattacgagtttctggtgttcggcggcaccaacgaggacaacgcttttacggctgcccgcaggcgcgagctaccaatggattacctgtttgctttgcgtgatgcagaaggtgacctgctgaattggaggcgttcgcctcttcggcccatcattgaggagctgactgctagtctggatgagaaaacccgcgaagagctacagcagcttgtaagcaatgcccagagcgccctcgcgcagcgtcctgaggtctctgcggccgcaggcaaggtgtacgaccggcttgtggagatggtcggcaacgaacacgcggtatttttgacgctgggcgcgaccccgaccaatgtggacgtactgctgcggggtttgcggcttctaatcgacgggggcgctcgtggcattggcgacgcaagcctaggaacggcgaacctgctcttcttgaccctgaaggggctggagcttgagcgagcagtcgaggctggggaacgcagtcacacgttccttgctatcgaggagcccgaggcgcacctgcatccacatgttcagcggttggtgtacaggcactaccttggtgaggaggacgatgcgccgcagaacgtcaccaccatcttgacgacacattcgccgcatatcgcgagcgtcgcgcctctgcgctccatcatcctgctacgtgaggactctgaaggtgggtcgacgtcgattacctccgcggctgaggtggagctactgcccgacgaagaggacgacctgcagcggtacatcgacgtcacccggggcgagctcttcttcgcacgcggcattattttcgtcgaaggcgacgcagagcggttcctaatccccgagtttgccgctgcgctcggcgtcgacctcgacacacttggggtgacggtgtgctccgtggccagcgcgaactttctgccctacgtgaagctagtggggcctgatgccttgggagtcccctttctaatcttgacggaccttgacccgccggaggacgggggcgagccgcttgcctttgccagagtccgcgacatcttgggcctgtggatggagcaagaggacatcgaccaatacaaggagttcgacgacatctgggaagacggcgagttgaatggcattttcgtcaacgacaagacgctggaagtcgagctgttccaggctgggatggggcctgcaatggcgcccatcttacagaagcacgcgaactcttggggtgaccagcgaagggcaacgatgaatagctggatagccgacccgaccaagctggatgaaggcaagcttctgggttggatcggcgaagtcggcaaaggccgtttcgcgcaggcactggccggctccgccgccgaggcggtttgccctgagtacatcaagaaggcgctgacctacgtgaaaaatggcttctccccagtcgagtcctaa

SEQ ID NO: 79213 - DNA, 1800 bp, Achromobacter sp. Root565
atggcttctccccagtcgagtcctaaatacctgcaagctgcgctgcagctgcgggacaatcccggacagtgggcggcttacgagtccaccggaaactgctgcgtgctggcaggtccgggcagcgggaagacgaagacgctcgtcacgaagctggcgcgtgttatggcagaagacgtccggtcgcctcgaggggtggcctgcattacctttagcaatgaagcagcgcgtgagctcatccgccgccttcggcaacttggtctcgagcagtccccgagactcttcgtgggcaccgttcactcattctgcctgctgcatctgatgctgccatttgcgcaactcgctggcctggatctgccttacccactgaaggtcgccacggagtccgaggccgcgagcatatatcgggcggtggcagacaagcttcgcggcgtcgggcagccgttgcgcaaagaggatgcagaccgccaccgccgagtgaacctagaccgcagcggccaggaatggactgagaacgaggagataacggtcctggcagaggcgtacgagcaggagttgcgcaagcagggactcatcgactttgaggatatcgtccactacggtcagcgcctcgtgaacgagcatgactgggtgctaaaggtcatccgagccaagttcccggtactggcagtagacgaataccaggatttgggagctgcgctggaccgcatcgtgcgccggttgacctttgacgccggcgtgcgactcatcgccgtcggcgatgtggaccagtccgtctatggcttcacgggagcaaacagcgagctgctggaggatctgtccaaagaaaacgacgtcgagaccatccggctgaaaatcaattacagaagcggcaccggcatcatcgaggtcgcgcagcgggccttgggaaaagacaggggctacgagtcttcagaacctgagaggcaagcctccgtccaggcgcacaagtgcgacaaaggtctgcagcaccaggctgagtacgccatgcagacgctggtccccgcagcattggctgccaagcaggggcggcagcttggtgatatcgcagtgctataccgaaaccggaatgtgggcgacgcagcggcaattgaagccgtgaaggccaagtatccgttcgtccgcatcgacaacgccgccccgtaccgcaaggtgcctctcacgagctgggtggaggattgcgccatctggtgcgctggaggctggaaggtttcgtcaccaccgctgcacgatctgcaaggccgatggatttccttccatggtggcttgtcggacaaggaggcgcgggacggggccgcgcgacttacgcgctttctgtggaaccaccgcggcgatggtgcggcgctcgactttgtcgcggcgctacgcgccgaactgctcaacgtgttaactgccgcccgacaagagcttgccgaccagactgcgcacttggaaggcatgcatcaggcactcgagaaaggcggagttcttgtcggcacaacaaaggcgcagcttggtcgccgtgatggggcgcccaagctgctcaatctgctcacgctccactccgcgaagggcacggagtacgacgtcgtcatcatcctgggcctggaccaaggcgagttcccctcgccaaaatgggctgacaacactcccgagaggatggaggaagcgcgtcgcttattctacgtaggtatcacgagagcgcgcgacaaagttcatctgatgtacagcggattcaggcaggaccggttcggcaggacatggcgcgaagggccgtcacagttcttggatggcctgctgacgtag

SEQ ID NO: 79214 - DNA, 1782 bp, Lysobacter sp. Root604
gtgcacctagcgaagctgagcattcgaaatttcaggaactttgccgcggtcgatatcccgcttgccggcaacgtcgtcttactgggcgagaatcgcgtcggaaaaagcaatctgcttcttgccatacgattggtgcttgatcccactattcccgagagcatgcggcagctgaagctctctgatttctgtgacggctgcgatctatccacgaatccccggattgaagtgcatgttgactttgccgacttcgacagcgatccggcgctggtcgctctattgacggacttccgtactgccgctgatccgcgcatcgctcgactgagctatgtctatcgcaagcgggcagaggttgtcggaccgccgcagtccagcgaagacttcgagtacatcgtctttggcggcgaggacgaatcccgctcgataccatctcgggtgcgccgccggatcgcattggacatgctggacgccttgcgcgacgccgaaggtcagcttgcgtcgtggcgctcgtcgcctctcaggccattgctggaggatgccgtcgccacgatcagtgcggatcagctaggtacggtcgcgacagatcttgaagcggcgaccaagaagatggagggcttcccctccgtcaaggcgctggaagacgcgttgcgcgcgggcattctagacctggctggaaccgcgcaggatgtggatgcccgcttgcgctttgccgccgccgatcctcttcgtctgttccgatcgattgccatgtacatcgataatggtaagcgagggatctccgaagccagcctcggttcggctaatgtcgcactactggcattgaagttggcagagttcgtctggcggagaaacaagaacgaacggaatttttcccttctttgtatcgaggagcctgaagcacacctacatccccagcttcaacgctccgtcttcaacaagttgttcagcaatcctgacaattcccaggccctgatcgtcaccagtcactctcccacgctcgcggccgcagcgcccctgcgttctatcgtcaatctgcgtacgagccagggtgcgacgtccgcccactcgctcgccaagctgcccatcggtgcggatgagctcgacgatatcgaacactatcttacgtcgacacgctcagagttgctgttcgctcgtggcgtgatctttgtagagggtgatgccgaggaaacgctggtgccagtgtttgcagactcgatgggtaagaaccttgatcgcctaggtatcgcggtatgcaacgtcgccggcgtcaattttgttccgtacgtgaagctagtgggtgggctggggctgcctttcaccgtaataacggattgggacccgctggatggtgtgaaggcacctctaggaagaacgaggacgttgcatatatgggatgcctactgtgaggtaacaggtaaggctcctttgacagcggcagaacgcgctggttgggagtctgcgagctttgccgatttcagtgccagttgggcaacggccggcatcttcttgaacgagcataccttcgaggtcgtcatggccaacacacccggtctgcaagcagcactgttgcagattctgagcgagcaaggcttcggctcccggcgtatgacgcgtattgcggcgtggcgtgtcggcacgttggctatcgacagtacccagctgcttgcgatgatcgccgatataggcaagggccggctcagtgccaaactggagaagaaggtgccaaccttgctaccgccagcctacattgcgtcggccatcaattttctggcggcgcgtgtctaa

SEQ ID NO: 79215 - DNA, 1785 bp, Lysobacter sp. Root604
gtgtctaatcctaccgagctagcgcgggcagtcgcggaactgagcaagaacgctgagcagcgcgaggcggtctttgagactggccattgcgttgtgttggcaggccccgggagcggcaagaccaagaccctaaccacggcaatggcgcgggctttgtccgaagacgttgtcgaccctcgtggcgttgcctgtattacctataacaacgaatgcgcgaccgagctggaagcacggctggcgaggttcggcatagcaagcgtagacagaaccttcattggtaccgttcacagcttcgccctcacccagatcattactccctacgcccgatgcgtgccgggattgcttgatggcaacttccgcgtcgcgacggctgcggaatgccgcgcggcggtggaggccgcgcacaagaagatcattgacgacggtcgagatccgcatgagcactggcgatatgctgaacagaagcgtcgccgcgatgtggatcgcagccttcctgcgtggatggggaagaatcccgaccttgccagattcattgagcagtacgaggcagaactacgtctgcgcggactgatcgatttcgatgatatgccgcttctggcattccggctagtcaaggaacagacctgggtgcgtgaggctatacgagcaaagtttccagtgctcttcgtcgacgagtatcaagacctggggtacgcacttcacgagcttgtcctgctgctgtgtttccagggcgggatccgattgctggcggttggcgactcggatcagtctatttatggcttcaccggggccgatcccgaactccttcgagcgctgacccagcgcagcgacgtcaagacgatcagactgcgcttcaactaccgatccggggtgaagattattcgcgcctcgttgggtgctttgggggaggagcgggactatcgcggcgtggagggagcgcccgatggcacgttatcgttcatccaggtcgatgggcgtcatgacgctcaagctgaacacatcgctcaagtcgttgtacctgatttggtgggccgcggcttcagcatggagcaaatcgcagttctgtatcaggccgcgtggctgggcgatctagtggccggggcactggacggcgccggcattcccttcgtgcgaacagatcgaaacgcgttagtgaagcgaagctcgcgccttgcgcgcctgatcgaagcgtgctcgcagtgggtcaccggtggctggcatggtgccgatcccgcctacagtcgtcttctgcgagaggcgcttgggatcgtctttggagggccagcaagcgagccagaagagcgaatcctttccgctcagctggtggcctttttgcaggatggcatcgacaggggcgagacagcacaccaatggctacagcgtcttgataaagagctgatagccccctggatgacggtggcgaggaatcggcatcaggagtgggatgtttgttccgagatgatcatgcgcaccgatccagccaagaatctggatatggccttgaatgtgttcgcgggccggctagatgaaagcgggcgtttgaccttgagcacattgcatagcgctaagggtagagaattcgatgccgtcatcatgttcggagtcaatgaatcagatatgccaagtgcgcgggataggaagaacgaaagatctcttcgagaagccaggcgtctgttttatgtgggcgtaacacggcctcggaaagagctgtgcttggtttttcagaaaggacaccactctccctgggtcgtcgaactgtacaagcgcagccaggaaagccagtga

SEQ ID NO: 79216 - DNA, 2280 bp, Flavobacterium sp. Root420
ttgaaaataaaacttgtagaactacaaaatttccgcaaacttaattctgttagaattgattttgatagtgaaacgactctttttgttggtgctaataatagcggtaaaacttcagctatggttgcattaagattctttttaatctcacctatgcatctttcaatgagagatgttacaataggaaattgggaaaagattaataaagtaggtcatgcatgggaaaagaatcacctttcaacttccaacattactgagtttttacctaagctcgacgtctggcttgatgtgcctattaacgaaatttaccatgtcattcatattgttcctacaattgactggagcggtggattgcttggcgtacgtcttcaatatgaggttcaagatatagaaaagttaaaaatagaatatttaagtgagaggaaatcagccgaagcattgagaattgcacttttggctaaagataaagacagtactcctaaagtttggcctttagatttaactgactttcttcaaaataaatcttctaaacaccttgtgttgaatgcatacaatctggattctaagcttttacaattaaatctagaagatggtgttgctgaacctcaagcgctttcgaaaaatgcaattgttttagaaaacaagccttttagaaatattataaaaatagatgaaattagtgctcatagtgattttgctaatgataaaagaagttttggtcaaatagacgagcaaaaagaaccaagttatcaacaaagcaaaaaaccgctatcagaacaacttcgctcatattatgaccgtcatcttgatcctatgaaaaagatgatttcggaccaagacctagatgcattaaatgcaatacaaaaagcagaaaaaacctttgacgaaagattgaaagatgctttctcttttgcatttcaagacctagaagacttaggatatcccggggtcaacaatcctaaaataaatatcaatacacttctaagagcaactgatggacttaaacatggttcagcagtcgaatatgaagtggcagatcctagtggagatggatctaatcctttattattacctgaaagctattctggattaggatatcaaagattgatctcaatggtatttatgttaatgagttttcgagacggttggatgaaaaagtataaatcacaagctgatgttggaagtccatcggaagattttatagagcccttgcatcttgttcttgttgaagagccagaagcccatttacatgctcaggttcagcaggtctttataaaaaacgcttacagcttacttaggaaacatcctctactaggcaagggcaatactctatctacgcaattaattgttagcacgcattctagtcacattactcatgaagcagattttgcaaatttacggtacttccgcagacgtcaagcccaatctaaagatgttacagcaactacaacagttgcaaatctttcatctgtgtttggaaatgaaaatgaaacaacaaagtttgttaagagatatttaaaagcaactcactgcgatttgttttttgctgacgctgcaatttttgtggaaggacaagctgaaagaatcttggttccgcattttattagacatcattttagtaatctttctaagaggtttataacgttgcttgatcttggtggtagtcatgcacatagttttaagaaattagtagaagagcttggaataacaacacttataattgcagatttggatgcggtcgttccaactaaaataactcaaaaaaatggaacaaaaagtactagaaacaaatctgtaaaaccacagaaaggcaaaggacagaaaacttccaatcctgttttaaagacttggcatccaaaattagaaaatatagatcttttacttgctttaccatcaactaaacatattacacctataagtgatggatgtgatcttttcgtcgcgtaccaaaaggaagtgaaggttaataaagatacttttattcccagaacttttgaagatgccttgatttttgaaaaccaagtatccctcgcttcaatagatggttcatcgactactaaaaaggtgaaagagataatttcagacgggctaacaggtgaagatcttgccgatgcaatatatgatcttttaaaggatgctgaaaaggccgctttcgcacttgattgcgttttgacgcaagagccaacaaaaataaaacctcctacctatgttaaaaatggtcttacctggctggaagacactttagatggtaaaaatactaaacaagtaaccataaagaaatga

SEQ ID NO: 79217 - DNA, 1890 bp, Flavobacterium sp. Root420
atgacattaaatcccttaactctagcaccagcagatacagataattctgtagatattgaaattgctacctatctgaatccttctgtgccacaaagcttttttttatatgctggagctggttcaggtaaaacacgttcattaaaaaatgccttgcttgaaataagagataaacatggagaatttcttagaagaacatcaaaaaaagtagctgtgattacctatacaaaagcagctcggaatgaaattatctcgcgggtagaagaaaatgcactatttcatatctccacaattcatagtttttgttggtcacaaataagttcatttcattctgatatccaaaaatatttactcacaagtttacctttaaaaattctggatttagaagataaacaaataaaaggtagggcaggtacaaaagcagcatatgaaagagagaaaagcctagtaaatacatatcagagacttgaatatttaaaaacaccaagagaatttaactataatccaaatggagacaattttggacagtcttcattaacgcacaatgaagttattgaaataactgcttactttataagtaataaaccttcaatgcaggtattgttagttaataagttcccctttttattaatagatgaaagtcaagacaccaataaacatttaattgatgctttttttaagttagaatctgcacatactggaaatttctctcttggtctagtaggtgacacaatgcaaagaatctatcttgatggaaaaattaaactgggggatattatcccggaccattggaaaaagccaaagaaattcatgaatcaccgttgtcctcatcgtgtaatacagctaggaaatgctttaagattagatggagaagaacaaatgggaagagatgatggtgaagaaggatttgttagactttttattttaccgtctgacactgcaaacaagcaacaaaaagaattcgaagctgctaaaatgatggccaaaattactttagatgataaatggcttacaccaaaagaatttgtaaaatctcttacattagagcatcacatggctgctgttagaatgggtttttttgccctattttccactctggataaatctacaagcctgtcaactggtcttagaagtggggaacttgcaggattaagattattttcacaacgtgtaaagccattatttgatgctgttaaaagagaagatgatattgctgttatggcattgctgaggaattattcaccactattgaataaatatatacttaaaactagcgaagcttctataaatccccttaaaaaagtaaggaaagcagttaacgacttactgaaatttgacaacaatagcaaggttacattttttgatatactgcaatgtgtagcaaagcataatttatttgagattccaaatagtttgcaatcgtttgtaaacgactcccaactaaaacctaccacttttgttcatgatgatgaggaagatgaagaacaaaagacatcaagtttagaagcgtggggaaattttttacaaactgaattcaatcagataggtccttattcagattatgtaacgagtgtaggttcttttgatactcatcaaggagtaaaaggattggaatttgaaagagtaatggttgtgattgatgattctgcggcacgagggtttacatttaattatgaaaaattgctgggcgtacaagatcttacgccaaatgatctggaaaagatggagaatgaagaaagtaatgtagatcacacccgaaggttattatatgtaacttgcaccagagctgaaaaaagtttagcattaatagcttacactagtgatcaaaataaattagaaaatgcggtaattaacaaaggctggtttctcaaaaatgagataattaaaatatag

SEQ ID NO: 79218 - DNA, 1992 bp, Paenibacillus sp. Soil750
atgtatatttccgagatgagcataacaggctataaaaacgcaaaagagaaatcaactataaaattcaatgaaggacttaatgtattagttggtgaaaatggttctggaaaaacaacaataattaatgctcttaggttaatccttcgagagaatgaattctcatatatgaatatctctgaggacgacttttatatatcgttagacaagaaatcctcttcagataaaataaagatcgacctaacttttgaatcacttactccagatgaagaagttacatttttgacatggtgtgatgctgatttcaaagcccttcttcacttagaggtaaattcaaaccccaaccgaaaaggttattacaaaaaggaaatttggggaggaaactccaaatccagtatttttgaggacgagacatttgattgtatagactgcatctatttgccgccgcttagagatgcagaagagaaactaacaaatgggaaaaaatcacgactggcacagttattaaaaaagcaatacggagatcaaaaagagatacttgtaaatagtgttaaagagttcaacgataatattacaaacaatacggatggaaaatataatgaaatttcattggctaaaagcaatattaatggcaaattaaacgaaaccttgggacagcgacttggacagagcataaatttgcagttcgcagacacaagcttcagtaaaattgtcgaaagtattaagatggtctttttcccaaatagcaatgagaccgatcctaataaattcagagatattgccaccaatagtcttggttataataatttactgtatattgccactgtatttgctgaacttgaattgcttaaagataacaatctcatgactgttttattaattgaagaacctgaagcacacctacaccctcaacttcaagtgaaatttataaaatacttacaggaaatgagtgagtctttatcaaacactcagatttttattactactcattcacctgtcctagcttcatcaattagtattgacaaattagttcatatcgtagaaaaggggaatcaaattatttctacacctcttggactcatacagctaggggatagcaaaaattatttagagcgatggttggatgttacaaaatcaacattattattttcaaaaggtattattttagttgaaggaatcagcgaagctatgctgattcccgtatttgcaaaggtagtcttagccaaatataacaaagcggcaattgagaattccaagcagttattgccaaattctttagaagaggctggagtatcgactatcaacattaacggaattaattttaaacatttcatgaagttattctcttgcctagatgattctacagatgaagttaagttacctctcttttgttctggtatcacagataacgaccctccaaaagatgtgataccaatttatgataaagatggggaattaaaaaaagataaagacggtgacccgttaactaaatcaatcgaagtatatccacttccaagtaatcgtcctctaggaagtaatagtgccctttcacttattgataaaattaacaaaagtcgatgggggcgtctatatggatctcctcttaagacatttgaatacgatatcgcaatggaaaaaaacacaaaaataatggcgcgtactctaaaagaactttggcctaccaaagacggtaagatcacaaaattttgtgacgagattattagccgagataataactacactgatgaaacgtcactatcaaatgattccaaatttctacttgaacatattgataatgatgaagttggaaaaggggtatatgctcaagcatttactgatctaattgatctcgaaattaacggggagctaaagggtcttaacaaagataaatcaaatttagagtcaatacttgagaacattagcaagatagtgcttatccctaaatacttagaagatgctattctatgggcatgtggaggtgaaacaggtgaataa

SEQ ID NO: 79219 - DNA, 1989 bp, Paenibacillus sp. Soil750
gtgaataagctagatatccaaaatgcaattgctcatgtattgtgtagcaaagatcccacacaaagttttgaaagttgctttgaaaatcacactagtaaaacattaccctgctcagggtaccagcaatgccgtgtgactgaaaagacagaacaacaactggattatatattgtcatctatgactgataatgtctttttagaagcttgtgcaggtagtggaaaaactgaggttgttgggatgaagatgtcttatgaaattaataaatggaccaacactaaaagtggaattgctgttctgactttcactaatgaagcaactgacactatcgtgaatcgagtcgagagtttttcaaaaaaaacatcctttcatccgcactatataggaactttaacagggtttattcatggatatatttcccaattatttggatataaatatttcaatcataaaaaaataggtgacgatacttcatttagacttgtagataaatctgttgatgtttttaacaaccattggctagtaaaatacaaaatatctattccttatgtgacctcagcaggtcattcgggagatctttacgcaaaccaaatttattttgatttcaaaagcaacgattacataatatttatacctgataatattaaaatgagtgttacagagtactataattctcctggttttagtgcttatgttgagagtatacgcaaaaaaaccggtaaagaatggttatttaaaattgaatatgtaaaacaagaattccatgcagcaaaaatgaagtttttaggtgatggttttgcaacctttgaggatatgaacaatgtaggctatacaatcttgaaaaacaggagaatcgcaagatcaattacaactaggtttccaacaatactcatagatgaatgccaagatctatcatggattgaaatagaaattcttaataagctcagagaatcaggtactagccttcactttattggtgacttacatcaatcgatttatgaatttaaagatgcagatccagcatatacaaaaagctatctatcaacctttaaaaatctgagtttaacggataattttagaagttgccaaccgattgtggaattagctaatcgaatttcatctatatccttgccaattagaggattaaacaaaaataaattaaatgatgatagtgtatgttattacgaatattcggatttaaatttgattgaaaatcaatattcaattctccttagacgttttaatctatcttcagacagatcaacaattttagttcgacagcataacttaaaatcagaatttgaaatacaacataaaataaacacccacttactgctcaatgccattcaactgtggaacttaaaaacaccaataacacgaagaacagctttggaattcgctggaaaggaattgcagaggtggtttggtggcgcaagaacaagcaaaggttatcattgtccatctggcattaactcagcttttcgatggaggatatttattaaagacttccttgagttatgttgttctattccccaattgactgacattgtcggtaaaaattatagccactggtataagcaagctcgggaacaacgttccactttattaaaatctgcttatataaatctaaaggcatttgacagtgatatacgtgacttcgataatttaccgactttcaaagcgcctagtggtactgcaaccgatactgtagttatattaaacaatgcagagaaacctgaatccattactattaatacaattcattctgttaaaggcagtgacttcgatggcgtcttagttgtatcaagtaaacataatcgtggaagtggggcccattggaaacattggcttaatggtaatggggaaggaactcggataggttatgtagcaagtacacgtgcaaaatactctttaatttgggctgtgcctactctaacagatgaggacagaggttatctcgagtctttcggttttaagcgaatagaaatataa

SEQ ID NO: 79220 - DNA, 1758 bp, Paenibacillus sp. Soil750
gtgggcatttaccttaaagaagtgagaattcgtaattttaggtcgttaagggagatcaatgtatctttggattttactacgatccttgtgggagcaaataattcaggtaagaccgcatttcttaaagctctcgaggtcgttttcgggctggagaacaaaaaggtgaagaaagaggacatatacttatctggagccgggaattcctatcctaatgaagcggttatcgatgtgcttattgtccctgtagacgatcacggagaagtatgtaaggaattcgataatggttggtaccagcactttggtgctagcagaatccaattggatgatgaggataatcatattttgcccataaggactttcgtaaagtttgatccggtaagaaacggttttggtatatcccaatttgttcttgataaatggtatgcgaatcctgaattttggaatgattccataacgaaggagcaggtgccatcggggttaatggatatattgccacttgtctatttggatgcacagagagatattgttgatgatctgcggaatcctgattcgttctggggcaggattgttgcggacgttgggatgggactggaagaaacagttgaagcggagaaagacttggatcgaatgaatcagatggtcatagaccatagccctgtattgtcacacatacatggacaacttcaaatgttaaaagatataaatgctggtaccagcaacgaggtggttgtttctccattaccgcgaaaagtacgcaatctctaccgtggaattgatgtcttgtttaaagacgggatcagtgagttaatgccgttggagcaacacggtatggggacgagaagttgggctacccttctggcgcttcgttgttacatttcttggttgaaaaaagtacatcacgataagaatactccatatcactgcatgctggctttggaggaaccagaagcccatttgcacccccaagctcaacgcaatcttttggcgcaaattagtggaattgggggacagaagatcataagtactcattccccctttatagcgagtgtatctgaattatctagtttgagacatttcagaaaagtaagtgcggaaactgtcgtttcctctattatgacagaagccctcgaaccggaggacctgagaaaaatcgaaagagaagtcatgaatacccgcggcgaattattgtttgcaagggctattatcctctgtgagggggagactgaagaacaagctcttccactctggtttcatgaatatttcgggaagcgtacatttgaaatgggagttaatgtagtgggggtcggagggaaagggaaaaaatatttaccctttctacgggttgcagaaggtttgcaaatcaagtggtttatcttctcggatggcgagatggatacggttgatgaactgaggaccgcggtcactgaagtgggatacaccttgcctgattcaaatatagttactttggatacaggaatgaaatttgaaacctatatgttggcagagtattataatgagatggagaacttgatccgagatttgcatctgactaaagcagttaatgatcatcataaacaagccattcaaaataaggtttattcttatactgatctgcaagatgagctaaagggaggaaaaactagattcggacctatagttgcacataaactgattggcttgccggaccaagctaagagaattccgtcgaaagtgaggactttattcgaagcgttgtcccatgagtttgatacccattag

SEQ ID NO: 79221 - DNA, 1887 bp, Paenibacillus sp. Soil750
atgtcttacctgttaacggaattacagaaaaaagtagtagagcataagaatggaccacttttgatcctggcaaagccgggaacaggtaaaacctttctgttggcacaaagaataaagaagctattgaccgatgaacagggaaaccaccatatattggttctcacatataccaaagtggcgtctgaatccttgaaatccagactgtctcacgagctttcggagatggaaggttgggagcaaagagtatatatcgggacgttgttgaagtttggtcttgacatgcttagggcaagaggagatctaattggactacagtctaaccatatggttctgatggatgaatatgagcggaacgatgttcttcggagagttgtctactccctacctgatatggatagaagctcatttcatccagagaaaagccgggagactttagattttatcaggggaagaaaacgtcaattgacacccccaatagagattcccctgattcagatagacagcccagaactagaggagaatgagctgctttatcgtgaatatgaccgatatttgcggcaacatgggctgctggacatggatgatctgatttatttgccataccgaatcatcaaagagcgtgaatctctaggtgaattatataggaaacaatatacttatgtttgtatggatgacggacaggacttggattttgcaagttatcagcttatccgagctctgtaccccgatacaaagagtaatattatgataatgggagatcctgaccaagctatattttcttttatgggaggagacggctcatgtttatcaagctttcagcgggattatgagcccacggttattgaactggataaaagctatcgtttacacgaagatattgtaaagtacgcacggaagcttgtcccagagctagagcttgagcccaatttcattggtaaggaaggttctgttgatgtaaagggctttgaaactcaggaagcggaagcagcatgggtagcggacaaccttaaggaaatccaaaagttgggaataaagggtttagagaatcctccagcctggaaccagatggctgttatagcacggagcaggcataccctaaggaaggtggaagtcgcgcttagacaaagggggattccttacaataacggaaccttgggttacttggaaagcgagtcacgttttattcagctttttgagcttggtataagaattatgacaagttcatcaaaccgcataaacatggagcaaatgttgaatttccttcaagttaagcgcaaaccggaatccatcctgaatactaatcggggaatagatgctcttcatgccatgaagaatttaataaatggacaaacgggaagctccaactatgacgttcttcttaaggtgtgggattttctatctatgaatccttcgtcctttcctgacgcacttgaaaagttaagattttatatggaggatgaattagaaggcaattgggaatcccatggggaaggctacatcattcaggatgatctggccatgtggtctgactactggaaacaatatatgaacaccaaacctataagaccgtccctttcccaatttcgaactaacctgccgggtttaacccggaaaaataataccagtggtgtgaacttgttgacggttcatctcgccaaagggttggagttcgatattgtgcatattattgaacttaaccaggggactttgccatttcagcatatggagctttccgaggagaggaaaatcttatatgtcgcaatgaccagagctaaacgaatgctttatttgtcctattgtgaaagtaaaggaacaggagcccgcaaaagaaatcttcggccttctgttttcttggaggaaatgggcttgttaacagagcggacctga

SEQ ID NO: 79222 - DNA, 2328 bp, Sphingomonas sp. Root720; identical to SEQ ID NO: 79190

SEQ ID NO: 79223 - DNA, 1869 bp, Sphingomonas sp. Root720; identical to SEQ ID NO: 79191

SEQ ID NO: 79224 - DNA, 1842 bp, Hydrogenophaga sp. Root209
atgcgacttagccggatcgtcatcaagaatttccgcaacttcaagttgttggatgttcgcttaggcgaacatgccgtcgtcctcggagagaacaaagtcggcaagaccaacctgctgtttgcgctgcgactgatcctcgatccctcacttcccgactcgttgcgtaagctgcgccttgatgacttttgggatgggctggtgcggccactgaaggcggaggacgtgattgaggtgtcggtcgagtttcgagatttcgatgacgatgaaaatctgttggcggtgctggcggatcaccttgtacggccggacccgatggtggcgcgaatcacgtatcgttatcaacccgtgcctggtattgaacgtgccccgcgtagcgaggcagactacgaattcattctgttcggcggagatcgccccgacaacgcggttggctacgacctgaggcgttggatgccgctggatctatttccggcgttgcgtgatgccgaatcggacctcgcgcgctgggcgcgctctccgctgcgtcctctgctggaccgtgctgcaaagacggtggatgtgaaagcgctcagcacgatcgccggcgaagttcacaagactacctccaaaattgctgcactaccggaactcgcaggggttgtggaccaggtcaacaatcaactcacggccatggtgggggataagcatgctgtcgaaacggcactaggtttcgcgcctacagagccggaccgtttgctccgcgcgcttcaaatgatgatcgatggcggcaagcgcggtgtggcagaggccagcctcggatctgccaatgtgctttacctcgcactgaagcatctggagcatcaatacctggtggacgagggggagcgtcaacacacgtttctggcgatagaggagcccgaggcccacctgcatcctcatctgcagcggcttatctatcgaaactacttgcaaacgcgtgacgacgcgcaagctggacccgggccgcgcagcattttcctcaccacgcattcgccgaatgtggccagtgtggctccgctcgccaatgttgttgtcctgcgtcaggttgctggcgaagggcataccgtcgggcgctctctaaagggcatcaaactcgatgccaccgaccgcgaagatctagagcgctacattgatgtgacacgtggagagctgtttttctcaaagggcgtcattctcgtggagggcgacgcggagaagtttcttctgccgacgctggccaagctgtatgacgagaccctggatttcgatgcgatgggcatcaccgtctgctccatcgctggcaccaacttcgctccatatgtcaaattgttggggccgaaggggctcgatatcccatttgtggtgctgaccgatttcgatccgaagaaggaagaagtaagtcaggaggatgccgatccggatgacggaggtgtgacagatagctatggcaagaatcgcgtcgtcaatcagatcatggaacacatattggatgaggacgtttgggagaaaagcgactttgcgcaggtgatggtgctcgctccaaagcacggtgtgttcttgaacgaattcacgtttgagatcgacgttttccgggcaggggcagaggatcatttcctgacagccatcaaggacctcaccaccaacaagaagatgcatgcgcgcttcgcccgcctcgcgaccgatgctgattcgctcgatccctcgcaatttctcaaggacatcgactccatcggcaagggtcgagtggcgcaaaggctggcgtccgtactgataaaggagggggtggatgtatgtcctgagtacatcgaatctgcgctggactatctgaaggccaagctgggatga

SEQ ID NO: 79225 - DNA, 1761 bp, Hydrogenophaga sp. Root209
atgacctccactgcgcccccgcatctcaaagccgcagaagatttgcgcgggaacgacgatcaatggcgcgcgtaccaatcaacagggaactgcgtgatcttggccgggcccggcagcggcaagaccaagacgatcaccgtcaagattgcccggctgcttgctgaggatgtacaccgtccacggcgactggcgtgcatcacttacagcaatgcttgcgttggcgaactgcgatcaaggctaagcaagctcggggtgtacgacggcgatcgtctcttgctctccactgtgcactccttttgcctgacagagctggtgttgccctacgccgcactggcaggtctcgacgtgccggatccgctcgtcgtggcttcaccggcgcaggcgcgaaagctctttgccgatgcctatcgcgagcagttggggggcaatgcgccgagttggtttcgcatggcttgcgacaagctgcggcgtaccgtcccggacaagagtagtgacgagtggcgtgcatggtccgcccgtgagacagcggtggtggaggcctacgaaacattgcttctgaaaaatggcctgatcgacttcgacggcctggtccttgccggactgcaacttgtcgagaagcatgagtgggttagacgtgccattcaggccaagtatccggtgatcgtgatcgatgaatatcaggatcttggccttccactgcatcgcatcgtgttggcattgcttcgggcgggcaaccggatcgttgccgtgggggacccagaccagtccatctatgggttcactggtgccaagccgagcctgttgcgagcattggcccgcctcccacagatggagcacatcagactcaagttgaattatcggtgcgccgaccgcatcatcgctgcttccatggcgcttttgccggaacccgctgagtttcgttctcatgatgggcggacgggcgaaatccttatccaccgtttggaatgcaatatccgcgaacaggcggactatgcgctggggacgctggtgccggcgctcctcgcggcaaatccgtcttggactcacggggacatagcgctgctgtaccgcacgctcaacgaggggacaccgattgctcaggcagcggatgccctcggcttgcggtacttccggcttgacaatggatcgccgatgaagcgtacccgtctgaccgagtggctcaccgatgctgcgcggtggtgtgccggtggctggcagacagggtcagtgcctctttcgcagctgctcaaagcctggcgacggttgcgccgctctgtcacgcgtgaatccgaactgctggccgcacgcaagcagttgatctcggccttgttctcactgcgggacggtgcgcagcctctgcatcgatggctctcggtattgcgtcgcgaagcgttggatgaactgcttcgagaggagcctggtctcgccgatgagggagacaatctgaacgacctgatggaggctgctgctggcggactcttgcaaacattcacggtagagatcttcgggaatcagggcaagagtccggaccagatcaatctgatgacactgcacagctcgaaggggctggagttccaggccgtcatcatggttgggctggagaacggtgtattccccagcggctacgacaagaccgatgagcagttggaagaagcagctcgacttttctacgtcggcgtgacgcgcgcaagaactcagatccatctgacatacgacgccgacgagtcaccgctgattacgtccattcgggaggcgaactag

SEQ ID NO: 79226 - DNA, 2187 bp, Nocardioides sp. Root224; identical to SEQ ID NO: 79178

SEQ ID NO: 79227 - DNA, 1755 bp, Nocardioides sp. Root224
gtgaaggcgctggcacatgtaacgagaacccgcgggccttcgctgctcgcaaagacgcagcgcgtcgcctgcatcacctacacagaaattgccgcgcgggaaattcacgaggagatcggcaacgatcctctcgcctccgtctctacgatccatagcttcttgtgggcgttggccaagccgttccagaaagacatcggcctctgggttgcgacccgcatcgatgagcagatcgccgggcttctcgagaagcaagcgaactacaagcccggcacgcgtcagacgacaaaggacaacgacgcggcggctctcgagaagcgtcaacaccaacaggccgccgtaaagggcgtcaagcggtggacctacggcatcggggctgactacgcccggggcatcgttggccatgccgacatcatcaagatggtgccggagatgatccttgaacgaaggctgctggcgcagcttgtcggtcgccagttcccgttcatctttgtggacgagagccaggacacctttcccgaggtcgttgaagcgttgaagcacgtttggtcgctcgcggccgggaagatgtgcctcggcttcttcggcgacccgatgcagcagatctatcagcagggcgttgtctcggtgtcgctggagcctggctgggtcaacgtcgacaagcctcagaacttccggtcttcgcggcgggtgttggcctgcgtcaatgctgtacgtgccgaaggtgacacgctccagcaagtgagcggtctgtcggagcagcccgcaggagaagcattctgcttcgttcttccgtcagacgaccaacgtagcgaccgactggaactcgttcgtgtttggctggaccaacacagcacctcagggaactggactcgcagcgcacacgagggcggctccaagatcctgatgatcgtgcaccgcatggcagccaagcgtctcggcttcgagaacctgtacgcgtcgttccacgacaacaagtccagtagcctcggagacgcattcgacgaaggcaacgcgtggcccctgactccattcagagacgtgatcctgccgctctgcctcgcgaaggaggccagttcgcccgccgttctggcggtactgagagagagcagtccgcttgtgcgtgtggggcaggcatcccggcagctcaaggccgcactcgcatcaagcaaggcagccgttgaggagttacgccaactcgcagcagatccgagcacagcgaagctgggcgacctgctccgcagtgcagccaatagtgaactcatcgaactcgaccctcggatggctgcgtacctttacccggatggcgaacacggtgacgtcgtcctcgacgagcgggttgtcgacgtattgaacgccatggccgagtgcgtcctgtccgagttggagggctactacacctacgtgaagcaggagtcgccgtactccacgcagcacggaacaaagggatccgagttcgagcgcgtcattgtcgtcctcgacgacaatgaggggcggtactcgctctactcgtatgacaagttcctcggcttgaaggatctgtcggccaccgatgtcgacaaccaatcgagaggtgtcgactctgcgatcgagcggacgcgcaggctgttctacgtctgcgtctctcgtgcgcgggagtcactcgctgtcgtcttgttctccgatgacgtggctcgggccgccgaggcagttcgccagtcagcgattgggcagcatgttcaggttctcaccgtcgatgatctgtcacctctggcctga

SEQ ID NO: 79228 - DNA, 2136 bp, Rhizobium sp. Root268; identical to SEQ ID NO: 79176

SEQ ID NO: 79229 - DNA, 1803 bp, Rhizobium sp. Root268; identical to SEQ ID NO: 79177

SEQ ID NO: 79230 - DNA, 2067 bp, Sphingomonas sp. Root710; identical to SEQ ID NO: 72652

SEQ ID NO: 79231 - DNA, 1773 bp, Sphingomonas sp. Root710; identical to SEQ ID NO: 72765

SEQ ID NO: 79232 - DNA, 1764 bp, Rhizobium sp. Root73; identical to SEQ ID NO: 79194

SEQ ID NO: 79233 - DNA, 1899 bp, Rhizobium sp. Root73; identical to SEQ ID NO: 79195

SEQ ID NO: 79234 - DNA, 2139 bp, Pseudomonas sp. Root9; identical to SEQ ID NO: 73942

SEQ ID NO: 79235 - DNA, 1785 bp, Pseudomonas sp. Root9; identical to SEQ ID NO: 73943

SEQ ID NO: 79236 - DNA, 2028 bp, Bacillus sp. Root11; identical to SEQ ID NO: 72154

SEQ ID NO: 79237 - DNA, 1962 bp, Bacillus sp. Root11; identical to SEQ ID NO: 72843

SEQ ID NO: 79238 - DNA, 2028 bp, Bacillus sp. Root131; identical to SEQ ID NO: 72154

SEQ ID NO: 79239 - DNA, 1962 bp, Bacillus sp. Root131; identical to SEQ ID NO: 72843

SEQ ID NO: 79240 - DNA, 1827 bp, Bosea sp. Root483D1
gtgcgcatctcgaagatcaaaatcgataattttgccaatttctcggagttcgaaattgagaccggcgacaacctcgtggttgttggagaaaacaaggttggcaagagcaatctgattttcgctctccagctcattctggatcccggattgtcagagcgcgaccgacagctcgggcttgagcatttctgggatggcctgggcgaccataagcttggcgcagtcatcgaaatcgtcatcgagctcacggatttcgaggacgatccgcggctgctcgcccatctgggcgactgcatcgtcgatccgggaccgccgatggtgtcgcggcttacttaccgtttccagccgaaagccgacctcgacggccatccgcagagcatggccgattacgagtatatccttttcggcggtctcgatcccgacaacgcgatgcgtccgcgtctgcggcgcatgctgccgatcgatgttctcgccgccttgcgtgatgcggagaaagacctggcgacgtggcgacattctccgctgcggccgttgatcgaggggttgacggccggactggacgaggacgaccgcgctgcgatccaggaggccgtggacaccgcccagaatacgctcgccgaacgcgacgaggtgcaaagcgttgcgcagatcatcagcgatcgtcttcaagagatggtggggccggcacatgcgactccgatctccctcggcatcacgccgacacgcatcgacgccttgctgcgcgcactgcgcctgctgatcgacggcggagcccgcggcatagcggacgccagcctgggtaccgcaaatctcatcttcctcgcgctgaaaagcctcgaactcgatcggctcgtcggggagggagagcgtgaccacacgttcctcgccgtcgaggagccggaggcgcacctgcaccctcacgtgcaaaggctcgtctatcgtcacttcctggccgagcccgatgacgaagcagacgaggacgaggacgcggaaggggaaggcaacgaagatccggcgtcggcgacccgactgacgacgatcttgaccacgcattcgccgcacatcgctagcatcgcgccgctccggtcgctcgtgctgttgcgccgcgacggcgaaggggatcgcacggtcggattttcaacggcgaacacgccgttgaccgaggcggacgaagccgatcttcagcgctacatcgatgtcacgcgcggcgagctgttcttcgcccgcggcgtcattttggttgaaggcgatgccgagcgcttcctcgtcccggctttcgcggaagcgctggacattcccctcgatcatcgcggcatctctgtctgctcggttggaggaactaatttcgggccatatgtgagactgctcggaccggacggcctctcaatcccctacgttgtcctgaccgatcgtgaccctgttgaggctggtccgccactggcgcgcgggcgtgtgcaaaagctcctcgagattgttgaaccgggacccgtctatgatgatctcgccgacgccgcgatctttcggcgtggtgagcggcacaacattttcgtcaatactcgcacactcgagcccgaactattcggcgccggacttgcgcgccgcatgggcgaaatcctcaaatcggaactgcctctgcgccgggccggacgggaagcgatcgacggctgggtggccgctcccgcgaccgtgaatgtcgatcggttgctcagcctgatcgagcgggtcggcaaagggcgcttcgcccaacggttggcggcaggagcgactgagcgtcggtgcccggcctatattcgggccgcgttggagcgcatccgtgatgccgttgcgtag

SEQ ID NO: 79241 - DNA, 1821 bp, Bosea sp. Root483D1
atgccgttgcgtagcactagcgcagcctatctgcggcatgccggcgatttggccggcaatccgggacagcaggctgcctatgattcccgtgggcactgcgttgtccttgcgggaccggggagcggaaagaccaaaacgctggtgctgaagctggcgcggattctcgcggaagatgtcagagccccccgcggggtggcctgcatcacatatagtcaggaatgcgcccgcgagctgacgcggcggctggaggcgcttggattgcgcgatgcgcccaatcttttcgtggggacggtgcacggcttctgccttcggcacatcctgacgccctatgcacgcctggccggattagccgtaccgtatccattgacgctcgcgacgacgcgtcagaccgatagtgcgttcaaacaggtggccgagcgtctgctcggagtcggacagccatataagacacacgatatgggcaagtatcggcgcatccatctcgatcgagatgcccccgattgggaaagcgatcccgacctcgctcgcatcaccgagggttatgaggcggcgctgcgtcgtgcaggcctgattgatttcgacgatctggtgatcttcggcaatcgtctggtgtcggaccacgactgggtgctgccggccatccaggcgcgctggcctgtcttggcggttgatgagtatcaggacttgggcgtgccacttcaccggattgtggagcgcctcgcattcgatggcggtgtgcggctgttcgcagtgggcgatgccgaccagtcggtctacggcttcgccggcgcagacggcgctctgttgcttgagctcgcgcagcgcgacgatgtcgaggcggtccagcttcagctcaactaccgttcggcgggaaggattatccgcgcgtccgagttggctctgggcgaagcgcgtggctaccagccccatgatccggggcgccaagcagtgattgaattcaccgagcggcccggcggtctggaggaccaagccgcccacgtcgtcgaaaacctcatcccagcggcgctggccgcaaagccgggccgtaccttgggggatatcgcgatcctgtatcgcgctgccagtgtgggggatgtcttcgcggactctctgacggcggccggctacgactatatccgcgtcgacaacgctgcgccgtacaaaaaggtcggccttacgagttggatcgaggattgtgccgcatggtgcgctggaggctggcggaccggacgcccccaactcgctgggctcatttcgcgatggaccggattccgatctggccggccagatgagcgcgaagcgcgccgcatggcgctcgcactaacttcatttctctctgaccatcgcgccgatgaaggcgcagcagcgcctttcgtcaccgcgatccgaagggcattggtcgacccgctgacagccagcgagcgaagtcttgctgaccagcgcgagcaggtccgacggatgagcgaggctctcgctgaaggcgggaagctcgaagggctggacctaaagagcctgggagggcgggatggctcgcctacccatgtcaatcttctgacgctgcattccgccaagggctgtgagtacgatgtcgtgatcatggtcgggatggacatgggcgcgatgccgtggcgtcgcgaaaccgaaaacgagcttcgggaaagccgtcgcctgttttatgtcgggctgacccgagcgcgcgacgcagtgcatatgctctattccggctggattcccggccgctacggtgctcagcgcctcggccgctcgccgttcgttgaagagcttgaggagcgcctggtggcggctgaagaagatgagtga

SEQ ID NO: 79242 - DNA, 2001 bp, Flavobacterium sp. Root901
atgaaaataagcactttaaagattaaaggtttcagatcatttggacccaatgaagttttgattccaattgaagataatctggttgggctgataggcctgaacagtgcgggcaaaacaacttgtcttgaagcattaaaaaaaatgtttgggcagacctctgcagatcgggagcttttccgtcaggattttcatgtcggtaaggatgaggatcctgattttgccgaagagaaacatatatccattgaagctgtaattgatttttctgaggaagaaaaacaggccataccgcattttttttctgaaatggttgtagatgaacaagacggggatccttatctacggataagattggaagcttattggaaaaaatcgaattttattcctgacggggagatcgattccaaaacgtattttataaaaacggcgcagggatttcaggaaactgaagacagcaaaaagctttttcccagccattttagaagtttgattcaattgctgtatgttcccgcgattagaagaccttctgaacagctgcggtattcttcgggcacaattttatttcgtgtactgaaaaagattaaatggggcgaagcttttaaaggggattttgataagaaagtgactgaattaaacaatcttttcaattcgctcgatgagttcggaacagttcagcaatccataacagaactatggcagcagttccataaagatgaacgttataaagatactgcgcttggctttggaggcagcgatcttgattcaatattaaaaaaaatcgagatttcgttcagccctaccggtacttatagatcctataagattgatgaacttggagagggctaccgttcactgttttaccttaccctggtgtgcgcgctgttagatattgaagaaaaactctcagaacaggaagatcaggagaatatcgggataaaccgtcctctgcttaccatccttgcagtggaagaacctgaaaatcatattgcgccccagctgctcggcagggttataaaaattctaaaaaaaatcagttgcaatgacagctcacaggttttaatgtcctcccatacaccggcgattgttaaaagattaaaacatgaatgcatactgcattttagaattaaccataaatatgaaactcaagtcagcagaattttacttccggaaagaaaggacgacgcctataagtacataaaagaagccgtacacaattatcctgaaatttattttgcaaagcttgtagttattggagagggtgatagcgaagaggtcatatttaaccgcctgatggaggtcatgaatattgatttcgatgataatattataacattcgcccccttaggacaccgttttgtaagccatatttggaaacttcttgaggcacttcatatcccttatgtgacactgcttgatctggatatcgaaagagacggcgggggatggggaagagtgaaatatgccttaaaacaattaattgaagtaggggcggatagagatatcctattgaaattaaaagggggaggggtgttgcctgattcttccttggaattgatgcataaaaaaacgttaaaaacagataaggatttgaaaagcttgggttcatgggtgcgcacactaaaaaggtacagagttttttactctgctcctctggatcttgattttttaatgcttacgcactatcctgaattttataaaagggcagtgccggaaaatggcggaccgcagattcctgataagcaaaccgaagaagagaaatttgctaaaaaagtttccttagcagttcaggcagtcctaaaatctgaaaaagccatcggctataactattccgaagaagaaaagcagctgatgatctggtacaattatcatttcttgggaaggggaaaacccgtaactcatattcaggtactgtcttcaatgaaacccagagagatcagagggaatctaccgccggtttttagagaattttttacaagaataaaagaaattttagataaacaataa

SEQ ID NO: 79243 - DNA, 1842 bp, Flavobacterium sp. Root901
atgaagcccattaaagctgacgagtggattcctgcagacggacttgagctcgaaaagaatgcgcataatgtcgcaacagaagttaaaaatagtctggtggtggctggtccgggagccggcaaaacagaacttttagcacaaaaagcctgctttttgctgcagaccaacacctgtgattatccgcataaaatccttgctataagtttcaaaagggatgcggccagcaatctaaaggagcgagtgaggctgcgctgcggtgacgaactgtcaaaacgatttgattctctgacatttgattcatttgccaagcagattcttgatcgttttcactcagcgcttccagatacattcagattggtccccgaatacgaaatgctcttaaatgaaaagtctgtattggaatattacagggatgaagatgctgatttttacggttctgccaataaagataaaatcataaaactgcacaatatgcagctgccgttttcaacggacagttcagaagaaattttgaagggtagggtatggggcagtatgatgcgggagggaaagctctcatttataatggtgatgcgtttagcacaatatattatggccagtaatcctaaaatcaggtcatacctgcagaccacctatcaattcgtttttctggatgaatttcaggataccactgaggttcagtatgatttttttaaaagctgttttttggacagcagcagtttttttacagcagtcggagacgacaaacagcgtattatgatctgggcgggagcccgcaaaactgtatttgaagattttatggctgaaatgggggcggaaaggatacctctggatatgaatttccggtgcgcccccagactcgttgccctgctgaaccatcttaccaaacacctgctgggtaaagatgatctagccatgccatctcctaaatggcatgaagatcagggtgaatgccaggtctggatattcgaggatcctgaatccgaaatgaaaatactgttcacggatattcaaaagtggatcaatgaggatggaattgatccgcgagacatatgcatattggtaaagcagcagcttgacgtttatgcagggcagcttattgatttttttaatcagaacggaataaaagcccgtgacgaaaacgttctgcaggatgtgctaactcaggaattatgcaattatgccatcgatgtgctgtacctgatattcaatagcaaatcagggaattccaaagaaaatgcctttaactttttgaaaaacctgcatacggaacttgatgatcagcagctccttaagctggaaatatccatttcaggttttattgccgggctaaggcagaaatggaaaaaaacaagactttccgaagaacagataaaaggcctgattgatgaaattatcggctttgcaggcattgaccgcataagggccaactatccccattataaaagcataaccgaatttaaccggattacaggactattgaaaaatgaactgatcaaagattactttacagtaaatgatatgggtgaagccttagacatggtgatgggaaaagataccatacctgttatgacaatccacaaaagcaaaggactcgaatatcataccgttgtatttataggtttggaagatggtgcattctggtcattcgaccgacagcctgacgaagataaatgcgctttttttgtcgccctctcaagagcgaaagaaaaggtaatgtttaccttaagcaagaaaagaacggtcagatttggagagcagaagcaatttataaataagattaaagtcatttttgatgaattgcagaattcaggaattgtgcagatagtcgaaaggaaataa

SEQ ID NO: 79244 - DNA, 1956 bp, Bacillus sp. Soil768D1
atgtatatcagtaaaattaagatgaaaaactttaggcttttaaatgataccagccttgatttaaaaaaagatttatcattactaattggtagaaataatagtggcaaaacgtcttttttagttttatttgaaaagttttatgaacaaaaggattttaattataatgatttctctttatctctaagaaataagattaaggatattaatgatcacacagaaacaaatcagttaacaattcaaatggtattggaaattaaataccataaagatgataatttagaacatatatccgattttattttagatttagaccctgagatagatactgtaaagatattatttgaatgtgctattaataaaaaaagccttttaaaggatttgctaactattgagagtgaagataaagagaggtatataataaaaaatattaatagctatttacaaaaagatgtttatgttttcgatgattataaggatttagaaattaataataggcacaagctggttaaaaaagaattgaaaagcattaagaagttaataaattttcaaataatacatgctaaacgggatgttgctagttcagaagaaaataaagaaagtaaaaaagtgctttcttcattgactacaaaatattttaataataattcacaaggtgatttcatttcaattaataaacaattaattgaaatggatagtaaccttgataaacaatatgatactttctttaagacatttttaaaaaactcaaaagaatttttagaaataaaaaatataaaagtagtatcaaatctgcaatctaatgaattgcttcaatactcatctcaagttgtttatggtgttgacaataatcatttaccagagaatcttaatgggttaggttttatgaatattctttatttattattaacaattgaaatcaaaaaagaaaattttattgatataaataaggaaataaatctattgtttattgaagaaccagaagcacatacacatccacaaatgcagtatgtttttgcaaggaagattaaaacaattctagatgacgtaaagaatcttcaaactgttgttacaacacattcagcacagatagtatcacaatgtgattttgaagatattagatacttaatgaaaacagtagatgaagatggaaatgaaaatacagaaataaaaaatttccatacagaattggagaaaaagtatacaaagttagaggaatttaaattccttaaacaatatttaaccattcaatcggcagaactattctttgcaagtaaaattatctttattgaaggcactacggagaaaatactcttaccttattttattaataaatttgacaaggaaaatgaaaaaaaagaatcgtatattccattatcttctcagaatatttgcattttagaagtgggggcaaatgcaaaggttttccatcactttcttgagttcctaaagattaaaacattgataattactgatatagatacaacagcaaaaatgagtagtgacaaagggtactactctgcatgtgaagtattaaaagcacagaacacgagtaatgaaacattgaaacattttctgagggcaccagatttgaaaacggaaaaaccagcattcgaaaagtggattgaaaatttaagaactaatgctctggatgattatagtgaaaacataaaaatagcttaccaaacaaaagagaaaaattaccagggtagaagttttgaagatgcctttattaacataaataaggaaacaataaaaatgaataaagataatatagacggtttaaaaaagacaaaactgtttgaagaagaagaaaatatatatgagttaactcaagaagttttagataaaaagtctaattttgctgcatccttattgtacttggcattatctgaagaggcgattgattgggaaattccagcatatattagaggagggttatcgtggatagcggaataa

SEQ ID NO: 79245 - DNA, 2037 bp, Bacillus sp. Soil768D1
gtggatagcggaataacttcattagacaaaataaaaagttgtataaaaaataatcaaaattttgttcttcaaggtggagcgggaagtggtaaaactgaaacattaaaacagctcttagaatttttatcagaaagttacccaggaaaaaagattgcttgcattactcatacaaatttggctgttgatgagataaagtcaagagtaggagaccagtatacaatcagcactatacattcctttttaaattcattaactaaagactataagaaaaatattcagaaggtaattttcgatatatttaagttgagtaatattgaaagaaaagggcctgaaaactatgatgatgaaaagcaacaaaaaaaagaggaatttgataattataaaaaaacacaaaaaaaatatgctgacaagttatatacagtaaagaatgaatcaactaaaaaagttgagggaaaaagggactatgataaggatcctgaaggatttaatagaattttaaatgaaaaaattaatatactgaataaagaaataaaagcagaaattgaatctaaagatttttataatattaaatataatgagactaggtttgatgattttaatgaattaacttttggacatgatagtttacttgaagtttcttacctgctttttgataagtatgaaattttagggaaaattctacaagataaatatgattttatctttattgatgaatatcaagatactaatgaaaaaatcatagatatctttttaaaaaaactcccctttaaagagaaaaccataataggattatttggtgattcaatgcaagctatttatgaagatggtgtaggtgatgtcgaaaagtatattgatgataaatatttagttaaaattattaaagaggataactatcgatgttctgaagaagtaattaaatttataaatcaactgagaaatgatgggctaaaacaacaagtagcatttaaagtaaataaagatgctattaaagaatctttatcagatagacaggggagtgttaagctttattattctatttatgataataagcctaatgtatatagtaacctagaagataaagctaattatgaaaatgtgttaaatactttgattgaaaaagcgtgtcataatcaagaaaattataagacactcatgctaaccaataaatctattgctggtaaagcaggatttggagccctttatgatgtatttgcagcaagatatcttgatccgaaggaacaaatagataatcatttattgaatttacaatttttggatttatttgaactttgtaatgcttatgagttgaagaattttaactttatacttgataaactttataaatccaacttttctataaaacgtttagaagataaaataaaattgaaagaaagttttgagaaaataataaattcagataaaagtgctttggaaacattagatatggctttcaaattaaaacttataaaagttgccgataaaaattcggaatattcgaacaggaaaaatgcttttttaaaagagttagatcaaattgatgactatcaactatttaaatcaatatacaatagtggaaacaaaacgtttgcaaaaattaaagataaaatggattttttagaggaagatgcatttaaagatttcgaaaacaaactaaaaaaagaagcgttctacgttgatcttttttcagacaaaataaaattcaaagatataatgaattactttaaatatgttaatgaagaaactcaatatataacaatgcataaaacaaaaggatcgggcattgataatgtaatagtcgtacttgatgaatacttttggaatcaatataattttaatctaatttttgattctaactataaagacgaaaagaaaaaacttaaaaaccaaagacttgcgtatgttgcttgctctagagccataactaatctgacatgtgtcaaacttatttctaaagatgaagaaatagaaataaaaaagtttttcaaggatccaataaatgtagaaatagaaagattaatgacaatcccagttaattaa

SEQ ID NO: 79246 - DNA, 2298 bp, Stenotrophomonas ginsengisoli
atggtatctcgcagtgcgacagggggtatgtcgctaagatttattgagctgactgggtttcgtcgtctggaaatgattcagatggaaattgatcagaagactactattctggtcggcgcaaataatagtggaaaaacatcgatactcgcagctctccggcacttccttgcggacggatctccgttcggtgcattcgacatcagcctttcgcagtggccaaagctgcgagcttttggaaaggcatgggaagcgttgttggaagatcctttgaccgtgagtggtgacgaggaacattgggagcagcagcttcaaagccttctctcggccatgccaacgctggacctctggttcgatgcggaggcgggtatgtaccactacgttgctccatttctatctaagttcagctggaagggcggtgccgtgggtatccgcctgcgcctggagccggcatcaacagctgaagagctgaagcaactcgcttgggtatatcgcgcggcacgcgagccagtgaaggatatgggcgctgactcgctggcctggcctatcgaccttctagacttttggctccgtgagccctcaaggcttggccaggttcgtgcatacaagctcgatgcagaaaacaatcctatagctggcttcaagacctacgtcaccccgacacttgctgcaaatgccattcatattgagcgcaagcatctttccagggtcatacgggtggactttgttgccgcacaacgtgggctgggcagcgaagaggctgagtcgcgatccgcctccggccctcatcgagtaggtatgttctcaaaccagctccttaagttcgcccgtcagcacttgaacgtctccagttcagggcatagtcaacgagcggatctaatcaaagctgtggcggacgcgcagagagacctcgataagaagattcacgaagcaattgctgattcagttgaagaagtgaaggagctcggctatcccggtctgcacgatcctcaagagattcgttttcgcacacgcattcagacggctgatctgctagaccacggaactgcagtccagtacagcatgcagaaggagtcgctcgaggagttactccctgaatactctataggacttggctaccagaacctccagtcactcagctatcagctggtgtcattcaaggcagcacggctcaagccggataaggaatctcctgcacccgttcacctagtgatgattgaggagcctgaagcgcatcttcacgtccaggtgcagcgcatcttttccgacaaggcacacaaactcatcagcccggtgggggcggacgtttccgccctcaacagccagctactcattagtacccactcgagccatcttgcacacgccgagaactttgatcgtctccggtatgtccggcgcattgctaagagttccgcgagtccaatgccgacaaccgaagtggtcaatcttggtcaggtctttggtgacgacaagaaaacacgtcagtttgcagagcgctacttccgtgttcaacacaccgacctgctattcgcgaatgcggccatcttcgttgaaggcgttgccgagcgcatgcttgtccccctctttatggaacgggatttcaaggatttgagcagtcggtatgtatcctttcttgatattggagggagccatgcccatcgactcaagcctctagtcgagaagctccggattcctaccgtcatcatcacagacgtagatccttgcgaggaagaggtcggcaaacccaagaagaacggtgagccaactaagaagttggtcgctgttgcaaacacgggccaagcaggcctccaatgtggcaacccgacgctccgaggttggcacccgaagcttcagaagctagatgacttcaagagtccgaccgacgctcagttggtatggagtgagactgcagagtgcctcgttcgattcgcctggcagctgcctgttgctgaagcagacggcagctggcctagctcttttgaggactctctcgttctttcgaacatttcttggttcaagggtctcatggatgagaaggtaggtgatgatggcctggagatagagccgccaactggggcgcttggttctgtagctaaagctgtcgccaatgctggaagtgttgctgagatggtcgctgcgcttcataaggtaatgcacggatcgctcaacaaaggcgagcttgccgcgagcatcttcgagaaactggcctctgatgaatcagttgtctgcccaaagtacatcgcagatgccttggcctggctacaggctcagcttgagcccagcaaggaatcggtggcatga

SEQ ID NO: 79247 - DNA, 1959 bp, Stenotrophomonas ginsengisoli
atgaatgctatccccatctttgccgataacgagcgcgatgcaggggtcgtcgaggaaatatgcggatatcttactgaggagccgccgcgtaactacttcctctttgctggtgctggctccggaaagacgcgtactttagtcgaggttctgcgtcgaatgacaggtgttgtgcggcacgaaaagggcgggcagcttgcccgacgactgcgaacgtatggccgttcgatacgtgtggtcacatacacgaagaacgcggtcgcggtcatcaatggacgtctcggagacaacgatcttgtgagcgtctccacaattcatgcgttctgctgggagctcgtcagcggatttaatgatgacattcgagcagcgctcgtcgccatcaagcaagctcagcttgaaaaggaaacggcagaagcggcggccaagccgaggggaatcactccagctaagcagcgagacttggatgaaattaaggcagacatcgaggcattcaagctgacagatgtgttcatctatcatccagaccgggagacacatggtgccggcgcactcgcccacaatcacgtgctggacgctacagcttggctgctgctgcacaggcctacgctgcagaccattctgaaagaccgtcaccccatcattcttattgatgagtcgcaagacacgatgaagggcatgctggatgccttgatgagccttgcagagccgagggggagtgggctcacccttggactgcttggcgatcatcggcaacgcatctataccgacggtcattctgaccttccaagcctagtcccggtgagctgggcgacgccagagctgcaaatgaaccatcgcagtcagcgtcgaatcgtgacgctcattaacagaatctgggaggcggagctcgaaggtcgaacgcagccagccaatggcgtcgaacagcacccgcgaatggagaaagctggcggggtggtccgaatcttcatcggtgatacttccctctcgccggaggaaaaagtcaaggccgaacgttggtgcgcagatcagatgcgacaagcgagcgggtctgatgcctggagtgaggatcagtatcagttgcttgctctggagcataaactcgtggcaactcgtggttcttttctcgatgcgtacagtgcaatggctttgatcgacccgaattcggccgcgcctacgggaagcggcgagaacaaggggcccgcagctgtgcagatgcttttgaatgagctttcacggttggaggcatgtgttggtgaggatggtgccatcgacgagttcaaggccaccgaagtctttcgttgtttcggtcgtctcgataacatgccggagagcgaggtcgagcgcgcgaagcgtttcgaggaaatacttcaaggtatctcagatttcgctgctgcctgtgcaaatcctgaagctacagtcgaacaagttctcacatcggtcttgaatgcaaaactgttcgaagtcgatcctcgtctttcagcggcatttgccgacaagtctcctgcgccaccagctccaggtaggggcgaagaggagtccaagaaggaccggatacgtcggggttggtgtgcgttgttcgctaccccatggagtcagctacagaaatactgtacttatctcgcgggaaattcggtgcttgccactcaccaagtggtaaaaggatcagagtttcttcatgtcatggttgtgatggacgataagctggccggcggcaatcggttctcgtacgacaagatttttggtggtgtccggctaagcaaatcggacttggataatgcgggaaaaggtaaggagacgactatcgatcgtagcttgcgcctcctgtacgtcacctgcagcagagccaaggagtcgctagcgctagttctttggtcctccgatccttcggccgcgctgaatcgtatcaaggagagtgagtggttttcgaacgaggaaattatcgaaattaattttcaagtttga

SEQ ID NO: 79248 - DNA, 1926 bp, Stenotrophomonas koreensis
atgaagcttcaaacgatccggctctcgaacttccaatccttcggagcggcgcccaccgaaattcggctggaggagattacttacctcatcggccctaacggctctggcaagacagcagcactccaagccctttgccgtctgtttgcctttgatccatcactgcgccgaatcctgcgctcggactttcatgtcccattcaacgaggcagcgccgcctgctgagcgtcagctatggatcgaggccgacttcctgttcccggaacttgacgaagacgaagacaatagtacggtagcacctcatttcggccacatgcgccttgacgaagccggtggcataccccgtgtacgttttcgcctgacagccaccatgggacaggatggggacatagatgaatgctttgagtatgtaacagacctcaatgctgacggaactcccttggtgaaggctacggttcctcggacggatcggaatcacattcacgtccactacctgcctgcgcgccgtgaccccgctgatcacattgcatacagcgcaaatgctttgcttggccgcatgctccgcgcggtgaactgggatgtagagcgaactgtcatcaagggtctgacagatcaaatcagcgacagcttggcgaccaacccatcaatcaatacgttcagcacaagcttgaaaacgacctggggtgctctgcacaagggcagcttctttgccgacccaaagctcactttcgtagcgtctgagatcgagtcattgttacgtcacatgtcagtatcattcacgcctggccatgacgagcagttggtcgatttctcacgactgagcgacggtcagaaatcgatgctgtatctgtccctcgtgctgtcctcacaagccatcggtcgcgctgtcctggctgaagatgacgattcattcgacgcagacaagctgcgcccggccgtgtttacggtcgtggcggtcgaagagccagaaaacagcctctcgccgcactaccttgggcggatcgtcaatgcgctcaacgagatgaccagcgagggtgacgcgcaagcactgattgcgacccacgcgccgtcgatgctgaggcgtgtcgctccggaacgtattcgctatctgcggctgacccaggagcgaacatcgcgcgtcacgcacattcagctgccggatgctggtgatgaagctcacaagtttgtgcgtgaggcggtgcaggcctttccggaagtctatttctcgcgtcttgtggttcttggggaaggcgacagtgaagaaattgttttgccacgcatccttcaggccaaaggtgcgccggtcgatgagtcagcagtctcgattgcaccattgggggggcgtcacgttaatcacttctggcgtctgttgtccgacctgcagattccttatctgacgctgcttgatcttgatgtcgctcgttacgctgcaggctggggacgaataaaggtcgtcaacgatcagctggcgaagtttgaaccagctaacgtgcttcctgaagactggggcctgccgaaatggaacaccacggaagccccagttcgaacccatcactgttttggaggcgagaagaagagtgtcttccgtgaattggaaggtcgcggagtctacttttctgaacccttggacctcgacttcgcgatgttgcttgcctttccagaagcctatggcgtcgaaagggatgaaccagatgaagcaatgatcaaggcagtcctcgggaaaaagcaccacgacgcaaaccaatacaccaaagacgaacaaaagctattcaacacctaccatcagcgctttaagctcggcagcaaacccgcagcccatatcgacgccctggctcagctgtccgacgagaaattgcttgctgacatgccagcatccttgagcagactggccgatgccgtcatcgccaagctcgcggagttgccggagtga

SEQ ID NO: 79249 - DNA, 1677 bp, Stenotrophomonas koreensis
gtgattgcagtcgatgcctggacgcctgcggatgggctgacccttgaaccgaatgcattactggcagccaaggagcgcgcgcgcagtctcgcgctgacagcaggtccaggagcgggcaagaccgaaatgcttgcgcagcgtgccgatttcctgctgagcactggcacctgtcgctaccccaaacggattctggccatttcgttcaaggttgatgccagcagcaacctgaaagagcgggtcaagcggcgctgcggttcagagcttgccacacggtttgacagctacaccttccacgcatttgccaagcgcatcatcgatcgtttccgtcctgtgctgacgggcgagtatgcgctggatgttgggtacaaaattgcagatcgaaagccgggcccatcacggaccttgatcgagttttccgatctggtgccgtttgcgatcgagattctacggaagtctgcagtggcgcgaaacgccatccgccaaacctacagcgacgtttttctggacgaatttcaggactgtaccaatctgcagtacgagctgctcaagctcgcctttcaaggtaccagcattcgcttgaccgctgtaggagataccaagcagaagatcatgggttgggcgggggccatggacggcattttccaggctttcgttgccgactttactgccgccccgctcaatatgtaccgcaactttcgctcaaagccgcgactgctccgcctgcagaacgaaatcattcgcaagcttgacccgtcttccgtcatgcccgatgaacagcttgccggcgacgagggcgaggtattcgcgtggagattcgaggacagtcataaggaggctgactacctcgcagacttgattgaaggctggataaagaccgagcagctgccacctgcggaaattgcagtcctgattcgtaatcagctggacctgtacgctgatcatctgatggcggcgctggaggctcgtggtatccccttccgtaacgagcagcagatgcaggacatcacggtcgagcccgctgcacgtttgatcgtggattatctctcctgcctctatggtcggcgcaagcccaaagcctgggttcggctcatgaaccagctcatcccatttgccgatgaagacattcagtcgaacgcgcgcaaggaccttgatctcctgattaagcagcaacgaaaagaaatagctattgccgagctggtcgatgagccctttgccggctggtgggagtttgttcgagcattcctgaagcaagtccgtatcgaaacactggtgtcgctttccccagactacgagtcgcacgatcggctgaaagaagtggttcgtgacaccaaggctcgtatcgaggagttgctaagtctggagcccgacttgcccaaagctctcgagcggttctcagacgaccaagcggtgcggatactgaccattcataagagcaagggcctggagtttgattcggtcatcatcttggccgtcgaaaacgaaatcttctttggcgatcaggacgaaaacaggtgcgcctatttcgtcggggtttctcgtgccaaaaagcgcttgatccttacgcatgccgatcaaagggagcgcccagcaggtcatacgaagcgctggagtgtgcaacgcacggctcaaaatgaatatttcggctatgccacgcagtttgtgagacaagaagaatga

SEQ ID NO: 79250 - DNA, 1956 bp, Acinetobacter pittii
atgcatatatgttcactaaaagtaaaaaattttagagctattgaagatgctgaattaaggctagatcctaatcataaacaggacttaactttaattgttggaaaaaataatagtggaaaaacttcatttattatgatttttgataaatttttcaagaaagatgataattttaattttcatgatttttcgacacatctaagagaaaaaatttatcaaattgagagtacgagtattagcgatgtcacaatcggtttgtttttagatatatcatatactgaagatgataatcttgaatacttgtctgaatttattgttgatttaaattctgttaataatacagtaaaattatattttgagtgttcaattgatgaggatagattaagaaaggatcttataaatattgatcaaaaacacaaaaaaagatttattgagaaaaatattacttcatatctagtgaaaagcttatatgtatatgaaaatgaagatgatttaaaaaatactaataaacaaaaattaattaaaaaagaagttggagaagtgagtaatttaattaattatcaagttattcatgcaaaaagaaacttagcaagttctgaatcgaaagaaaaatctagtctaccattatcaaagttaagtactgaatattttaataaagaaaatatattcagtgaaaaagactttattgagattaataacgcaatattagaaatggatgaaaatttaaataatttatatgatactcattttgaaggtttttttgaaaatgtaaaagaatttttgggaagtacggctttaaaagtattatctaacttagagtctagacaaataatgtctaatagttcaaaagtggtacaaatagataataaggaaaattttttacctgaatcattaaacggacttggaaatttaaatattttatatttattattacaaattgatttaaagaaacgtttttttattcaagaaaatagaagtattaatttgttttttattgaggagccagaagctcatacacatccgcaaatgcaatatattttttcaaaaaaaattaaaaaaattattgctaagattcctaatttgcaaacttttatttcaactcattcctcgcatattgtgtcacaatgcaattttgaggatataagatattttcacaataagaacggaagtgtgaaaataaaaaatttctacttagagttagaggaaaaatataaatttcaaacggacttttttaaattcttaaaacaatatattacactctattctgctgaattgttttttgcagaaaaagttatatttatagaaggggtttcagagaaaatactacttccttattttataaaaaattttgatgaaagtaataaggagaaagaaggctatattccaataacttctcaaaatattacatatattgaagctggagcaaatgctaaagcttttcagcatttattagaattttttgaggtaaaatcacttattcttactgatattgattctgttagtggagtaaatagaaatgcttgttcagttgaattgggaacatcgagcagcaatgcaacaattaatcactatttaagttatgatgaaactaatccagattggtttgaacttttaaaaaatagaagtattaaaattgataatgaaaatataaatgtattctatcaaacagaagaaaatggctatcacgcgagaagttttgaagattcatttatagctattaattataagcttgtaaggaagtataaagaaaatatatcaggattaaaaaataaagaaaaaatcactgataaacctgaaaatttttatgatcttaagaacaatattataaaaagtaaatcagagtttgcatcttcaattttatttctagctttggtcaatagtgataaaaaggatgatgaaagaattgaatggaaaactcctaaatatatttatgaggcattagaatggatcaaccaataa

SEQ ID NO: 79251 - DNA, 2094 bp, Acinetobacter pittii
atggatcaaccaataaaagcaattgaaaacgttaaaaagattatcgtaaataatcaatttcaagaagatggttttagaaattttgtattgcaaggtggggcaggtagtggtaagacagaatcacttaaggaaattattgaatttatttctaataattatccaaatcaaaagattgcttgtattacgcacacaaatattgctgttgatgaaattaagtcacgtattaataatgataaactctgggtttctacaatacactcttttttgaatgtacaaataaaaaattttcaaaagaacctacaggaagttttacctaatattttttatatagatagtagtgatatcaatgatcatgatgactataagaagaggtatgaaaaattatcaaaattaaattataaacttaagaataaaaaaatggataaagtagtgggtaaaagagattatgataaaaatccgagtgattataataattttttattagatgaaataaagcagataaatttttttattacggaggaaatttcattaaaagattttagagatataaagtataatgaaactgtatttgattcaattagtgagggcactttctctcatgattcactgattaagatttcatttttacttgccgaaaaatataatttattttcaaagattgtaagtgataaatttgattatatttttattgatgaataccaagatactgataaagttttagttgatttattgttgaaaaaaattgcaacaaataagaaaaccactataggtttttttggcgattcaatgcaaggtatttatgatggtataggtagccttgatgattatattagagattttaatctaatttatatacctaaagatgataattatagatgttcacagcaagtaatcgattttttgaatgtaattaggaatgatgatattaaacaaaaagttgcacttaaaaaggatgaaaatttagattcacgacaaggatctattaagatatatgttaataaaattcaaaaagttaagtctaatagtcgtcaagaagataaagaaaaatatattgctttaataaatgatgcaataaaaagagtaaaggagaaaaatgatattttaaatcttaacatcttacaattaacaaataaatccatagcatcggaattaaaattttcaaaattatttaaagtgtttgaagatagatatcctaacttggagcaggctcagatagaatctaatttgaaaaaaatacaaattaaagatgtaatagatttaattgttttgtataaaaataatagacataatgatttaatattaaagcttaagaaaaataatttaaaaataaaaaaattagatgataaaaataatattattgctcgattaagttatatttgtgataatgatttaggcttaaatgaagctcttgattattgttatgaaaataaattacttataaagtccccacaaaggatcgactttgaaagtcaatcaaagcgtcattttgagcaatgtgattctgatcctgtattcaaagatttaaaaactcttttagaaagagataacctaaatacttacaatagagctaagcaacattgcacatatgatatcgatcaatatgattatgatgattttatgagttcttatagaaagattaaatttagtgattcactgttatcaaataacttacttctgagtgaggttttaaattattttaattatattgaggaaaattcaaattcggatgaaaaatatttaacaatgcataaaacaaaagggacaggtattgaaaacgtttttgttgtattagaagaatttttctggagtaattattcgttcagaagtatatatgactctagttactctaattttgaagttaaagaaaaatctgagaagttattttatgttgcatgttctcgtaccataaaaaatctaatgattttaataaactatgaaacgaatgatgagctggaattgatacgagagaaatttaatggttttgaaattattgaattaaatagcagtgatactaatttattgattactaatccagatgttgaaaactttactttacctgctgctatagaaagtaatatacaagtaagtatttaa

SEQ ID NO: 79252 - DNA, 1617 bp, Acinetobacter pittii
gtgaaatttgtcgtgtacagagcaaaaatttacgaagtgcatgttagtgcaatagatccgacggataagtctaataagagaaatttcgaggatacttcagcattcgcagcattattacaatgtaactttgttcaagcacaaagaactcttgataagacaaagcttggtgaggctgatgttatcggaaaattacttagtgaattgtttaaaacagctgctgcaccaacggctacagaatctgatcaagagttagctgcgaaattaaagaaatctgttgaagatattgagcttaatgttcaaagtgattttgacaaaatgctcaaaaagttattacctgttatgggggtgatgggttttccaagtcttaatgatactgaattaaggcctgaaacttcattaaatgtagaggcacttttgtctgggcatacaaaagttgtttatagtggtacagatggtgtgcatttacctgagggatataatggtcttggtacgcgaaatttaatctatatgctgctacaacttgaaagctatcacaaaatttaccgatctcaaattactcgcccttcagcccatttgatattcattgaagaacctgaagctcatttgcatccacagatgcaggaagtttttattaatcaattaaatgttgctattcaaaagctttcgagtgcctatccagcagaagacgtttggaatgttcagtttattattactacacattcttctcatgttgctaatgcggcatgttttgatgcagtaagatatttctataaccaaaaagatgcagtgaaaagtattagaaatactaaagttaaagattttaaaaagggtatgcaaacaatatctgttactgataaagagttcttgcataaatacatgactctgactaagtgtgatctttattttgcagataaagtgattatggttgaggggacaactgaacggttattaatgcctcgcctcagagaattagttgataaatccttaccagaacatcaaaaattagcaagccagtatgtaacttgtattgaagctggaggagctcatgctcatcttttttatccactcctcgactttcttgaacttaagactttggtagttactgatttagattcaatcaaaaaggtggaaaaagaaaataataaaaaaaagaaaattaacgtatgggaaaaatgcccagtagcggaaggtacgcgaacctgtaataccgcaataagatattggtttgctcctaaggatattaaaaagatagaggattttcatttatccccagtagaacttttagctaagactccaactgataagcaggttagctgtagacgaattgcataccagatccctgaggatccaaatacggatgtttgtgcaagaagctacgaggatgctctgattttagcaaacctcaaagactttactctgccaaatgaagaggatgttgttattgaagcttgggagtatgcgaaggggcttactaaatcagattttgctttagaatatgcaattcgcaaaaaagaatgggttgtaccaagatatattcatgagggtctagtttggcttgctgaatctgatgttcctatacaaaatttagaaccattagataaaggagcaacagcatga

SEQ ID NO: 79253 - DNA, 1602 bp, Acinetobacter pittii
atgagccagattaaagaaaatcctgcactagttgctgcacaagaagctcagagaaagatcaatgaggctctagatgcgggttatagttttagacttgaagcaggtgcgggggcaggtaagacatattctttggtagcggcactcaagaaactaatcgacgaacgtggttccatgttagtacggactggtaaaaaagttgcttgtattacttatacagaagttgcacgcaatgaaattgctcaagaaattgaagatcacccagcaattcttgttgatacaattcatggtttttgttgggcatttattcgtcaatttcagaaggcaatacgtgatttagttagtgaaatagatgataaaaaagagaaaattgagctgggcggtggtattgggtcacaactagtagaatatgatttaggattctttagtgtcgatgagaagcgaattacgcttaatcatgatgatatacctgaattgatggcaatgcttttggctaaagaaaagtttcagatgttatttagtgagcaatttccagtaatttttattgatgaatatcaggatactaaccgtaaatttatggatgctataactgaattctttttaaagccaaaaactggccccataattggtctttttggagatcattggcaaaccatttacagtagtgagtatgagctagcagaatatccaattgaagaaattgctaagggatcaaactttcgttcagctcccgccatcgtaaatgtacttaatactttacgtccagaactccctcaagctgttagcgtaccagaagctaaaggtgaggctaggtttttccataccaacgcttataagggggggagaactgatgagctccattctaaggaagatttaccttcggatttagcccgtagttgccgtgaggagttgataataaggctgcaaggagagggttgggatttacaaaaaacaaaagtattaatgcttagtcacaatgttttggctattgaacaaggctatcctcaaattgctgaattatttaaacgccatacagaacaatttacaaagaaagaagatccggttattagattctttgctgaagtaattgaaccaatatgcatagcttatagctcatcactttatggagaaatgtttaagaaattaggcactagacctgctattacaaaacatgaagataaaatgttgtggcgaagagatatggatcaattgctaaagttaaggaatgaaggaactattggtcaagtgatagatcatttaaagacgacaaaacgcccattgccatctgatcgaatacttagaagagaggaagagattctttcacttatggatacacctgaagcggaatggtcttcaacactacaacgttataataaattaaaaaaaatcgaatataaggaggttatcgaagttacaaggtttattgaaaagcagactccttttgcaacgcagcatagtgttaagggggctgagtttgagaatgtattagttgtcttaggtggtgggtggaatcattataaatggccacagcttctcgagttgcttgagactaaaaaactgaatagagcaaatacgaaaggtttttatagagctcggagcctgtaa

SEQ ID NO: 79254 - DNA, 2367 bp, Bordetella sp. N
atgaggctccaagcctatcggctgcagaactaccgcaggttgcgcgatgtcgtaatcgagctagacgacaagatttccatttttgttggcgcgaacaacagtggaaagacttccgcagttcagggattgttttccctattgcggggggatgcgaagcgatttgaactctttgatttcagcgccgcgctttggcctggcattgatgaggctggggagcctattccagatgagggaggggaacagaaatcgcttccaagtatttcgctcgacatgtggttccgcgtgggtgaacaggacttggttgcagctatgccgctgcttcctagtaccgactgggatgggaaatgcgtcggtgttcgtgtggcctttgagccaaagaaccaagacgaactttttcatcgttttagagacctgcgcgggaagggcaacgaggcggccaaggcgttggctgaaaaagcggcgaaggcagagggtgccgccggcgcggttgggacggactttagtgattacaagccatggccagaaagcttgaccaagtacctgactaaggcattggcaacggaatacacctttcgctactacgtcttagacgagcgtgagttcgaggggtatcgggagaaaaacgttgactactctccgttgtccatagccggagacaaggacaggggaggtgcagcggtcatcaagtccttgctgaaggtcgactttttgcgcgctcagcgccacttggacgacccggacgaaggaaccagctcccgttcggagaacctatcccgcaagctcagccgcttctaccagcgccacctcgagaagcgtggcgacgaccaccaagctctgcaggctctggatgcctccgagaagggattgaacttccatttgcaggaggtcttcaaagacacccttgaccggctcaagaagctcggctaccccggcgtcaacaaccctgacatcgttattcgagccgctttggaaccgagcactgtcctcggacaagatgccaaagtccactatgttgttccagggaacgtcccggcacatctgcccgatagctacaacggacttggtttcaagaatctcgtgtacatggtcgtcgagcttctcgacctgcacgaacggtggaaccgtgatgaagcagagcgagccccgttgcatctcgtgttcatcgaggagcctgaggcacatctgcacgcgcagattcagcaggttttcatccgcaacgtgctcaagctgctcgaggaggacaaggaggaccaagactccttcttccacacgcagttggtggtgacgacgcactctccccacatcctctatgaaagagggttctcgccaatccgttacttccgccgtgtcagtgccgagttggaacaccacaccgacgtccgcaatctctctcgcttcaaggccggcgacaccgaaaaggaggcacgcgagttcctgcagcgatacctcaaactcacgcactgtgacctgttcttttcggatgccgccgtgctggtggagggaaatgtcgagcggctgctgatgcccgccatgattgagacggccgcgccgcggctacgctcatctgcgctcaccattctggaggtcggtggggcgttcgcacatcgtttccaggagctcatcgagttcgtcggactcaccacgctggtcgtcaccgacctggacagcgtagaggtcaaggaggacgcagctgctgacgtgggcgtcgatgaggatgaagatgagctccggcccttcgaggtcgaagaggacggtgagggcgatggcggtgagaaggcaacgtccaagaagcgcggaagtacatgtcatgcgcacgttccgcacgcggtgacggcgaaccagacgctcatcagctggctccctaagaagcattccgtagatgagctttggaaagccccccccgagcagaaagttcttgcacttgccagcgcgaccgacgctcatgtccgcgttgcctaccagacaccaataccggttacggtcgagggtaatacggtggagcgttgcggtcgaaccctggaagaagcgttcggccttgagaatgcggcttggtgccaagccgcggccaatcggccgattgggctcaagttgcgcaaagcagccaccacgcctgaggagcttgctctggggctacacaagcgtgtggtcagccgaagcttcgacaagactcgattcgcattggaggttctggcaagcggaccgctcaaccagtggagggtgccaacctacatctcagaaggactggtctggctagagaagcgagtcgcacacgagcaagaggcggaggtcgctatcgcggctggcgctgccgccatcgagccggtgaacgacggtgctttccttgtagaggccggagccgcgcaatga

SEQ ID NO: 79255 - DNA, 1917 bp, Bordetella sp. N
atgagcagacgcacgaacagtcccgacacggatgcagataaggaaatccatgcgtgtatcaaatcggtcccagcgacgcctttcgtagttacggctggagcaggttccgggaagacgacatcgcttatcaaagcgatggaccgcgtcattgcagagcatggcgcaacgatgctgatgaaaaagcagaaagtcgcctgcatcacgtacacggaagttgctgctaacgaaatccgagaggatgtcaacgcggacgcgcttgtgcacgtctcgaccatccacagtttctactggaccatcgcgagcagcttccaagctgacatcaaagtttggctgcgtatggacctccaacgccgaattgatgaactggtcgagaaggcgcggaacttcggtcaaagggttcgtcagaacacgcgcgacaacaataagcgtgaccaggaacgcctcgcaaggcatttggaggagatagaaaaggtcacgtcgttccgatatggcatgggtagcgactacccgaagggcatactgggccatgaggacatcattcagcttgcggaccatcttctaaagactcgccccctgttcaggcggcttgtggcgctgaactaccccttcgtcttcatcgatgagagtcaggacacgttcgaagaggtcgtcgagtccttcaggatggtggaggcacaaatgcggggtcggttctgtatcggattcttcggcgacccaatgcagaagatttatctcagaggttcaggctcgattgggctcgaagacgggtggaaaagcatcacaaagccagagaactttcggtctgcccagagcatcttgcacgtcgcaaatgccatcagggcacagggcgatggtctgaagcaggagcgagggctgcacgaagaacttgacgggaccgagcgaccagtggagggctctgctcgcatcttcatcctgcccaagacgatgaaccgcaacgaggccttggccaaagtgcgggcatggtgtgcagcggccgatgccgacgacggctgggtacagccggagctcgcggtcaagatactggtcatcgtccaccgaattgcggcaaagcgcctcggctgggacggcatctttgcagcgttgtcggaaagagcgcccgacagcatcaagcagggacttctggatggaacgggctggccggtccagccattcctgggctttgtgcttcctctggtcgctgccatgcagaacggaaatgagtttgaggcaatgaacattctccgcgcgcgctgccctcgcctggcagcaagcaaccttgctgggaagaatggcgcacatctgcttcgcgagcttcgggaggccaaactggagttggtccgaatgatgaacgacgaaagctgctcgattcgggacgtggcgatgcacttgcgcgccactgggctgcttgccctggatgagcgtcttgaacgcgtacttggtctcaaaggtgccccggccgaagccgaaggaaacgaggcggacggagggttgccttcggacctgcccgtcctaaagctcctggactgcccggctccgcaactgacgtcctacggccaatacctctcggaagggtctcctttcgcgacacagcacggcgtcaagggggcgcagttcgaccgagtgcttgtggtgatggatgaagaggagaacgactaccggctctatgactacgagaaggtgctgggcgacgcacaggccagtgctgctgaccgagctgcctttgcgaacggtgaggacaacacgtggagccggactctgcggctgctctatgtgtgctgcactcgcgccaagcgtggtctggcattggtattctttgtcgcagaccctgcggcgaccgcaactcacatcgtcgcaagcggcatattccccgagggttcggttatcacacaggaccttctcacgggcgaccaacattag

SEQ ID NO: 79256 - DNA, 2028 bp, Lactobacillus hammesii DSM 16381
atgtatttatcagagctaaatttatataactttagaagattttctggttcatataaaaataagcaaccgggattagttgttcattttcataaaggattgaatatcatcattggtgagaacgactctggtaaaactgccatcattgacgctattcgattgatgctgggagatgtaagtgacgacttccaacgcattacggacgatgattttcatgctactaaatcgggattagatgaaaacacttttcaaattgaaggaatcttctgcgacttaagtgaacgtgaagcaggaatattcttagattggctatcttttgataaaaaaggaaactatgagctgcggataagcttatctgttgaaaagaagaagaatgataatgatcaggtttaccttgatcataagattgttgctggagaatcgagttcgtcgatgccgttaagtgctagtgcacgttccttcttaaaggttacctatttgaagcctctacgcaatgcaaacgatgaattgacaccgggttttcgttcccatttacctaagatgttgatggcacattcaacgttcagtaaagataaccaaagcaaaagcgaactagaaagaataatgaagagtgcaaatttagagattgaaaatttttttgatggagatgctaacgtatctgatcaatccagtcatgcgtcattaaacacagagctctccaaagtgttatcacagctgtatgatcaacaggatcagtctaagagtaaggtgagtctgaagcttccagaagcaacactttctcaaatcctgaatcagttgagcttaaatccagatagtagaaatcttgggcttggaaacatgaatcttctctttattgcgactgagcttgctctgttagatgatcatttaacccataccgtgtatggtcccaacctgatgttggtggaagaactagaggcacatttgcatgtgcaggcacaaattcggttaataaagtatatcgaaaagtatatagaatcacatcagtcaaaggcaagcatgcaatttatcctgacttcccatagtgtttctcttacggcttctgtcgatcaaaaattacttatctatttacatgatggacaggcctatcccatgggaccatcttatacgatgttgaaggaagaagactacagatttttgaaccgctttcttgatgccactaaagccaatttgttttttgcaaagggcttaatttttgttgaaggatatgcagaaaatattttactgccggtattggcagatttgataggttattcattacatgaaaatggcatatcaatcgtaaatgttggtggccgcagttttgataactatgtcaaactattttctagaaaaaatggatcaattccaattaatttgccaatctcgatagtaagagattctgatgttaggccatacacttaccgtattaatcagaataatattgatggaattagagagttgcttacttctaacgattttaataagaatcgtatggggaatacctactctaccttcaatcagcttcaaaagagccttaaactaaaattttcgaatgaaaactttagcaaaatctcacaaatagcataccagcttttagacggagacgaattagctacttctcaaggaaaaaaagcggaaaaacttgagaatgcttaccatgatttgaatgttaagcaacaagtgttcgtttcccctgcttggactctagagtattcgcttttaaaaagtccattgggggatttattgctacaatcaattgcagatgcaaaatttaatcttaaagcagatgctgaaaataagaagcgtgagtttatagctacgtcccagagtggtgatctgattcaaatatatagtcagtttgagcatagtgatgtatcgaaagctgagactgcacagtttttggctgaaaaattgtataatttggatgaagaaaaaaggaataagcttaaagtagcggtattaggcaatagctattgtgcatatcttgtcgacgctattaaatttgcatgtggtcgtgatgaagatgattga

SEQ ID NO: 79257 - DNA, 1794 bp, Lactobacillus hammesii DSM 16381
atgattgataatttagaacaagtagaacgtgttcttttaccaccaggaaaacggttctctactgaacagacgcaggttatcggcgcggatgggaacatagatattgtagctggcccaggatcggggaaaacgacggttctggcagccaaactaattatgtttttatcgaagcaacgacgaggtgataaaggtatatgctgcatcactcacaccaacgttgccgtagctgaaataaagaaacgaattgagcaatctggcctagggaatgttgagtacccaaattttgttgggactattcaaagatttttcgatcacttctttgggagtaaggcatttgggcttttatttcctcaaaaagcattacggatactggacggagatcagtatactaatgtttatgctgaaaattttcttcaactggctccttcatggtggaagaataatgattatgatgcgccagactacaggaggcgagaagcgcgactagtaatttccgaagataagaaggcgtattttgtaaataatgagcataagaactatggaccaattattaatgaagcccttggagctttgcttagtcgtggaattgttaatagtgaacaaatgacggagttagctcgatggtatatttctttacacggtaattatctgtcaacggcaatgagtgaacggtttgattatttattattagatgaggctcaagatactaatgatattcaatacaaaattcttatggagctaacgaaaggtaagaatatacactttcagagatttggagatccatatcaagctctatacactatttatgggagcgagagtgaggatgcatggaatccttttactgaagaacaagataacattgctcagattaaagagatttctacgaccgcacgttttggaccaggtattgctggtcttgttcgggatgtttgttatgagaagtatcctactttccattcagatatttctcagaaaacttttaataatcgttttattatttttgaaagtggagatgacttaagagaaaaatatcaacgacttttgagacaatgtgaatcggagaatgatagtttcttaaaatgtcccaagaaagataaaattgtggcgccaatgtataaagatctggaaaagtggtttaacgcttataaaaagccaacacattctcccataatccacgtccagccagctacagatttattttattctgtgttacgcaaattggcatatgctaatcgacgaactatatctgaggaacatatgattttacaagagaatatggaacttgctgagtcagtggccaagagtgttaagtgtttattttccaaagatgaaacgcaaacaacattggaagggctaatacatccacttttggagaatgatgcttggatgacgagtgcagatgtaagcaatgatttgattaaggaaactatgcatgttgatgaatctaatatggaactttctaatagtatggaatcagagattatcttgtcaacaattcatggggttaaaggggaaacacatcgttcgactcttctgctagtagattcggaggtttacggaggagaaaaaattcatgaaaattttttcttcaaagatcttttcccatttttaatcggagaacgcaaggtgtatgataccgatcctcattcgaaacgtattaaagcctgtttaaagtatgcatatgtggcacttagtcgacctgtttttttggcgggagtggctattccgaagggaagtgttacgtcgactcaaagagaaaagatggtatcttatgggtggaaagaagtaaagtga

SEQ ID NO: 79258 - DNA, 1608 bp, Lactobacillus kitasatonis DSM 16761 = JCM 1039
ttgtttgatcgtagcctgagtgaaaatgatttagatttgttagatagtgattttaatgcatattcacattcaaataaggtagaaattacagcgtatttaaaagaaattgaagaagactgtcttttaagtgaatttaaaggccatataaagaatggaaaattaattctaagatatattaaagaaaagaatgaagattatattttacaagctggcttttcagaagagacaatgaaagaattgcaatctagaagttatttgcgaagattaaatatgcaatatgtggatacaaatagaaatctgtatgcatatttaagaaaagaaagacaaaatttattattaatttctcaagaattgttgtctgacgaggaaaaaaacgatgatagaacgaaaacagcagagatacagaaaaatttagatagtattaatcagcaaataagttctttgaactacattaagggtgctttgaaaaatgttaatgaacaattgtcatctttatcggttgaaaataaagatcagaatgttcaatttgttgcgggacacaatgatgctgaaaaaatgctttcagatgttgctttatcttattcgagcgaagaagggccactaacgttgggtggggacggacgaaataatcaaatttatttagctacatggatagctaaacaacaaataaaaaacactcctgatcatgtaactttttatgctatcgaagagccagaagctcacttgcatccccatcaacaaagaaaattagcgcaatatttaactaatagtctaaatggacaagtaattgtaacttcacattctccacagatcgcacaggaatttaaagctaaaaacataataagactatattttaaaaataagtatactcatgctgcatccggacctgaggatgaacaaataaaaaattcctttgatgactttggttatcgtcttaatgcaatgtctgctgaaatatttttctcttatggtgtttttctcgttgaggggacttcagaagttattttttataaagcactagctaaagaaaacaaaatagatctagatagattaaatatttccatactgtcagtagagggtataggttttaagtcatatatcaaagtatgtaaggccttaaatattccttgggtattaagaacagataatgatgtatttaaaaatactcaaaatgaatcttattatgctgggattaatagagcaataggtattattaaaggttgtaatttaaattatgatgtaccatctgtgtatcagaatgaatgtaaaaaatggagtggtaatagtgtaccatctgatattaaggatagtaatgataaaatgcgtgaatcgctaaaaaatgcaggaatttatatgtctaaaatggatttagagaatgatttagcgaagagcaatttaaatgacacactaaatgattattatgacattcaagaatcagatgtggcaaagctagtttctgaaatgcaaaaaagaaaagcagaaaatatgtttaaatttatccaaaaagaacattccaatctggtgaagttgcagaatgatgaattaatcgaaccaatttttgatatcgtaaataaagtaaaaaatcaggtacaacccaatggaaagtag

SEQ ID NO: 79259 - DNA, 1593 bp, Lactobacillus kitasatonis DSM 16761 = JCM 1039
atggaaagtagcaaagaacaagaaaaaataattcatgataaaaataatatagttgttgtggcaagaccaggttcaggaaagacttatacgattgttgaaaaaataaaattaattttaaaagatttgtataattatcaaggaattattgcaatatcctttacaaataaggcaagtgaagagttaagaaatagatgtattaacggtggcttgtcgttaaaaaaatcattttttggtactattgataaattctgtttttctcaaataattgctccgttttgtagtcatttaagtggtaaaattcaagaacttaaaattcaaaaattggaagactttgataggttaaagaatcttaataataaggaagtagagaaaatcatagaaggatatctaaaacagaatattgtttttctcgaattattaggtgagacagctctctatatattaaagaatgtaccagatgctataaaatatttgcgtgccagatataaagaaatatttatagacgaatatcaagattgtgggagtagtcaaaatgaattgtttttgtttcttgtaagtcaaggaattaagggtatggcagttggtgatttacaccaagctatatatggatttgctggaaagtcttcagtatatttaaaagaactaatgcaaaattctgattttagtcattataatcttttagaaaattttagatgccatccaagtatatatcaatatgcgttatgcttgtttggacaaaccgaagagaaacctgaaaaggaaaaaagagttttcagaataagaattactggtgatgaaagaaacattgcaaaggaaatagaaaagaatatatctgttataaaagaaagatataatctaaagacaacgagcggatttgctattttatgtcgtagtaatactacagctgatatagtgaatgaaagtttaaccatacctcataaagtatataagagtacagaattagataaagatgactcagaagttgcgcgactatttatatatttgttaagaggatattttgataaaaaaatatatgcaattgacattactgagagatttttttctgaggaatatgaaagaaataaatatagaagtctgtcgaatgcaacacaacaactatttgcgtatcctgctaataagttaattgataatataactatattttctgatattgctaatattatatatccgaaagtaacaactaaagatatgtcagaaactctaagcaaacttaaagatgtacttagtgataaacgtaattatgaaaattacattccgcctaaagataatgaacttagtataatgacgattcataaatctaagggactagaattcgatgtgatttttcaaatggatatgtataagtatgtatttccacctgaaaaagcagtttcagatgagaatttatatgaacgatacttgaatctacattatgtagcaattactagggctaaagctgcatgttttttgatggaaggtacattaagacacaatagtcaaatggagttatggccagctgaatcatctgtgttttatgatttacctgggttggcagaaagaagatatgatattgatatgaggtttaaaaattag

SEQ ID NO: 79260 - DNA, 2070 bp, Lactobacillus helveticus DSM 20075 = CGMCC 1.1877; identical to SEQ ID NO: 72084

SEQ ID NO: 79261 - DNA, 1227 bp, Lactobacillus helveticus DSM 20075 = CGMCC 1.1877; identical to SEQ ID NO: 72085

SEQ ID NO: 79262 - DNA, 1725 bp, Lactobacillus paralimentarius DSM 13961 = JCM 10707
atgattataaaaaaaataactatatttaattatcggactttaaatgacatacaaatttctttcaatgaggaaagtaattacttagtcggtaaaaataatatcggaaaaacaagtgttctaaatcttttatccactataatgcggggaaaagattttgataaagatgattttttagatttaagtaagcctattattatacgtttggtgctaaaaataacagatgatgaaattggaatttttggggacaatttctcaacaaatgacaagaatgagattgaattgaaattccaacaaaactctccaatagagcgaattacaattgtcgacgatgaaaattcgtccgaaatacttacctctcaaattaaaaaatctaattttattggatacacttcaaatattcgtcctatcaaagataatgatttgacaatgaacttcggtaattacaaattaattccacaactagtaaaaaaatatattgaacagcacaacacggataatgagccaaaaaatgattttgatgtacgactagttgattttataaacagtaaccttaacaaactgcaatcttttaaccaaagaaatatatcagtaggttttgaagtcaattatgctgatcttattactcgctcactatctttaacagataataaaggtatagaattttcacgacttggatacggagtgcagtttagtagtttaatcccactaaaaataattgataccattattaattggtccaagtataatcaattagatgaacatttattaataaacactagtggcaaaaagtatttacaaatagttttatgtttagatgaacccgaaatacatcttcatccaaatcttcaactcaaacttatgaaatatctgagaaatcttttgagcgggaaagacgattcttttaattcgttattaaaagaactatttcagatagattttattaaaggacaactattctccgttactcattcaccaaatattctttccacaaattatcatcaaatagaacgtttttataccgataatggaaaagtaaaggtcgtatctgggagagacctctcatttgaccaatcgctaaacaaacaattaaaaagacaatttccatatgttacaaatgcattatttgctgatgccgtaattatcgtcgaaggagattccgaattgtctgcctttcctattttttcagatactcttggaaaatcaataatagattataatataaatattgttaaatctgatggctttcaaagtattaaacctttaaatcgtttatttaatgctttgcatattaaaactattttagtcgcagacaatgataataagcatcgagagtggcccgataatacatttgtcactgataaagaggatttcgagtatgagtgtttctctgtaatgacattaattgaaatcaatcaatacttaaatgattttgaaactattattcagggtaatactacttacacgggaagtttttggtttgaatttttaacaggtgataaagatcgaatattacaatccaagaataaagtaaccgaaatcagtaacattttgaaatcaaagaacactaatgaaaaaaagaatattaaatctcaaatagagaaaaaaataatcaaaaattacttaaagaagaaatcaataataaatggtcaattaattgctaataatattaaaaatgttcctgatatttacaggaatgcaatcgaaggagtaatcgatgaaaaatga

SEQ ID NO: 79263 - DNA, 1716 bp, Lactobacillus paralimentarius DSM 13961 = JCM 10707
atgaaaaatgaaaaaacgattaacaatgttctgaatttggcaaaaaatgattcaagtcaattagaggtaatacgaaatgattcaaaaaaaatagtagttgaggcccctgctggatttggcaaaacatttacaatgattaatatgatcaaatactggattattactggagttataactaattataagaaagttctttgtctttcctttagtgtaagtgcagctaatagaatgaaagagagtatcgaatcttcatttattaaagacaatgataaaagacttttaagagttatcaaggcaacaaatttccatggcttatgtagaaccatcctctctaagtatggttttcttgttggactagatgttaaaaaagtatatcaaaacatggattcttcagataagaagactttatctttacttcctaaaggggaaagaaaagttattattgatttggatacctcaataaaagctgcttcaattagttcaaatggattgataaaaaaaatcaaaaattataataatataacacgtacctattttttaacgcaaaacaagttaccctataattcgattattactttaactttagagttattaatagataataatcaaatatgtgaattttatcaaaagtactttactgcaatttgcattgatgagtttcaggatacaaatattctaggactcacactcataaaattgcttacgggaaaaaatactagatttgttgcttttggagatgatatgcaacaaatatatcaattcttgggtgcaattccctctttaattgataaatattctgaagattctaatgttaaatacttaacgttacaaaataattatagatttaagaataatattgaaatgcaattattagattgtcaacttagaagatataaggagactttaaatactgaaggctatacaagagtttcacttaatacaatacatggaaaagatttatcagatgaagcactaaaaatatccgaatttataaagaaacactctacctataagtgtgcggtattgttctcaaataattccaaaacgactaaatgcttagttaagtatttattaaacgaagagattaccccatttaatgctctatttagggatgatgaccaatcggtcatcgattttcatgatatagcattaaaaatatattttgaaatgtacagatcccatccaattactaataaagaagtcacaaattatattaaaaaagtcgagaagagtacttctaaaactgattataaacaatcccttcttcttttacttaaagccttaataaaaaaaagtataaaagaatattcgagggataatcgatctgaattcatttctactattctttcctcatattctttaagacaaaatcttgttgatgttaaacataatattatattaagtacaatacatggagcaaaaggtctcgaatgggattatgttattcttgcaaattttgaatataacgaattaccaaattactttgagattaaagcaattgggaatattaataaaaactctaagttagttccaaatactgaaaataaaaaagatattcaagattttataaataagttttatgttgcgttttctaggtcaaaaaaagaatttatagtatcatacagtgatatgcattgggagggatgcagatataatcaagcttcaatcagtccaattgcaaaattaccttttattgaaataaaagaaataaaatag

SEQ ID NO: 79264 - DNA, 2013 bp, Pediococcus lolii
atggaaaaaccaatttatttaaaaaaagtgattatagaaggctttcgatcatttggtaaaaaaacagaaattaacattgacgactttaatacttttatcggaaataatggaaccggaaaaacaactactttacaagcactaaataaaattttttcaactaatccaaaagatagaattattgaagcaactgacttctttgtgtcaccccaagaagaaaacgagcagacaacaaatcgggatttaagtatagatgttatttttgggattagtacagaaaaacttgaaaatgatggacgtgcagcggctatttttttgaaaaatatgacaattaatagcccagaagatgaaccgtatcttcatattcgacttgaagctagttggacatctgaaggtggtgcaagcgggacagttgactataatacttactatgttgatagagaaaataattcaaccattgcttcacgtttgcaacttaatagtttaagaatgatttatgtgcctgcagtcagaaatccaacacgtatactaaaagatagttctcatagcttattatcaagtttaataaaaaatgtagtgtgggcagagcagacaaaagaaaaaattaataacgaaaacaaaaggctaaataatgatttcctaagtgaacgtggtatggcattaattaatgataaagtacgtaaaatttgggacgagttttgtcctgatgaaagatatggcggagcaaaattagaaatttcaccgactgatctagtagcgatgagtaaacagacgcaaattgtttttaattcttcgaacgtagaacataattatcaaattgatgaaatgggagatggatcacgttctttattttatatatcaaccgtgaaaacggctcttgaaattgaaaatgaacttattgatttagaagcagaaaatgatccgattataaacgatactcctccattgttaacgatggttgcaattgaggaacccgaaaatcacatttcaccacatctattaggaaaactaatgaacaggttgctcgaaattgctaaattaaaaaatgctcaagtactgctcacatctcattcaccggcaattgtaaaacgagtagacccactaaaaattcgtcattttagaataaaatctagagaaaaatatacagaagttcataagttatcgttgccaaacaaagaagacgaagcatataaatatattaaaagagcagtccagacatatccagagctatattttgcacaacttgtggttttaggtgaaggagatagtgaagaaatcattttgcctcgattttttgaggctaaaaataaaaatttagatgaagctggaatctctgttgtcccgcttgggggtagatttgttaatcatttatggcgattgctaaatcagttaggaataccatatataacgcttttagacttggataaagaaagaaaaggtggcgattggcaacgtattaagtacgtcattaaagaattaaagaagttaaaagaaaatgatgaagagctaaatgaaaaattatcagtatttgaaggccaaaaagttgtaagtagtgaaaaagatttaaaggaagcaatagatgctctagaaaataaaaacattttcttttctgcaccactagatattgacttcatgatgctaaaagcttatgggggcttttataaaggattacttaatgatgatgagggacctagatataaaaacaaacaaggtaaaaatgttaaggttcctaaaaagaatacaaaatctttagaagaagattttgtgaaaaagatagaggacgcagtagcagaaacattaaaaaaagatggtggtactggtgaatcatataatcaagaggaacgtgaattaatgatttggtacaattacttctttttaggaagaggaaaaccttctacacatatattggcactatcaagtattgatgatgaaactttaaatactaacatgccaaaagtaatagaacggttacttgttaaagcagaatacttactagaaggtgaaaatgaaaaatga

SEQ ID NO: 79265 - DNA, 1818 bp, Pediococcus lolii; identical to SEQ ID NO: 73011

SEQ ID NO: 79266 - DNA, 1596 bp, Pediococcus parvulus
atgatttatgtgccagcagttcggaatccagagaaacaacttggtgtagcatctaccagtctattagcacgattggtgcgtagcgttaattggaatgccgagactaaggaagatattgaagatcaactttctaagttaaaccaaactgtattagaagaaaatggtctaagaagaattaatgaaacattatcagcggattggcgaaagtattatcaagatgaacgatttgcgaatgttgctttaacaatcgactctataaatttgaattctttagcaaatagaattcaatcaacattcacttcccaagcaactggccataagtttcgacctgaagaaatgggcgatggaactcgctcgttgttctatatatccaatgttgcaagcgtattagatattgaacaatctatactggaagatgaaaacattcaagaaaagcctctgattgatcatcaaccaccgttacttactcttgttgcaattgaagaacctgaaaaccatatttcaccacatttattgggaaaactagttggacgattaaaagatatggcagaattagcaaactgtcaagtattgttgacctcacactcaccagctattatcagccgtattaatccagaatcaattcgttatgttcgacttgacccgcatgagggtacatcaacaattcaatcactgaacttgccagataaaaatacagttgaggcctatcgctatgtaaaacttgccgtacaagtatatccggaactgtactttgcgcaacttgtagtgcttggcgaaggagcaagtgaggaaataataattccgcgttttttggaagcgagtggtgagtacttggatgaaaatggtattgcatttgtaccacttgcaggacgatttgtgcattatttatggaatctattgaatcaattaggaattccgtttattactctattggacttggatcgagaacgtactggtggtggttggggacgaattagctacattttaggggagttaaacatgattgactgtaaagttgataagcttccgtccggtatcgaagaaattaacgatggtgctttaaataacctttcaaagaggcttattgagaacaaggatgatgcaaacgagttggatgagtaccttaaaaatttagaaagaaaacacgtctatttttctaatcctctcgatattgactttttaatgctcacttattactcagacgagtacaaacatctgctcaaaggtaacgagggcccaatcattaaaactcagaacggtcaacaaaaaagagtaaaagaatacgaacctcaaaacgtttctagcaaagaatatcttaaacgcgcagaagaggcgacaaaatctgccctcaaaggcggtgttgatgttactgccggggaatcatactctagttcagaaaaagccttaatgatatggtatgtgtatttctttctgggaagagggaaaccaactacgcacattcaagttttggatggagatgaagatgggagcaaactaacagatgaaaaattgcttaaaaaaattccaccagtagttaagtgtctctgcgaagatgtagcgacacaattgaatatcggagcagaaagtcatgattaa

SEQ ID NO: 79267 - DNA, 1812 bp, Pediococcus parvulus
atgattaataaaagtgaatggattcctacagatagttttatacttgaggataaagccggtgaagccgtaaaagccaacggaaatttgcttataattgcaggaccaggaactgggaaaactgagatgctcgcacaaaaagcaaactacttatttgaaacgggcgtttgtcgtaacccatataacatccttgcaatcagtttcaaaactgattcagctagtaatttagcggagagagtaaatcaacgttgtccagattttgcaagacatcgttttaattcactgacctatgatgcactagcaaagagaatattggatcaatttagaaatggacttgcacagtcgaatctccctagtgcagactaccttgttcaagacgaaggaaagctacgcaagattttttattatgtttatggtaaatcattacgtgatcggcaagcaaatgcattctggagacatttttcattattaaaacaagtagacaatgatgctgaaaaacagtttcgccggataatacttcacggtaacaaaagatttcaggcgaacctcagttttcagatgattatgcaactagctataactattatggatactaatccacttgttaaaaaagctttccaagctgcatatccatacgtatttctggatgaatttcaggatacgactgatttacaatatcgattcatcaaaacattatttgaatcaagtactgcggctattactgctgttggtgacgataaacaacgaattatggattttgcgggagctagaaaaacaatcttctcagattttaaaagcgaatttaattcagatgaattgcacttagtattaaatcatagatctgcgccaaggctcattaaattacaaatgaaaatgtaccaatcgttgcaagatggagaatatgaaacaaaatggcctaaaaattgggaaaatgatgacggcgatatttcgttgattcaaagccaagatgaatatgaagaagcggcctctgttgcacaagatataatgaagaagttaaagcaagggattaagcctgacgaaattgcactattagtgaaacagaatgactcgcaatatggcactccaatcattacagcactatctgagttgggaattaaatcaagagttgaatcaaaatatcagtccttgttaaaagagccgcttgtacaaattgttttacaatccgttatttttgcagtggcagcaaatcctactgaagattgggggaactttttcgacctatatttgaaatcacgcgagataacagatgttgaggatgaggatacgctttacactgctgagctaaatcttaataaatttcttcatgaaatttcagcactaatcactgacatcgaattgtcagctttaaaattggtacagcatattattgatttttggactaaagatttttttagatcaaatttccctcagtattttaatgaatcaagttttgaagctacgattgatagcttcatcgagctattaaatatggagcgtcaagccggaggtaaatggattgaatctatcaattccttccgtggtgttgacacaatacctataatgactattcacaaaagtaaggggctcgaatttaaagcagtctatttgatagcgttagatgacactgcattctggacttttcaaagtgatcctgatgcaacgaggagagcactgtttgtagcaatttctcgcgcaaagttatatctgacttttacatttgcacagagtagaagcaatttaaacttctattccggaaagcaaagtcaccaactaatttctgaattctatgatttgattgatccgtttataaattag

SEQ ID NO: 79268 - DNA, 2013 bp, Pediococcus parvulus; identical to SEQ ID NO: 79264

SEQ ID NO: 79269 - DNA, 1818 bp, Pediococcus parvulus; identical to SEQ ID NO: 73011

SEQ ID NO: 79270 - DNA, 1737 bp, Lactobacillus parabuchneri
atgaaaattcagaaaataaaagtgaaaaattatcgagggctagatggagtttcagtgttatttgattcaaatgaaagctttattgttggtaaaaacaatatcggaaaaacaagtactctagacttactgaacacaatcttgtcaggaaatgatttcagaagcagtgactttcaggatgaagaaagacctatcatcgtgaatgccaaatttattctatcagaagaagaaattggaatgtttgacgacaactttgattcatcagaggagaattctgtaacgattcaattcgcacaaactgatccagtatcacaagtgaagattatagcaacggtgagtgaagagaatataacaagaaatcagattcagaaatcaaattatattggatttagttctagtcgaaaacccattcaagaaaacgatttaacacgtcaaattggtagttataaactgatcccgcatctagttagaaagtttgcagaagataaaagtatggagataccagagactgagggtgacaatcaagctattatcaactatattaatgagcacttgttacaaatcaagccctttcgtgacaatcagattcatgtgggtatggagacaaattattttgattatataacccgttctctcagagtacagagtaaggaaggagtggatttttcgaagttaggttttggaactcagttttcgagcctgataccacttgtattgatcgaccaactcatcagttggtcaagataccaacacttggacgaacatctgtgtagtaacaataatggcgggcaggaattgcacataattctcggattggatgaaccagaagtacacctacaccctaacttgcagtttgccgtgcgagaagatattgaaacgttgcttttaggaaatgaccaagaatttaataagttggtaaaggaattgtttaatattgataaggtaacaggacagatgattgttgtaacccactctcctgctgttctatctaataattatcatcaatatatacgatacaactctgaaataaatggtcttcaagttacttctggacagaaacttacccttagttcaaaccaacataagcaacttatgatgcaattacctaacgtcaaggcagcactatttgcagatgcagtaatcttggtagaaggtgagactgaatatggcgcacttccagtatttgccagcaaacttggaatttcgttagtacgtgcaaatgtcaatattgttaatgccggcggagtgaaaagcacaacagcactaaaatgtctatttaacaatcttggaatcaagtgtctttcaataatagataaggatgatggaaacaaagcaaccaaggatgtttttgtcacgagtaagagagattttgaagacgaatgttttgaacttatgggattgcgcaatattcatgaatacttcgaaattttttacggagcaatagaaaattcaaattatgacggatcgttttgggattgctatttcagttcggattataagagtggaagaatagagacacttaaagctcagaaagatgtctatgaatacgttgagaactatttcacagctcatatagattccaagctagtcaatgaagacaatattttatctaacctaagaacatcatttattaaacattatctcaaaaaaaaatctgtattaaatggaaccattattgcacaatgtttggaaggagttcctgaaacatacaaaaaagcgttgatcgaggcagctagatga

SEQ ID NO: 79271 - DNA, 1728 bp, Lactobacillus parabuchneri
atgaaaaacgtacagagagtgaatcagaatgctagtcgcccaatattagattcgaaacaacttacggtagttaatgcgaaagacaagcgattgatcgttgaagcaccagctggcttcggtaaaacttcaacgatgatttcgatgattagctattgggtggagtcaggtatgctaccgcattacaaaaaaatactttgtctctcttttagcgttagtgcagcaactagaatgaaagacagcattacggaacattttgctgaacagtttacgcaaaaatctccgatgcatcaaattatcgttacaaattttcatggattttgtcgcatggtattgagaaagtacggtcatttaataggcatacaaaacattgaaaaaattgatacggttgacattaacagcgtgaaaagttctatgaacggtaatcgtaaaacaattgacttgatgttagatttggagagtgatataaagtccggaaagttgagtgtaaaaggattgatgtcacatagttcaacgtacgttagtgggattaagtcactgttcattcctagaaatcaaattacttatgatggactcatcataatggttcttcatttatttcaacagtttcccacaattagaagtgactaccaacatattttttattctctttgcgttgatgaatttcaagatacaaatatcttgggctggagtttaattcaaattcttctttgtgatagctctagatttattgcattcggtgaccagatgcaacaaatctatagatttcaaggggcgcttcccaatttgattgatcaactaattgaaaaagagtactcatatatccggcttgaaactaattaccgatttgcaagtaacccagatatgctcgcaatggattcagcccttagaaaatataaggacgcgccaggtcattattcagcagaattaagaattccaattcagttaatatttggaaatactgtgtcagacgagggaacagaaatcatttcaaatattcataagattcaaaaagataatccaaaggcaacgtttgcaattctagttggttcgaggtcttttagtacagataaattgattcgtatatttcaaaacgagtttgacacgatggatgctaccttcaacacagaagatgaagagtttgttgcttttcagtcagaatgtttaacactttttgaatcaactttccaaaagttgccattgatacggcaacgtattgcatcttttctatccaaagttgaggagtcaattctacccggatcaaatattgaatcatatatgaaactgttaaagggactccttatgtacactgtggagaaagtaagcgtacattctcgaagagaacatgttgtttcagtcttagaggcaggcgcattgcgtaggagtttgtcagaagtagacagtgagataactgtctctacgatccatggagcaaagggccttgagtgggattatgtatttatagcaaatttcgagcagttggagtttccagcttatcctgaaatgcagaagctaaatattaagccctggtctgagaaaattcaggttacaaatgacaatgaagaagcagtaaaagagattttgaataaactctacgttgctttctctagagcaaagcagcaagtatactttgcgtacgccggagagcgatttaataaaacaggaaaatcaattaaagcaaatcttagtgtactggcatcactccctttcttgaaaaaaacgtttgtgtaa

SEQ ID NO: 79272 - DNA, 2355 bp, Pseudomonas libanensis
atgcaaatcaaatacttggaaatagccaatttccgcaagctccactccatacgaatagatttatccgctgagaccaccctgcttgttggtgctaataacagcggaaagtcatcttccatgctcgctttgcgcaaatttttaggcggcaaggcgtctgcaattcgactgcaggatctcacgctctgtcacttcgatcgcatagacgagatcggccattcatgggagatggccagtcctggcgatctactcccaacggctaacgactgggatgattggcttcctcaccttgacatctggatcagcgcagaatcaggtgagtaccattacgttcgagatttgatcccaaatttcgaatgggatggaggtctagtcggcatgcggtttcgattagagccagaggatgtcgcagaggttttcatggattaccggaaacagcgcgaacgcgtgcaggaattgatcgccgtcctagcagcggatgcggatgcgaaaattccccatgacgacaatcctcagagtaggaatgctgacagcggcgactcaagacaacacccagtgagcttgagtctatggcctcaaaatctgaccgactacttcagtcgacggcttggcaagctattcaaaataaggccgtaccggctggatccgggaaagttgcatacaccacgtggcatgatgcgtagggcatcacctcagaggctttcagagcacgcgatacatctcgaaaagaaccctatcgaagggcttatcaagatccacgagattaatgctcagcgcggatttggagatcatggggatgaagggcaaaacgactccaagtcatcaggcggcaaaaaactttccgaacagcttcgcagctactacgaaaagcatctcgaccctggtgattctccagaggtgtctgacctggaagcgttgcgcgcaatcgagatcgcccagtcggtattcaatacccgactaagtacaagtttcgggccggcgctcttgcaagttcagacgctgggatatccggggcgtagcgatcccactatcaccctccaagctaagctcgctgcgacagatggactgaaccacgaggctgcggttctattcgaggttgactccaaacgtacaaactctttgtcagccgtgttgcgacttccggagacatccaatggattggggtatcaaaacctcatctggatgatatttcgtttgatgagttttcgagacgactggctcaaaaaacaccgcaatcctgatgaacaaactacaacagggatcgagccaattcaccttgtgttgattgaagaacctgaagcgcatctccacgtccaagtccagcaggtttttgtgcggcatgcctatcaagtactctgtgaagacgacttgatcacccgctatccaaacctaaaaacacagctgctcgtaagcacccactccagccacgtcacccacgaggtcgagtaccagcatcttcgctatttccggcgcctaccagctggcatggacggtgtgcaggtaccggtatccactgtttccaatttatcttcggtgtttggagagggttcctacactcagaaatttgtgactcgctatcttcgagctcagcatgcagaactcttctttgccgatgcggtaatcttggtggagggagctgccgagcggatgctgctgccgcaatttatgcgcgcccaattcaagtttcttgatcagtgctatatcagcatcctcgacattggggggagtcacgcacataggctccgtccgcttatagacgcacttggcatagtcaccttggtcatcaccgaccttgatgctggaatggccaaagcagctaggccggttcgccgcggtgccgatctttcgaccaacaaccccaccttgaaacattggctcaggatgaaagatgcatcggccaaagtggacgatctccttgagatggccgatgagctgaaatgccaagagcttgaccagctttttgctattcgactcgcctaccagactcccatttcagtcattctttctgcagcaggggaagcacccgttgaggtattggcgaacacctttgaagacagcttggtactcaccaatgcgcgtcattttgcttcacgctccggtcgcggcttggtcggccaattcgcccgggctctccagtcggccaagacttctgaggagcttggagattccatgttcgaggcgctgcgagatggcaataaggcggagttcgcgctggaggtactcggtacgagtgacttcccttcattgaccgtgcccgaatatattcgcgaaggcttggaatggcttgaatcaaagctgcgtaagaaacagtcagagctagtgctcgttacgaccaatcccacagaggtgatcgtatga

SEQ ID NO: 79273 - DNA, 1848 bp, Pseudomonas libanensis
atgagctcactgccagatgccgaccagctgatccagcaatgcctgaatctcgataaccccacgagttttttcctatacgcgggcgcagggtcgggtaaaacttactcgcttgtagaggcagtacgaaattttaaagcaaggttttccgagcgcttagctgttgaaggtcggcaggtcgcggtcatcacctacaccaatgcagcagcggaagaagtcatgcgacggctggagcatgacccattggtttgggtatccacaattcactccttcgcatgggagatgatcaaaggattcaatgacgacattcgggaatggctcaagatcaagttggcaattgacattgctgagctggagaaaaaattagccaaggctcgtggggagaataagacctatcgagctaacaaggctgaccgagatcgcaaagttaagcgacttgagaacattcagcatgttttcaatttcacatacagcccgacgggcgacaaccgcggccatcaggcgctcaatcactctgatgtgattggcttagctgctgactttatacagaggcgccctctcttaaacgttctggtggataaatacccggtactgctaatcgatgagagccaagacaccatggctcgattgatggaagctttcctagccgtgcagtctcaggcatctgatcgtttttgccttggactgctaggggacacaatgcaaagcatctatggtcacggcatgcagaatcttgcctcagccgtgccactggattgggctaaacctgagaaactcttgaacaggcgatgcccggtacgcgtagtcgagctgattaacgaaataagagcctcggcggatacgcaccagcaaaagccccgtgacgatgctccgttgggaacggtgcggatgtactgcgttagaaaccaaccgacatctacctttgagacagaagatgaggttgccgagcgcatggccgaactgactggcgacagcagttggagttccgggatggagggtagaaagactctgatcctggaacacaaaatggctagccgtcggatgggattcgatggtgtattcgtaccgttatatcaggtggaacatctcaaaaccggtctgctcgatggcaccctcccggcattacgagtttttgttgaaggcgtgatgccgattctggatgcagctcaggtagacagtttcagactgatggaagccgtgaggcttagttcgcccttactgacccgcgatcggctggcagcgtcgctcgaccaggcatttacgatagcgcaggccggtagaggcgccgacgccctcctcgctctgtttgcagacgccgatccaaccatcagcgaagtcgtagaggtgctcgctaatacacatctccttgagttgccggatcggcttcgtacagcgcttgatatggggccaactgaggaggacttcccagacactggcgaccgggaagtgcttgaggtccatgcctaccgcctgctgattcgaagccctttctcacagctcgcggcctacgcgaaatactgcagcgagctttcaccttacggcacccatcaaggggtcaagggtctcgagtttccgagagtaatggtcatcatcgacgataaagaggccgctgggttcttatggagctacgagaaagcgcttggggttctaccgccctcgccaggcgaccgcaaaaaagaagcggatggcgaggacaacgccttgacccggactcgtcgactgttttacgtaacctgcagtcgcgctcaggaaagcttggcaatcgtgttctacacatctgatcctgaggcagcgatgaccagtatagtcaaagcagggtggctgcatgagcatgagatatcggtcatgtag

SEQ ID NO: 79274 - DNA, 2139 bp, Pseudomonas veronii; identical to SEQ ID NO: 73942

SEQ ID NO: 79275 - DNA, 1785 bp, Pseudomonas veronii; identical to SEQ ID NO: 73943

SEQ ID NO: 79276 - DNA, 1926 bp, Pseudomonas poae
atgaaattacaatctatacgcctgtctaactttcaatcctttggactgaaacctacagagctgagttttgacaaaatcacctatctgattggtccgaacggctcgggtaaaacggctgctctacaagctctatgccgacttttcgctttcgatccttcactgcggcgcatccagcgctccgacttccatgtcccacacatcgaagttgaagctccagaagagcgaaagctctggatagaagccgacttcctttttcccgagctgaccaaagacgaagataacagcaccgttgctccccatttcgggcacatgcggcttgatgagctgcatggcattccacgtgttcgttaccgcctcgaagcaactatgggcatagatggcgatattgaagaaagcctggtgtatgtgcttgatgtggatacagagggagctccactcaacacagcacaggttgcacgtccagaacgcaaccacatccacgtgcactacctcccagccagacgtgaccccgcagatcacatcgcctatggcgccaatgcattactcgggcggattttgcgctcagtgcaatgggacagtgagcgatccactatcaagggactcactgatcaaatcagcgaaagcttagccgccaacccttgcattgacgcatttagtaccagtcttagggctgtatggggcgagctgcataagggccgcttcttcacggaccccaagatcacctttgtggcctccgaaatcgagtcccttctccggcatttgtccgtctccttttcccctgggcatgacgacaatctcgtcgactttgcccgcttgagcgacggccagaagtcgatgctctatctgtcattggttctgtcatcccaggctattggccgggcagtcttgtctggagaaaatacgtctttcgaccctgacagactgcggccacctgtttttaccctcatcgcggttgaggagccagagaacagtctttccccccattacttgggccgtatcgtcaacgcattgaactcgatggtgaaacatcccgatgctcaggctttgatagcaacacatgcgccctccatgctgcgcagagtggagccggaacatatccgctacctccgcctaacggatgctcggcaaacgcgagtcacgtgtatcaagcttcctgaaaagaccgacgatgctcacaagtatgtgcgtgaagccgttcaagcatttccggaagtctatttttcccggttggtcgtcttgggtgaaggagatagtgaggagatcgttttaccccggctactgcgcgccaaaggcacaccagtggatgaatcagcgatcacgattgcgccattgggtggcaggcatgtgaatcacttctggcgcctgctgtcagagctgcaaatcccgtacgtgactctcttggatctggatgttgctcgatatgcggcgggatgggggcggataaaatatgtgaacgaccaattcgctaaattcgagcccactaaaatgctttccaatctagtgacaattccgaagtgggacgatgacgtcacgcctttgcgcactcaccattattttggtgaggacaacaaggacttcttcgccgcactacaagagcgtggtgttttcttctccttcccaatggacctggattttgcattgcttcttgcgtacccagatgcctaccaagtggttaaagaagatccagatgcccagaccatcaaggcagtcctgggtaagagccatcacaattcagctcaatacacccctgaggagctgaagttatttggtacgtatcatcaaagcttcaagctaggtagcaagcccgcagcacaccttgaggcactggccaagctaaccgatgatcagttgctcataggaatgcctaagtcactcaatgatttggccgatgcagtcatcgctatgcttgaggagattcctgagtga

SEQ ID NO: 79277 - DNA, 1677 bp, Pseudomonas poae
gtgatctccattgatgcgtggcaaccagcagacggactgacgctcgaacccaatgcatccctcgctgcaagggaacaagagcgctgcctggctcttaccgctggacctggggcgggcaagacagaaatgctcgctcagcgcgcagacttcctcttaagaaccggcacctgccggtatccaaagcggattttggcaatctcattcaaggtagatgcgagtaaaaaccttaaggagcgtgttcagcggcgttgcgggaacgacctttcgtcacgcttcgatagccacacgttccacgccttcgcaaaacgtatcatcgatagatttcggccagttctaacaggtaacgacagtctcgatccaggctacaaaatcggtgacagaaaaattggcagtaaacagattgaattcggtgaccttgttcccctggctattcagatactcgagaaatcggccatcgctcgaaatgcgattcggcaaacttacagcgatgtctttctggatgaattccaagactgcactgatcagcagtatcggctgattaaaactgcattcattggcacgtccattcgactgactgcagttggggataccaagcagaaaattatgggttgggcaggcgcacttgacggaatttttaagacgtttgccgaagacttcaatgcaatcccactcaatatgtatcgcaattttcgctccaaaccccgtttactgcgaatgcagaatgagattatccgagtgcttgacccaacctcggtcatgactgacgaccagcttgagggagacgaaggcgaggtgttcgcctataggtatgaaaatagcgagattgaagctgagagcctggcggatctgatttctgaatgggtccgcaaagagtcagtacctatttctcaaatcgctattttggtgtccaaactccttgaccaatacgcccttcaactgatgagcgccttggaggcgcggggcatcccttaccgaaatgaacagcaaatgcaggacatcaccgttgagcctgctgcgcgcctagttgtggactacctattgtgcatttatggccagcgcgagccaaaggcgtggataagactgatggaccagttgattccatacgccgatgaagaattacaggccagtgtgcggcaggatctaggccggttcatcaaaacacagcgtaagaacgtcgcgatagcggacttaatcggtgagtcattcgagggatggtgggaaacagcgaaagctcttctccagcatattggtttagagacgctgactgcgctctctcccgactacgaatcacagaatcggttaggggaagtattgcgcgacacaagaactcgcattgaagatttgcttaagcttgagcctgagcttcccaaggcactgctgcgcttctcggacgatcaagcagtcagaatcttaaccatccataaaagcaaaggattggaattcgattccgtcatcatcatggccgtcgataacgaaattttcttcggtgatcaagatgcgaatcgctgtgcattttttgtaggagtttctcgtgccaagaggcggttggtactcacgcatgctgcagtacgagaaagaccagagggttatacaaaaaagtggagtgtccatcggactgagcaggtggagtttttctcctacagcacgcctttcgtatccaccacagtagcgaattga

SEQ ID NO: 79278 - DNA, 2298 bp, Pseudomonas sp. DSM 29167
atgcaaattcagcatctggaaatcgcgaactttcgcaagctcctatccgtacgagtcgacctcgcagccgagaccacactactcgttggagccaacaacagtggcaaatcatctgcggtgctggccttgcgtaagttcctactttcgaaagcgtcgattttcagattgcaagatcttactctgagccatctcgccacaatcgatgccattggtgaagcttgggaggctgcagatgatagcttctccatcccagtcgcaaatgaatgggctgactggttgccaacgctagatatttggcttgaagcaactcagggcgagcttcatcacatccgagatctcataccgaacttcgcttggaaaggcggccatgtcggtatgcgattccggctggagccagatgatatgccaacgctgtttgtcgattaccgcaaagagcgagcacgagtgagggagcttcagcaggaaattcaaaaacaggcagcgctaggtacgcagccaccatcgcttccgctctggccgcagagcttgcatgactacctgaatcgtcgaatcggtaaaaccttcaagatccgatggtaccgacttgattcaggccagctacgagctccagatcctgcaactcgtaaagctaaccagcaaccgcttgcggccacagcaacgccactcgagcgcaatcccctaacagacctgatacgagtccacgagatcaatgctcaacgcggctttggtgacagcgctgacgaaggcgtcctagagggagggcatggatcgggcaggaagctctcggaacaattgcgagcgtactacagcaggcatctcgatccaggcgatagcccagatatttcagatttggaggcactcagagcaattgaggcagctcaaactgcctttgacactcgcctgagcacgagctttgcgcctgcgctcaaggaagtcgtcggcttgggctatccgaataactccgacccgtccatccgagtttccacccgcctcgcccctacggacgggatgaaccacgaagcagctgtgctgtttgaattggattccgttggaggagcccctggagcaccgcctcttaggcttccggagacgtccaacgggctcggctaccagaacctcatctcaatgatattccgattgatggcatttcgagatgaatggcttaagaagtacagaagtcctgaagagcaaagcgctactggtgttgagcctatacatttggttctaatcgaagaaccggaggcccacctgcacgtccaggttcagcaagcattcataaaacacgcctaccatgtgctgtgcagcgacccattgttagcgaagtatccgaatctcaggacgcagctgatggtcagttcccactccagccacgtagctcatgaaattgactacgaaaacttgagatacttccgcaggcttccgtccggcatggctgggatttcaatcccagtcactaccgtctcgaacctaagcgcagtgttcggcgagtccaatcaaacgaaggaattcgttacccgttaccttcgggcacaacatgccgacctgttctttgcggatgcggtgatccttgttgagggggccgctgagcgcatgatgcttccgcattttttgaggcaacactttcgtttcctaaaccagtgctacataaccattttggatattgggggaagtcacgcgcatcggctccggcccctgatcgatgcgttgggcattgtcactctggtgataaccgacttggacgcgggccttctacaggtaggcaaacctgtcgaacggaagaaaggccaaaccactaataacccaaccgtgcgccattggatgcgagcagcaggccttggacatgatgtggactcattactggatctgccctttgacagtaaagcccagcaaattgacgatctattttcgatcaggatcgcttatcaaacgcccattactgtccgcttacccaaaactgggctcgatgtcgaagcattgccaaatacctttgaagacagcctcgtcttgagcaatacagagtattttgctaacaaagcggggcgcgggctgatgcgatcctttgccaagtcgctacgggaagcagaaacatccttagagcttggcaccgagctattcaccaagctcaaggatggtgataaggctgagttcgcactacacgttctcggcgactctaatttcgccacgttgaaggtgcctacttacatccatgagggcttggcgtggctgcagtccaagctcgaaagaaaaagcaaagaactactggtcgtcccttcagcgattctcgaggtgacgccatga

SEQ ID NO: 79279 - DNA, 1872 bp, Pseudomonas sp. DSM 29167
atgagccggcagccggaagctgctacggatgatgttccagatgccgatcagatcattcaggaatgtctgaatctcgaccatccgaagagttttttcctatacgccggcgctggctctggaaaaacccactcattggtcgaggccgtgaaaaacctgaaaaatagggagcggcaacggctgacgtttgaagggcgtcaaatcgcgatcatcacctatacaaatgctgcatccgaggaaatttcccgccgtcttgaacacgatccattggtggtcgtatcaactatccacgcgttctcttggcggatgattcaaggctttaataccgacatacgtgagtggcttagggccaagctcacgcgagatattggcgagcttaatgagaaactcggaaaggctcgagggcaaaacaagacatttctagcgaatcaagcttcgagggatagcaaagctcgtcgtcttgattccctggatgagatatcgacattcatttacagccctactggcgataatcgcggtaggcaagccctaaatcatagcgaagtcattcaaatggccgctgcttttattcagcagcctccattgttggacgttatggcggatctgcatccggtaattttgattgatgagagccaagatacttatgggcctctcatggacgcttttctgcaagcacaatccctcatccctgaccgtttttgtctcgggcttctcggcgataccatgcaacgcatctacagcgatgggaagttgcgtttggaggaagcgatccctccagattgggctgtgcccgaaaaacgtatgaaccgtcgctgcccaacaagggttgttgatcttatcaacgtaattcgtgcgagcgcagacagccatcagcagaagccaaagcctgacgctatagaaggcacagttcgaatgttttgcacccaacagataccaggtcaaggtttcgagttggaggaagacatcgcacagcgcatggccgccatcaccggcgacgctcagtgggcaattggtaaagacggaagaaaatctctgattcttgaacacaaaatggccggacgccgaatggggttcgagggtgtgttcacaccgttgtatggagttgagcacctgcgcacggggctactggatggaacactgccaatcttgaaactgttcttcgaacgggtagcccctattcttcaagctgccaagacgaacagtttcagtctcatggaggctgtgcggcttcagtctccgcttctcgatacaaaatctataaaagacgcgcctgaccaatttgctttgcttgataaagcaggaacagcaactgagtcgttgtgtgaactattcagtgccaacgatcccttgattggagaggtggctcatgtactgttcgaaactggcttactagatctccctgatcgccttgtgacagctctattactgggcgccacaagtgacgatcctcccgagacatcggatcgtgatgcgttggaaacccatgcataccagattctacttggacgccccttctcggaaatggctgcgttcgccgggtataccgatggactatcccctttcgacacgcatcaaggcgtgaagggactggagttcccaagagtcatggtaatcctaaacgatgaggaggcaggtggtttccttttcagttacgacaagctcctgggggtcaagcctgcttctgacagcgatgtaaaaaatcaacgcgaaggtaaagatgactccttggcccgcactcgtcgcctactgtacgtcacttgcagccgggccgaagaaagtctcgccattgtggtttataccggtcagccggcgacggcgaaacagcgagtgattgaggcaggctggctccagccagaggagatcgaaattctatga

SEQ ID NO: 79280 - DNA, 2139 bp, Pseudomonas sp. DSM 29167
atgcacatatccaaactcagcttggtcaactacagaaactttgccaataccaagctgctgttccaaaagggcatcaacacaatcattggcgaaaacggatcagggaaaaccaacctttttcgagcgatcaggctactacttgatgacaatatgatccgctccgcctaccgactggattcaactgactttcatcgcggtttgggacgatggcaagggcattggatcatcatcagccttgagttcgaggagatttcggaggatgaagccatccaagccttgttcttgcatggggcggtcggcatcgatgatgaggcaatcggcaaggccacctatactctcatcttccgcccaaagaaagagatcaggctgcgcctctcccagttagacgatggcgaccacactggtctcgacgcgatcctaagtgctgtcactttggacgactacgaaaccatcttcacgggccgaagcgacgctgacttcaacgatgaggccttttacaatgaggtggtcggtgactttgaaaatgcccgattcaacgaagaaatcgaattccctaccatcggtgccaagatcccaagtgtactatcagtttccaaagaaatttctttcactttcgttcaagcactgcgagatgttgtgtcggaatttcacaacaacaggaccaatccactattgtcccttttgaagggtaagagcggtgatattgatcctgtggcatttcaagcgattaccgatggagtgaaagtactgaatgactcgattgaggcattaccagacgtacaagtagtccggacggacatacgagacaccattaaagacgcagcgggcgaggcttactcgccatcttctctttcaattaagtctgatttgccagacgaagcggacaaactgttccagtcgcttaagctgtttgtcggcgaatcggacgaggggcacgaagggcctatccacgaattgagtttgggtggtgcgaacctgattttcctcacattgaaactgttggaattcaaatatcagaaatctaagcaatcgatcgccaacttcttgctgattgaagagccagaggctcacattcatacacacatccagaagacgctcttcgataagcttcaatacgacgacactcagattgtttactcgacccattcgacccagatctcagaggtaagcaatgttcagaatgtgaacattctcggcagagagcagggtcaatgcgtggcctatcagcctgctaccggtttaaccacgaaggaagttggtaacatccagcgctacttggatgccgtacgtagcaacctgctattcgccaaaagcgtcgttcttgtagagggcgatgctgaagaaatcctgatcccgattttgatcaagaaagtgcttggtgtcagtctggatgaactcggcatcagcttggtcaacatccgaagcactggctttcaaaatctcgccgttctattccacgatgatcgaatccgaaagcggtgcagcatcgtaaccgacctcgacaaatccatcattgacacagcgcccgtcgctggcgactctgaaagcatggcccggcgcaagagaaagtatcaagcctcacaagaaaaaggcatcgccagaaaggctctcttggatgagtccttcaaagataacccatgggtttccccgtttttttctccccacactttcgaggtcgattttgtctctgccggtaacgctcgcaaggtagtaggaattcttcctgatgtctacatagatgctccaaccatcgcgaaagcgaaggcagacctagagtctgctgacagcgcgcgatatggccaaagagccctgactatggcggacagctatgggaagggatggtttgccattttgctgggaaaaaagatcgatccagagacggcgatccctgagtacattttggacgctatcgctttcgcccatccggtggtcacaaaggaagtctggttcaacatacttagctatcgcgtgaactacattgacgaaaacgatatcttcactgcaccggcggttttcaccgagttcagggaaaagcttctagcctttagaagaggtgaaatcgatttcgttggcatccgaaacgaagtgctggccaccttcccagatgatcgtatcaacgacgttcttaaggccttttaa

SEQ ID NO: 79281 - DNA, 1797 bp, Pseudomonas sp. DSM 29167
atgtttacttggaacacaggcgaccttaacccggagcaggaagctgccatcttgcagcctgggagtgcatttctcattgcctgtcccggtagcgggaaaactcgaacgctgacttacaaaatcgcctatgagttgtcaaggttgcagtcgaataagcaatttgttgttgcgatcacctatacgcaccgtgccgccgacgagatccatgagcgtatcgagagtcttggggtggacacatcacgactatggataggaacaatccactcgttttgccttgaatggatattgaaaccatacggtatctatcacgaagcattagatcgaggtttccgcgtgatcgatcagcatgaacgtgagaaaattctcgaagccctgtgcaaaccttatcagaagccaaagatcacgttctgggattgcgagttctattttactgaagccgattatgtgatttcctgcccacaggcttggaaacacaacggtctgcacgagatactgggtagatacttcgaaattctacgagaaaatcggcaaatcgactttgaactcatcctcttctatgcttaccaactgatttcccgtcatcctgcgatcagcactctcttgggacagctgttttctttcttattggtcgatgagtatcaggacaccaagcgaattcagtattcaatcatcactgctattttgaaagctggccaaggcgcgaccaaggctttcattgtcggcgatcccaatcaggcgatttatcagtcactcggtggatacccgatagctttcggtgatttcaagtcaatggccggcatcgacattgaagaacgcgaactgtcgagaaactatcgctcttctgagcgcatcatcgactacttcggaaacttcaacgttcatgcaactcgcatcgaggcagcatccagcgataagacttatcagagtcttgtttctttcgacgaaacagtaagcaaggcgggcttggagactgagttgatccgacttatccggttcaacatcgagaccaccggaatcgcaccccatgaggtctgtgtgctcgcgccacagtggacgcatcttgcaagcatgacacgccgcttagtcgcgaacatgcctgagtattcgttcgatgggcccggtatggttcccttcgcacgtgatacagagaatttttggtacaagctctcgaagattgcacttacgcaggcgtcgccgacaatgtatgtgcgcagacttcgatgggccggcgatgtcctgaatgacctagaagcggccggagcgagcgtgtccagattcacgcgaaaatccctgttaagggaatgcaatgcgatcaagatagatgaaactgacggactcagctatctccgcaaattctttgaaattctatttgccaacttggcgatcgactttcgtcttttctcgctgcttcaagagcatcacacagcgttctttggtagctcgcaagctagagttgaccgtctgaagagcgagggcagcgaattcattggagacatcgagacgtttagaaaggtatttcagacccggacaggcataactatttcaacgatccacggcgtgaagggggcggaatttgatgcagtgatcgcctatgccttgttggaagacatggtgccgcactttaatgacccgaacggccaagaaagtgcgctgaaactgctgtatgtcatcggatcacgcgcaaggaagaacttgcacctgatttcagaacgggggcgaattcgtcagtactctggcgaagaatatcaagcgactcggcaactcgtatcctgcaagttttcatacgaccaagtttag

SEQ ID NO: 79282 - DNA, 1926 bp, Pseudomonas sp. DSM 29167
atgaaattacaatctatacgcctgtctaactttcaatcctttggcgtggaacctacagagctgacttttgacaaaatcacctatctgattggtccaaatggctcgggtaaaacggctgctctacaagctctatgccgacttttcgctttcgatccgtcactgcgtcgcgtccagcgctcagatttccatgtcccacacatcgaagttgaagcaccagaagagcgaaagctctggatagaagccgacttcctttttctcgagctgaccaaagacgaggataacagcaccgttgctccccatttcggccacatgcgccttgatgagctggatggtattccacgtgttcgctatcgcctcgaagcaactatgggcatagatggcgatattgaagaaagcctggtgtatgtgcttgatgtggacaccgagggaactccactcaacacggcacaggttgcacgtccggaacgcaaccacatacacgttcactaccttccagccagacgtgaccccgccgatcacatcgcctatggcgccaatgcattactcgggcggattttgcgctcagtgcaatgggacagtgagcgatccactatcaaggagctcactgatcagatcagcgaaagcttatctgccaacccttgcattgacgcgttcagcaccagtctcagagctgtttggggcgagctgcataaaggtcgtttcttcactgatcccaaaattacgttcgtagcctctgaaatcgagtctcttcttaggcatttgtccgtctccttttctcctgggcacgacgacaatctcgtcgactttgcccgcttgagcgacggccaaaagtcgatgctctatctgtcattggttctttcatcccaggctattggccgggcagtcttgtctggagaaaatacgtctttcgatcctgacagactgcggccacctgtttttaccctcatcgccgttgaggaaccagagaacagtctttctccccattacttgggccgaatcgtcaacgccttgaactcgatggtgaaacatcccgatgctcaggcgttgatagctacgcatgcgccatcgatgctgcgcagagtggagccggaacacattcgctacctccgcctaacggaggcccggcaaacgcgagtcatgtgtgtcaagcttccagaaaagactgacgatgctcacaagtatgtgcgtgaggccgttcaagcatttccggaagtctatttttcccgattggttgtcttgggtgaaggagatagtgaggagatcgttttaccccgcctgctccgcgcaaaaggcataccggtggatgagtcagcgatcacgatcgcgccactgggtggcagacatgtgaatcacttctggcgcctgctgtcagcactacaaataccttatgtgacgctcttggacctggatgttgctcgttatgcggccggatgggggcgaataaaatacgtgaacgatcagttcgcccaatacgaaccagcaaaggtgctccccaaagagtggcgaatctcgccatggaacgatgacaacatacccgtgcgcacccatcatttttttgatgaaggcaaatcggatattttcgtcgcattgaaagagcgtagtgttttcttctctttcccgatggacctggattttgcaatgcttcttgcttacccaaatgcctaccaggtggttaaagaagatccagatgcccagacaatcaaggcggttttgggaaaaagccaccacaactcagcccaatacaccgctgaagagctgaaattatttggcacttaccatcaaagcttcaagctaggcagcaagccggcagcacaccttgaggcgctggccaagctcaccgatgaacaattgcttattggaatgcctaagtcactcaatgacttggccgactctgtcatcgctatgcttgaggagcttcctgagtga

SEQ ID NO: 79283 - DNA, 1677 bp, Pseudomonas sp. DSM 29167
gtgatttctgttgaagcgtggcaaccagcagatggcctgacgctcgaaccgaacgcgtccctcgctgcgagggaacaagagcgctgcctggctcttaccgcgggtcctggagcaggcaagacagaaatgctcgctcagcgcgcagacttcctgttaagaaccggcacctgccggtatccgaagcggattttggcaatctccttcaaggtagatgcgagtaaaaatctcaaggagcgtgttcagcgccgttgcgggaccgacctttcgtcacgcttcgatagccacacgttccacgcctttgcaaaacgtatcatcgatagatttcggcccgtgctaacaggtaacgatagtctcgatcctagctacaaaatcggtgacagaaaaattagccgtaagcagatcgaattcggtgatctcgttccactggctattcagatactcgagaaatccgccatcgcgcgaaatgcgattcggcaaacttacagcgatgtctttctcgatgaattccaagactgcactgatcagcagtatcagctgattaaaactgcattcattggcacatccattcgactgacagcagttggggataccaagcagaaaattatgggttgggcaggcgcacttgacggaatttttaagacgtttgccgaagactttaatgcgattcccctcaatatgtatcgcaattttcgctccaaaccccgtttactgcgaatgcagaatgagattatccgagtgcttgacccaacctcggtcatgactgacgaccagcttgagggagacgaaggcgaggtgttcgcctataggtatgaaaatagccaaatggaagctgagagcctggcggatctgatttctgaatgggtccgaaaagagtcagtacctatttctcaaatcgctattttggtgtccaaactccttgaccaatacgcccttcaactgatgagcgccttggaggcgcggggcatcccttaccgaaatgaacagcatatgcaggacatcaccgttgagcctgctgcgcgcttagttgtggactacctattgtgcatttatggccagcgcgagcccaaggcgtggataagactgatggaccagttgattccatacgccgatgaagaattacaggccagtgtgcggcaggatctaggccggttcatcaaaatacagcgtaagaacgtcgcgatagcggacttaatcggtgagtcattcgagggatggtgggaaacagcgaaagctcttctccagcatattggtttagagacgctgactgcgctctctcccgactacgaatcacaggatcggttaggggaagtattgcgcgacacaagaactcgcattgaagatttgcttaagcttgagcctgagcttcccaaggcactgctgcgcttctcggacgatcaagcagtcagaatcttaaccatccataaaagcaaaggattggaattcgattccgtcatcatcatggccgtcgataacgaaattttcttcggtgatcaagatgcgaatcgctgtgcattttttgtaggagtttctcgtgccaagaggcggttggtactcacgcatgctgcagtacgagaaagaccagagggttatacaaaaaaatggagtgtccatcggactgagcaggtggagtttttctcctacagcacgcctttcgtatccaccacagtaacgaattga

SEQ ID NO: 79284 - DNA, 1818 bp, Bradyrhizobium manausense
gtgaaaatagctcgtgcttttatcgagaattttcgaggcataagacaggcagaagtccatttttccggcacatccgtcctccttggcgacaacaacactggaaaatcaaccgtactcgaagccatcgagcttgccattggtccagatcggctcgcgcgtgcgcaggcgatcgacgaacatgatttctatggcggggattatctcccggctgagggtgcgcctgcaaagctgatcatcgtcgaagtcgtcatcaccggtctcgacgagcagcattgcacgaaatttcgcaacaatctcgaattctggcggcaagccgatcggtcgctcctggggccagggcagggggccgacttggctcaggaaggcgtcgatcccgccgtccgcatccggttcgagggcgcttacgaccccgagaacgacgacttcaccgcgaaaacttggttcgcggtgccacgtctggacgacggcaccctgatcaacgaatgccgctcgagcgacaagcgcgaattcggctttctgcatctgcgcgcgctgcgcaccggcaacagggcgctctcgatggagcggggttcgctcctcgacatcatcctcaagacgtacgaggtccgtactcgcatgtgggaggggttgttgcgccagctccgcgatctcgacgtcgttggcgacaacgatcctgaattcgggcgcatcctgacggccattcgcgacgccatgcgcgacatcgttcccggtgaatgggccgacgcgccgcatcttcgtgtatccgatctcacccgcgatgatctccgccgtgtgctgaaatcgttcctggccaccggcgtcccaggctacgctgccccgttccagcatcaaggatcgggaacgatcaatgcgctggtcctggcaatgcttggcctcatcgcacaacgacgcaacggccgcgtcatctttgcgatggaggagcccgagctctcacttccacctcacgtgcagaagcgtgttgtcgacaaggtgaggtcgatcgccgcccaagcgctcttcacgtcgcattcgccttacgtgatcgaacagttccaacccgagcagatgatggtgctgacgcggaatacagccggcgtgcttaacgcctccaatatcgagcttcccgccaacctgaagctcaagacgttccgcgacgggtttcgcacccgcttctgcgaagcgctactcgcgcgtcgggtcattgtcgtcgagggcaagaccgagcttgtggcttatagcgcggttgctcgtcgcgcggcggagctcgcgccggcgcactatcaacgactcgacgccctcggatgggtgcccttcgacgccggtggccaaacgtctgtcgccgcgttcgcggccttcttccgcagtttgggcaagactgtcgcgaccatcttcgatcaacaggctcagccggccggcgccgcgatcgtcgcgtcatgcgacgccgcgtatgaacagccctacgcggggttcgaagacctcctcgctgccgaaatatcggttccgatgcaggcgtggtttgtacagttcttcgtggccgccggcgaatggccgcaggccctcaacaaccttttgccattccccggatcgcctgaagctgcttatcgggaggcttttctcgcactattcaagcacaagaagggtgacgactatctcaccattttcttcgagcaatgccagttgggacatttccccccaaccatgctgcagatcatcacggcgctgaaaaacttggctgcgccgctgccgccgccaccgccacccgccccctggtgcaagcgaatatcttcggataatggcgatggcgttgatcctgtgtga

SEQ ID NO: 79285 - DNA, 1725 bp, Bradyrhizobium manausense
atggcgttgatcctgtgtgatcaaaggcaacgcctcctacggaccgatggtaacattctcgttcgtggaggcgcaggttcgggcaaaacgacgattgccctcgccaaagcttgcgcagatctcgatgcgcagcggctcggaccgctcggaaaggccttattcctcagcttcgcgcgagcgaccgtcgcgcgtgtcgcggaacaggccaccgccaccctgccgcgtgcgctgatgccgcggatcgaaatcaacacctaccatggctttgcatggacgatcctcaagagtcacggctaccttctctgcgccaagcgcggggtcgccctgcttctccctgcaaaggcacgcgcgcatcttgccggtctcgtgggcgccgctcgcgcagcgcgccagcgacagctgttcgaaaatgatgggttggtcgcgttcgatctctttccgacactcctgaccgaactactccaaaccgcacctgctctcgcgcttgcctatgcgcgggcctatccgctcatcatcgtcgacgagttccaagatacgaacgccgaggaatggcagatggtcgcccagctcggccgccacagccggctcatcgcgctgggcgaccccaagcagcgaatctacgacttcaagggcgcacatccacgtcgcttcgacgaatatatcgaagccttcgatcccacgccctttgactttgccggcgagaataatcgaagcccaggcaccgcgatcgcccaatttgccaatgatatcatcgacggcgagtaccgggccgcgaattatgatggtgtcaccgtcacatgctatcgcggccgcagcctgcgcccgctcaagcaggaaatcctcagggctgttgcccgcctccgccgcaacgccgagtggtcactcgcggtgctcgttcccgcaaacacgctggccatcaacgtcttcgactacatggcccaggctgttcacggcctcccggcctatccggtcgacatcctcgttgccgccgagggaccgatgcttgctgccgacctgatcgcattgcttatggagccgcgctcgcaccagcatctcgccgccgcgatcctggacggacttgccgcgttcgaactcggcagaagcgaagaggcatcgggaggtgcgctccgaaaggcggcccgatatcgcgacctagccacagctgtccgaggccgtggactagacggcctcgaagcacgcggtatcggacccggcattcgaaaccttatggacaccgttgcaaccctggctctgtcgggagatcctatgacggactggcgggccatccgggcctgcctcaatgcaagcgatcgtaaagagttccaggccgtggccaaggaagcgcgtcacatgcgcctgttgcggcgcggcgcccaaatcgaatccaggctggccgaggcttggcgcacccatggcgcctatcgcaacgcccgtgccttgctggccgcggccgtcgtggacgatcaatttgcagccaccacccgcccgcagcacggtgtcaccgtcatgacgattcacaaagcaaagggaaaggaattcgacgaggtcatcgccttcgaaggccagtttcagcgctacctccagcgcaccggcgccgatgacgaacgctccgcccgcttcaaccttcacgttgctgcaacccgcgcgcgtcgcgcagtgatgatcatgacgcccgaggatcgcccgtgccacctccttccattacgaacgagccatgaccaataa

SEQ ID NO: 79286 - DNA, 2520 bp, Lysobacter antibioticus
atgtcaaggacctttaggcgacaactatcggccatcctgttgaaaagcccctttgacctgtttaggagccttcccgcgttgatactagcgtggggccgaaacaggcgcggtcaccatgggcgctgcaaaaaggttcgtataaatgcctggcgcgcatgctccccgggggcaacgaacaagatgcatgtaaattctctcgtctttaaaaattttcggagattgaagaacgcacgcatcgactttgcctctgacctgacgatcttcgtcggcgcaaataatagcgggaagacctcagccactcacgcgattgagctcttcctctcaggcggcaaggacaagttcaccattcacgacttttgcgtggactgctgggccgacttcgagagttttccagctgaaggcgcggccaacgcgaaggtccaatttccggcgatatcccttgatgtctggatcagcgtagatgcagacaatctctatcgcgtagtcgagctgttgccgcgcgccgcctgggaaggatcactggtcggacttcggatcgaattctcggccaaggacgccccccagacacttgcgaactttagggcgaaagcggctgaggcagccaagtttgcgaccaaggaaaaagacgggcacgactacaagccatggccgcgcaatatgcgcgactatctctcccgtgagctgaagaatgaatatggcctgcgttacttcattctggatgaggcacagatcaaggcggaaactaccgacgcggtcaatgcgcccaaagagatcatcggtgataccgagcgatccgggcacacagtcatcaattcgctgatcaaagtcgatttcctcagcgcgcaacggcacctgagcgacgggaacgctcaagcaagaacagaagatctctcgaaacgactgagtcgattctacgcccgcagtcagaataaacgagaagatgatcacaacgcgctaagagcccttgcgttgtccgaggaccagctcaccaaacacttttccgacgtgttcagcgacgcgttcaagtcgctgcgcaaacttggctatccaggcctcgcaaacccttctcttgagattcgcgcagcgctcaaactagaacgtgtcatgggcgatcagcaggcaaaagttcactacctgctcgaagaggcgactgccgaagcggaagctatcgcgctccctgacagctacaacggcctcgggttcaagaacctcatctacatgggcgttgaactcttagaccttcattcggcttggtctaacaccgaggaaggcaaggaagacaagcggcagcctatacacctcattttcattgaggagccggaggcgcacatgcacgcccagctccagcaggcattcgtgcgtaagctcactgacctgatcccacctacgggcggagacgggtatgcgacgcagtttgtgatcaccacacactccccgcacattctctatgagcgtggcttccagccgattcgatacttcaggcgctcagcagaaatcggcgcaaaacagagttcagccgttttcaacctgtcggtattttacgagcagaacgagcccgaccgggatttccttcagcgctacatgaagctgacacattgcgaccttttcttcgcggatgcggccattctggtcgaaggaaacgtcgagcgcctcgtgctgccgctgatgattacgcatggcgccaagaagctcagcgctgcctatctgagcatcctcgaagtaggcggcgcttttgcctaccgctttcgtaagctgatcgagttcatcggactgccgacgttgatcgtgaccgatctcgacagtgtgtatccagcaccgccgaagaaggaagaagtagcggcagcagcagacgctgcgaccgcagcagcggcgcaatcggcagttgactcagaggacgcggaagagttagaggatgacgacgggagcgaagacgcagaaggtgagaaaaagcccaagccaagatcgaaatgccccgccagcacgcctggcgcaatcactgcgaaccagactttgctgcagtggcttccctgcaagtcattgatcgatgaactcctggccgcgtccgccagcgacagacttcaagcgcctacggcggatggcggagcgcatgtgatggttacctatcagtgtcccgtaaatacaacgtggggcacgaacacccttgagctcaggagtcgcacgcttgaggaggcgtttgcctatgaaaatctcgtgtggtgccaaaagaaggagcatcatgaggttggattacgttgggccaaatcctctgcaatgtcgcttgcggaacttgccagcaaaatccatcggcgggtgaagggtgagagcttcaagaagacgaacttcgcgcttgggctccttgctagcaatgatgtgagttgggttgttcccgtctatatccaggatggcctcgactggctcacgaagcatgttgcgatcggtgacagcacaatcgagggcactcctgcgaagctggagcttgcccctgacgcagcccccagtgctgttgaggccgcgaaatga

SEQ ID NO: 79287 - DNA, 1887 bp, Lysobacter antibioticus
atgacgagccgtgctggcaaaccggatacgccggctgatatcgagcttcggtctattcttgacactgacacttcgacgggcttcgtcatggtctcgggcgcgggttcgggcaaaaccacttcaatcgtcaaggcgctcgatcaccttcggaaaacacgcgggccgtaccttcgccagtgtgcaaagaagattgcctgcatcacctacaccgaggtcgctgttagcgaaatatggggtgacgtcggaaacgatccgctcttccacgtttcgaccattcatagctttctctggacggccatcaagccttttcaggtagacatcgcgagctgggtaggtcgccggctcgatcagaagatcgtggacactgaagaaaaggtcgccgccttcacgaaccggacgcatgggaagacgcgagttcaagctgcggccgacatcgagcgctaccgcgcacagaagctggagattgcctctgttgaccgttttacctacggcgtcgggagtgactaccccaaagggatccttgggcatgatgatgtgatcagactatcgaccgagctgatccgctcccagcctcttatcgctagagttgtcggccagaaatttccattcgttttcgtggacgagagtcaagacacggctcccgatgtggttgaagcactcaaggcagtatcggaagcgctgggaccaaagttttgcctcggcttcattggcgacccaatgcagaagatttacaccaccggcgctggcgcgattgagcctctccccggatggaagtccatcgagaagccggaaaacttccggtgccctgtggcagtcctgaacgtcatcaataacatcaggctcggcggagacggcctgacccagacgggcggcaaaacggagttcgttggagaagaccgaaagcccgttcagggtactgcgaaacttctggtcgttcccaaagatgaccggagtgggcgattgagcgccgctcgtcaatggctagctaatcaacatgccgatcctctctggctcagcaatgagccagaggccgatgtgaaggtattggtgatcgctcaccgcatggcagccagtcgtctcggttttggaggtctatatgaggccttccacgacaaaacgtctgaagggttaaaggctgggttcgatgatggctcgcattggtcggtacaacccttcctgaagttcttgatgccgatagtcctggcgaacggagccaacgaacaatttgaaatgatgaacttgttgcgccgcttcgctccctctcttcagcgcgaatacgcgcgcgcgaacgccttgccgacgatcctaaaagagctggacggaagggtgaagaccctcaccgaagcattcggtgcgaactcaactgtcgccgcgttcgaggcgcttgggcatctgcgggatggcaagatgtttaggctggatgatcgccttctcactgcaatggctgagcacaatgcaactgttccgcctacagactcaggcgacaccgcagctttacagaagctgcttcacactccgatgaaggagctttggggctaccggacttatattgaggaacagtcgcccttccaaactcatcaaggcgttaaaggagctgagttcagtcgcgttctaacgatcctagatgacgaggaagggcgccacaatcaattctcatacgggaagcttttcggcatcactccgccatctgatacggacgaatcgaatcggcgggagggcaacgagacgactttcgaccgcacacgacgtttgttgtacgtgtgctgctcgcgtgccggaaaggatctcgctgtgatcttcttcgcggacgatccggcggcggcgcatgccgccatcgcggacctcggactgttcccgcctgaagatgttcatattctcgccccgtga

SEQ ID NO: 79288 - DNA, 1890 bp, Lysobacter capsici
gtggtcgagctgaccaacatgacgttcctgctcggtccaaacggcgcgggcaagacagccgtgctccaggcactcgcccgcatgtttggcctcgatcccgcgcagcggaggatcaagcgatccgactttcacgtcccagcgagcgaagcgccgcaggacgcccctgaacagcgaactctctggatcgaagcggacttcgagtttcccgaattggaacaggatgatgccgatggtaccgcacttccggcggtacccggcaacttcgcgcacatgcaactggtggcagcaggggggcctgcgcaggttcgcttccggctgaaggcggccatcgatcaggacgacgacatcgaagagagcttcacgttcgtcatcagcgaagacgacgacggaaatccaaccgaagagagccgcgtatcgaaacaggaccgtagcgccatccaggtccactacttgccagcacggcgcgaccctgccgaccacatctcctactctgccaacgcgctgctcgggcgagcactgcggtcggcggactggagcgctgagcgcgaggaaatcagcacgctgacggaacaaattggcgatgaacttcgggacaacgcggccatcggcgggatcgctaccgcgctcaccgatcaatggggcggcttgcacaagggaagccactacacaaacccgtcggtctcgttcgggcggaacgagatcgagaaccttctgcggcatctgagcatcgggttcacgcccggccatggcgagaacatcgtggacttcacccggctcagcgacggtcagcaatccctgctctacatttctctggtgctcgccatgcacgatatcggcagcaaggtcctcaaaggcgagctggccgaagcgtttgacatcgacaagctacgccccgcagttttcacgctcattgcgatcgaggagccagaaaacagcttgtcgccccactatctcgggcgcgtcgttaagaagctgacgactttcgccgaggggcaagacagccaggcattggtagcgacgcatgcgccgtctctcttgcgtcgggtgccgcccgagtcggtccgatacctgcgcctgaacgaagatcggagcaccatcgtcaagagcatcgaactcccgacggacgagacagcacagaagtttgtccgcgaaggcgttcaggccttcccggagctttacttttcccgcatggtcatcctgggtgaaggtgacagcgagcagatcgtgctcccccgattgctggaggcccggggcatcctcgccgacgacgcatccatttcagtcgcacccctcggcgggcggcacatcaatcacttttggcggctactgaacggccttgggatcccgcatgtgacgctacttgaccttgatgtcgcgcgctatcagggaggatggggccgcatcaagtacgccgccaatcatcttctgagctattccgacatcgacggcaacgacctgacgcaggaagaaatcgacgacattccgaagtggaactcagacgacgggatcatgcttgacgatctgggctggatcgcccgtcttgaggcgctcggggtctacttctcggcgccgctcgatctcgatttcatgatgatgacgcactaccgggctgcgtaccacgtgaagaaggacgacttggaggagcccgacgaagacacgatcaaggccgtgcttggcaagagccatgacgtgcttgaggggcagtactctaacgagcagcagagctacttcgatgcctaccatcgaaggttcaagctcgacagcaagccaacctcgcacattcgcgcgatggcgaacctggatgacaagaagcttatcgaggacatgcccgatgtcctcgaccgtatattcgatgcggttgaagaaaagctcgcgaacctgcccgaatga

SEQ ID NO: 79289 - DNA, 1662 bp, Lysobacter capsici
atgatcagggccgaacgatggacaccggctgacggtctttcccttgagccgaacgcgctcgcagcggccaaggagatcgaccgcaacctggcgctgaccgccggtccaggcgcaggcaagacggagatgctggcgcagcgtgccgacttcctgctgcgtaccggggcgtgccgctatcccaagcgcatcctggcgatttcgttcaaggtcgatgccagccagaacctcaaggcccgggtccgcaaacgctgcggtccggagcttgctgcgcgcttcgacagccatacgtttcacgcttttgcaaagcgcatcatcgaccggttcaggccggcactgaccggccgggacgcgcttgatccggactacagtgtcggtcctcaccgcatccagcggcgatcaatcaccttcaatgacatggtgccgctggcggtacacatcgtggagtcaagtcagatcgcgcgcaacgcgattcgtcagacctacagccatgtgttccttgacgagtttcaggactgcacggatgcgcagtgcaaactcatcaaggcttgctttcagggtacgactgtccggctgacagcggtcggcgacaccaagcaacgcatcatgggatgggctggggcacttgaaggaatcttcgagagctacgcggaagacttcgaggcccatccgctcaacctctatcagaacttccggtcggagccgaggttgcgtcgcatgcagaacgctatggtgcgcgtcatggacccgcccgctgcacttgacgacgatgaccttccgggcgatgaaggagagatcgaggttctgcggttcgacaacgatgatgatgaagcggaggcgctcgcagatttggtgcgcggctggatcgacgatgaaggcctcaatccttccgagatcgcagtgctggtcagcaagcagcagaacctctattgccagaagctgcgtgccgcgttggatgccaaaggcgtgccgttccgcgacgaggacgcaacgcagaatctggcatctgagccggttgcgaacctgatcgttgattttcttctcgtcgcagcagggcatcggcagcccggcccctttcagcgcctcctcgatcttgtggtgttcggccgtgggttcgatcaggagaacgagtatcgcgctcgatcccgatggaatcgtttcagtgcaagcgtcaggcagcggcttgcagcggaggaggtcgaccttgcagacatcgacgatctgcggaccatcatcggcgagctgctcgacatcgtcggacgcgacgcggtgatcgggctttcgtccgagtacgcgcacggggcctatctgcaacagcagatcgacgcgacgactgatcgggcgcacacactgttgtccgaaggcggggaccagtcgacagccctggcctcgttctcaggcgatcgagccgtaaagatcatgtcgatccacaagagcaagggcctagagttcgatacagttttgatgttcggtgttgagactcagaccttctggggcgatcaggatgccgagcgctctgcctatttcgtcggcatctcgcgcgcaaagcgtcgcttgtatctgacagtctgcgaggaaagggagcggcctgaagaggctaagtactggaaagtgatgcggacggaacatgatgagttcgtcggatacgcgaattcctacctatag

SEQ ID NO: 79290 - DNA, 2109 bp, Colwellia sp. MT41
ttggaaatatcaaaaattcaaatcaaaaacttcaggttattaaaagatttttctttagatcttgaagatgaactgtcgttgattataggtaaaaataatacagggaaaacttccgtattaaccgcgcttgataaatttattaatccatcaagccgtaaagcaattacgctagatgatttcaatgttggattaaaaaaagagctggttgaatatctctccggtagcaaagtgctgcctaatgagaacgactatcaaccgttaggaatagaacttaaaatatatatcgaatatacggagcaagacgatctatcgcaagtccgtttattaataatgagtctcgatcctagtgataataacattgtccttaaatttgaatacaagattggccatgaacaacttctcaagcttaaaggttattatgctgagcagtctgaaaagtttaacaataatcctgagttatttcttaaagagcaccttttagattattttggttctgttcaaaagaaaagccttctattctcagatgaaacagttttcatcgaccttgtaaaagagaatattcacctcaccaatatcttgtcatttgattatattagtgccaaaaggagtgtaacgaataaagaaagtgataaaacattatcacttcaaacagcaaaaatttataaacgaacagacgattctgaagaacaaattgatgcatctgacagatttaaacaaacccttcgaaatactgataaagagttaagtacaatatatgctgacatgtttgatggtttaatcaagaaggttaatcaatttggaggtgtcaatcctacagatactaaacttaaaatagcctcaacgcttcagcaccgtgatttactcgatggtaatactacggtgatgtattctcatgattctcacgatctgccagagcattataatggtttagggtatatgaatctgataagtatgatctttgatattgaaatggtcatggggaagtttcgccgcacacttaaggagaaacctgccgcgattaatctgtttttcattgaagaacctgaagcacacactcatcctcagatgcaatatatctttatcaaaaatataaaatcattattaaaagaaaatcgagaacgtgaagatggtatcactattcaacttcagacggtgattacaacacattcatctcatattgtttctgaatgtgatttcaatgatattaaatacttacgtaaaaataattcaacctacgacgttaaagccaaaaacctcaaggcacttcaggatgaatataaatcaggagatgatattgaagatgctaaattaaaaagagattttaaatttttaaagcagtacctgaccttaaatcgagctgagctgtttttcgctgataaagccatttttattgaaggagatactgaaagaatattagtcccagccatgatgaaaaaaattgaccaagagtttagctcccctgatgaaacacccttattgtctcaaaatatttcattggtagaggttggtgcttattcacaaatatttgagaagttcattgactttattggtattaagtcgttggtgatcaccgatattgatagccaatacacacaagagatcgttgacgggcagaagaccaagaaaaaaacgattaagtgtaagccgtcagaccctttagcaaataaaacttcaaatgcatctttaaagttcttctttggtgatcacgatttagatttttataaaaatttatcaatcgatgaaaaggtcttaagaaaagttgatacccaatggattcaagatccagatggatattttcttatggtttaccaaacagaagaatcaaggtaccacggacgcagctttgaagatgctttctttagtttaaataaagcattgttaggtaatgatgcagaaaatttcccgtcattaacgaaaaaacatttcaacaaatttgttgatgatgccgatggagatccatatgtatttgctgaaaaggcggtaaatagcaagccaacacttgcgattgagatactgctgaatagtgaaaaagttggtgaacatgaatttagtaattggcaagtacctagctatatcaaggaaggattattatggctacgcaagagttag

SEQ ID NO: 79291 - DNA, 1929 bp, Colwellia sp. MT41
atggctacgcaagagttagatatatcccaacttacgtctgaatctcaacaagttattcaattaatcaggcaaggccatagcttccttttaagtggtggtgcgggtagcggtaaaacctactctcttgttgaagtattaaaagctgtattggttgaaaagccaacgtcttcgattgcttgtattacctatactaatgcagcagtgcatgagattgaagagcgtgttcaacatgaccagcttcatgtatcgactattcatgattttttatggcgtaatattaaacattttcagtgtgagttaaagtgcactttgatcgaattgatgaatgatgatgagcagccgaaaataaaatcacctgatggagagactgttgcggttgatttttttaatgaacttgaaagtgacattaaatataaagaatttgtaaaaattaaagatgggtgtatctctcatgatgaggtgttaattctagcttgtaaaatgtacgagaaatatgaaaaactttgtacgattactaaagattcctacccacttattctcgttgatgagtatcaagatacagacccaaatgttgtcaaattattacttgaacatttaaatcaatctccaaaaaacaacattgttggttttttcggtgatgcgatgcaatctatttaccctggcagtgtcgggaatttaaatgaatatactcaacaagttccaccgcgtgttactgaagtcaaaaaagtacaaaaccgacggaaccctcaactcgttattgatctcgccaacaaaataagaactgatggtttattgcaagagccatctaaagatattaatgcccccaatatgaatgcagatggcacagcaaagcaagggaccgcacttttcctatattctaataatgatgatttagatgttgttcgccataacttggcttgggattttgatgattctacgaagactaaagagcttaacctaactcataacctaattgcagggaaagcaggttttgatgatttaatgcgtatttacgataaagataaagttttagaatttattaagcgtgttaagggctatatcaaaaaggatgataataaaatagaaactgaagggaaaacatttaagcaagtatatggggaattaggtggtttaaaagatgatgttcctaaactactagcgcctaccaaaggacagcgagaatatatagatgctaaccctcaagcatatcattttgcattcgagcagccttacgatgaaatatccaaactctacattgataaagatatgttgcttgatgacaaaaaaaacaatgcggaagacttaagtaaacctgcctctaaaagagatgatttgattaaacatttatttaaaatagaacactgtattcatttgtataaagaaaaacgattcaatgagttttcacgaataactgatttttcaattacttcagtagaagataaaaaatgcttaaaagaatcaatggatgcattgattgaagtagaagaacgatctattggcgatgtgataggctttgcaagcacactgaaccttgttgttgtagatgataaattagaaaggtttcaaatatctagaaattatgtttaccaacaaatctgtcaaataccttaccaacaatttagagatttatatcaatatctagaaggttatactcccttttcaacgcagcataagactaaaggtgctgagtactctaatgtacttgtcgttttagataatggtaagtggaatagttacaattttaactatttatttgaaggtaatggcaacgataatgtacgtcataaaacagaaaaaatattttatgtttgttgtacaagagcgaaagaaaatcttgctgttttttttcatcaacctagtgctaatgttatcgctaaagccagtgaatggtttggtgttgataatattgttaatttggatgagatatag

SEQ ID NO: 79292 - DNA, 2139 bp, Pseudomonas aeruginosa; identical to SEQ ID NO: 72908

SEQ ID NO: 79293 - DNA, 1800 bp, Pseudomonas aeruginosa; identical to SEQ ID NO: 72909

SEQ ID NO: 79294 - DNA, 2424 bp, Pseudomonas aeruginosa
atgaagttacaggcatatcggctgcagaactaccgccggctgcgcgatgttgtcatcgagctcgatgacgaaatttctatctttgtcggtgccaacaacagcgggaagacatccgccgtccaaggcctgtactcaatgcttcgcggcgaagtgaagaagttcgagctctttgacttcagtgcggcgctgtgggccgagatcgatgcggtcggcaggacgccccctggcgatgaggatgcgcccaaaaggttaccgtccatactcttggatctctggttccgcgtcggtgaagacgacctcgccactgcgatgtcgctgctgccgagcactgagtgggacggcaagtgcgtcgggatccgggtagcgttcgagcctcgggatgcccacgagctcgtctggaagttccatgaactacatgagaaggccaacaacgcagctgtcgcgcttgcggccaagcgcaaggccgccggggagcaagctgtggaggcgggcgcggaagacgcggctgcggtggtggccgatgccggcgagtacaagccttggccagaaagcctgacgaagtacctcacaaaggaactgagcaaggaatacaccttccgctactacgtgctcgatgagcgggcttttgtcggctatcaggcaagggaggccgactacgagccgctacccctaggcaaggagccgggcggtgcagccattctcaagtcgctggtgagggtcgacttcctgcgcgcgcagcggcacctcgatgacccagatgccggtagctctgatcgcgcagagagcttgtcgcggcgtctgagcaggttctatcaccgcaacctggagaagcgtggcgacgaccatgcggctctcaaggcgctagatacctcggagaaggagctgaacttccacctgaaggaagtcttcaatgacaccctcacgcgcctggccaagctcggctatccgggcgtcaacaatccggagatcgtgattcgggcggccttggatccgaccactgtcttggggcaagacgccaaggttcactacgtgatcccgggcgtagcttccgcccaactgccagacagctacaatggcctggggttcaagaatctggtctacatggtggttgagctgctcgacttgcacgagcagtggaaagccgaggatgacaagcgagctccgcttcatttggtcttcattgaggagcctgaggcgcatctgcacgcgcagatccagcaggtcttcatcaggaacgttttgcgcctccttgaggatgctaacgatcacgcgactttgttccacacgcagctcgtcatcaccacgcactccccgcacatcctctatgaacgcggattctcgcccattcggtacttccgccgcgtcaacgaccagttgggccatcacacggatgtgcgcaatctgtcgctattcaaaacgggcgcgtccgacgctccagcgcgcgaattcctgcagcggtatctgaagctgacgcactgcgatctctttttttccgacgcggtgatattggtggaaggcaacgtcgagcgtctgctcctgcctgcaatgatcgagttggtggccaagcgcctgcgctcttccgccctaaccatccttgaagtcggtggtgcgttcgcgcatcggttccaggagctgatcgccttcgttgggctcacaacactggtcatcacggatctggacagcgtgacggtcaagacggacgccgagaaggccgccgcgcaaggcgcaggcgctgagggcgccgttgacggagatgacgaggacgaggacgacgacctgaagcccttcgagcttgaagacgacgacgaagcagaaccgagtggcaagaagaagtccaagaagcgtggcagcacctgccatgcacacgtggaaggtgccgtcacgtccaaccaaaccctcatcagctggatcccgaagaagcggtcgatggcagagctctgggaagtcacggcggagcaaaagacgctgtcgctggctgaggattccagcgctggggttcgggtagcttaccagaccaaggtttcggtgacggtgggtgcgacgacatcacagctctgcggccgcacacttgaggaggcctttggtcttgagaacgcggactggtgccaggctgaggcaaaccggtcggtcggcctcaagctcaagcgcgcaccgagcagccctgaagagctggctgagaagttacacgatagggtggtcggcaagaacttcgacaagacccgctttgcgctggaggtactcgcaagcgggccgctcaatggctggaaggttcccgcgtacatcgccgagggcttggcctggctcgaagccaaagtggcccacgagcttgaggcggatgctgccatcgccaccgaggtcgcgactattgagccgactacagccgatgttgtcgctatcattgttgacccggggcagacggcatga

SEQ ID NO: 79295 - DNA, 1932 bp, Pseudomonas aeruginosa; identical to SEQ ID NO: 71739

SEQ ID NO: 79296 - DNA, 2139 bp, Pseudomonas aeruginosa
atgcatatctccaagctcagcctggttaactacagaaacttcgccaacaccaagctcctgttccagaagggtatcaataccatcattggcgaaaacggatcaggtaaaacgaatctgttccgcgcgatcaggctgctgctcgatgacaacatgattcgatccgcctaccggttggactcaactgactttcatagaggtctaggaaagtggcaaggtcattggatcatcattagccttgagttcgaggagatctcggctgatgaagcagtccaagccttgttccggcatgggacgggcggtatcgacgatgaggcaatcggcaaagccacctacaacctcatcttccgcccaaagaaagagatcaggcttcgcctttctcaattggacgatggcgatcacgctggtctcgctgcggtcctgaattctgtcactctggacgactacgaaaccatcttcacgggccgaagcgacgctgacttcaacgacgaggctttctacaaggaagtggtcggtgacttcgagaacgccaagttcaacgaagaaatcgagtttcccgccatcggcgccaagattccgagcgtgctgtccgtttccaaggagatttccttcacctttgttcaggcacttcgagatgttatatcggagtttcacaacaacaggaccaatccacttttgtcactgctcaagggcaaaagcggtgatatagatccagtggcattccagctcatcaccgatggggtgaaggctttgaatgattcgatcgaggcattgccggacgtacagtccgtccggaccgatatcagagacaccatcaaggacgcggctggcgaggcctactctccctcatccttgtccatcaagtctgatctgcctgatgaagctgacaagctgttccaatcgctcaagctgtttgttggtgaatcgggagaaggccacgaagggccaatacacgagttgagcttgggtggcgcaaacctgatcttcctcaccttgaaactgctggaattcaagtatcagaaggccaagcagtcgatcgccaacttcttgttgatcgaagagccagaggcccacattcacacgcacattcagaagacgctgttcgaccggcttcagtacgacgacacccaaatcatctactcgacccattcgacgcatatctcggaggtcagcaacgtccagaacgtaaatattctcggccgggagcgtgatcgatgcgatgcctaccaaccgtccaccggcctggccccggaagagattggcaacattcaacgctacctggatgcagtccgcagtaacctattgtttgccaagagtgtcattctggtagagggcgatgccgaagaaatcctgatcccgattctggttaagaaggtgctgggcatcagtttggatgaactcggaatcagcctgatcaacatccgaagcactgggttccagaacgtagctgttctcttccacgacgagcgaatccgaaagcgatgcagcatcgtcacggatctcgacaagtccatcattgacacaatgcccacagggggcgatcccgagaaggtgcttcggcgcaagaaaaagtaccaggcctctcaggagaagggcatcgccaggaaagcgcttctggatgagtcgtttaaagacaatccatgggtttcgccattctttgcaccgcacaccttcgaggttgatttcgttgctgctggcaatgcgaacaaagtagttggcatcctacccgatatctataaagacgcgccgaccatcgcaatggccaaggcagaacttgagtcaccggaaatcgccctgtacggccagcgcgtgctgaccatggcgggtagctatgggaaagggtggttcgccatcttgctggggaagaagctcgatccacaaacagctatcccgtcgtacatccttgatgccattgccttcgcgcacccagtagtcaaaaaagaagtctggttcaatgtgctgagctatcgcgtcaactatatcgatgcggaggatcttgtcactgcatcggcgttctttgatggattcagggccaaattactggcattcagaaagggagacatcgatttcgttggcatcagaaacgaaatgctggccacttttcctgatgatcgcatcaacgacgtcctcaaggtcttctag

SEQ ID NO: 79297 - DNA, 1800 bp, Pseudomonas aeruginosa
atgttcgagtggaataaggatgatctgaatccggagcaggaagctgccatttttgagcctgggagcgtttttctcatcgcatgtcctggcagtggaaagactcgcacactgacctacaagatcgcctatgagttgtccagactgaaatcgaacaagcagttcgttgtcgcgatcacgtatacgcaccgcgcggccgacgagatccatgagcgcatcgagggccttggggtggatacatcccgactatggataggaacgatccactcattctgtcttgaatggatactgaagccctatggcatctatcacgaagcattggaacggggctaccgcgtaatcgatcagcatgagcgcgagaagattttggaagctctgtgcaggccctaccaaaagccaaagataactttctgggattgcgaattttatttcaccgaaactggctatgtgctttcctgtccgcaaacgtggaagcacgccggtttgcacgcgatattgggacagtatttcgagaagctgcaggaaagccgacagatagactttgaactcattctctactatgcgtatcaattgatcgccagccgccctgcgatcagcctccttctggggcagttgttctctttcgttctgatcgacgagtatcaggacacgaagcgaattcaatattcgatcgtcacggccatcttgaaagctagccaaggtgccaccaaggctttcatcgtcggcgatccgaatcaggcgatttaccagtcgctcgggggatacccgattgccttcgatgatttcaagacgatggctggcattggtctgaggaagcttgaactgtcgaagaactaccgatcctctgagcgcatcatcgactattttgggaactacaacgtccacgatacgcgcattgaagctgcatcaaatgaaaaagcttatccgagccttgtttcgttcgatgccacggtgaacaagacaggcctggaagccgagttgatccgactcatccgtttcaacatcgaaactgtcggtatcgcgcctcacgaggtgtgtgtgcttgcacctcagtggacgcatcttgccagcatgacacgccgtctgtgcgcgagcatgcccgagtattcgttcgatggcccgggtatggttccgtttgcgcgcgacactgagaatttttggtacaagctttccaagatcgcactcacccaggcatcgccagggatgtatgtgcgcagacttcgttgggccggtgaaatccttactgacttggaggcggctggtgccagcgtctccaagctcacgcgaaagtcgttgttgagagaatgcaatgcgatcaagatcgatgagacggatggactcacctacctcagcacattcttcgagaggctgttttcaagtttggccatcgattttcgactcttcaccacccttcgggagcatcacactgcgttcttcgacagttcgcaagcgcgggttgcccgattgaaaagtgagggaagcgaattcatcggagatatcggaactttcaggaaggtttttcagagccggacgggcatcactatctcaactatccacggcgtgaagggagcagagttcgatgtggtgatcgcctatgccttgttggaggacatggtgccgcacttcaatgatccgaacggccaagaaagtgccatgaaactcctatatgtcattggctcgcgagcgaggaagaacttgcacctaatttcggaacgagggcgtattcgccagtattctggcgaagagtatcaagtcacgcgcaagctcgccgcatgtgattttgggtacgatcaagttccgtag

SEQ ID NO: 79298 - DNA, 1905 bp, Pseudomonas aeruginosa; identical to SEQ ID NO: 74222

SEQ ID NO: 79299 - DNA, 1674 bp, Pseudomonas aeruginosa; identical to SEQ ID NO: 74223

SEQ ID NO: 79300 - DNA, 2139 bp, Pseudomonas aeruginosa; identical to SEQ ID NO: 79296

SEQ ID NO: 79301 - DNA, 1800 bp, Pseudomonas aeruginosa; identical to SEQ ID NO: 79297

SEQ ID NO: 79302 - DNA, 2424 bp, Pseudomonas aeruginosa; identical to SEQ ID NO: 71738

SEQ ID NO: 79303 - DNA, 1932 bp, Pseudomonas aeruginosa; identical to SEQ ID NO: 71739

SEQ ID NO: 79304 - DNA, 1905 bp, Pseudomonas aeruginosa; identical to SEQ ID NO: 74222

SEQ ID NO: 79305 - DNA, 1674 bp, Pseudomonas aeruginosa; identical to SEQ ID NO: 74223

SEQ ID NO: 79306 - DNA, 2139 bp, Aeromonas veronii
atgcatatatccaagctcagcctggtcaactaccggaactttcccaacacgaagctgctgttccagaagggtatcaacactgtcatcggcgaaaatggatctggcaaaaccaatctctttcgcgcaatcagattgctgcttgatgacaacatgattcgctctgcctaccggctggagcataccgactttcatcgcggcctagggcgctggcagggacattggatcatcatcagtcttgagtttgaggaaatctctgcggatgaatcagtgcaggcgctcttccgacatgggacgggcgtaattgaggaagaggcgaacggcaaggccacttacaacctgatctttcgtccgaagaaggaaataaggctgcgactttctcaattgaacgatggtgatcaggcaggcctcgacgccatcctgaacccggtcaccatcgacgactatgaaacgattttcacaggtcggagtgaagccgacttcaacgacgaggccttctataaggatgtggtcggcgacttcgcgaatgttcgattcaatgaagaggttgaatttcgtgttatcggcgcgaagattccgaacgtgctgtccgtctccaaagaaatttcgttcactttcgtccaggcgctacgggacgtcgtctccgaatttcacaacaaccggacaaatccgctcttttcgcttctgaagggcaagagcggcgatatcgaccccgtggcgttccaggctatcaccgacggggtaaaggcattgaatgactccatcgaagcgttgccagacgtgcaggtcgtccggacggatatcagagacaccatcaaggatgcggcgggtgaggcgtattcgccgtcttctctttctatcaagtcggatctgccagacgaagctgacaagttgttccagtcgctcaagctgttcgttggcgaatcgggggagagccacgaaggaccgatccacgagctgagccttggtggagcaaacctgatattcctcacgttgaaactgcttgaattcaagtatcaaaaggctaaacagtcgatcgccaactttctgcttatcgaagagccggaagctcacattcacacacatatccagaaaacactgttcgacaagctcaaatacgacgacacacagatcatttattcgacccattcgacgcacatctctgaggtcagcaatgttcagaacgtgaacatcctcggcagagaaggtgatcgttgcgaggcataccagcctgcaattggcctaaacccagaagagatcggcaacattcaacgctacctggatgctgtccgtagcaacttgttgtttgccaagagcgtcctcttagtggagggcgatgcagaagaaattctcgttccgatcctgatcaagaacgtgctaggcgtcagccttgatgaactcggcatcagtttaattaatatccgcagcactggatttcagaacgtcgcggttcttttcgatgatgcccgaatccggaagcggtgcagcatcgtcaccgaccttgacaagtccatcattgacacaacgccggcggcgggagactccgaagggctgctccggcgcaagggcaagtatcaggcatcccaggaaaaaggggtcgccaggaaagcgttattggaagacaccttcaaagataacgggtgggtttctccattctttgccccccataccttcgaggtcgacttcattgccgccggcaatgcgcgtaaggtggtcggcatccttcctgatgtctacaaggatgcaccaaccatcgcgacggccaaggcggagctcgaatcagcggacatcgcgttgttcggtcagcgcgcattgaccatggcggacaactacggcaagggatggtttgccatcttgctgggaaagaagatcgatccgcagaccgccattccgaagtacatcttggacgccatcgcttttgcgcatccggtggtcactaaggaagtctggtttaacgtgctgagctaccgcgtgaactacatcgatgcagaagatatcttcactgcgtctgccgtattcgacgactttagggccaagctgctggccttccgaaatggagacatcgacttcgtcggcatccgaaacgagatgcttgccacgttcccagatgatcgcatcaacgatgtactcgcggtgttctga

SEQ ID NO: 79307 - DNA, 1800 bp, Aeromonas veronii; identical to SEQ ID NO: 72909

SEQ ID NO: 79308 - DNA, 2139 bp, Aeromonas veronii; identical to SEQ ID NO: 79306

SEQ ID NO: 79309 - DNA, 1800 bp, Aeromonas veronii; identical to SEQ ID NO: 72909

SEQ ID NO: 79310 - DNA, 2139 bp, Aeromonas veronii; identical to SEQ ID NO: 79306

SEQ ID NO: 79311 - DNA, 1800 bp, Aeromonas veronii; identical to SEQ ID NO: 72909

SEQ ID NO: 79312 - DNA, 2139 bp, Aeromonas veronii; identical to SEQ ID NO: 79306

SEQ ID NO: 79313 - DNA, 1800 bp, Aeromonas veronii; identical to SEQ ID NO: 72909

SEQ ID NO: 79314 - DNA, 2139 bp, Aeromonas veronii; identical to SEQ ID NO: 79306

SEQ ID NO: 79315 - DNA, 1800 bp, Aeromonas veronii; identical to SEQ ID NO: 72909

SEQ ID NO: 79316 - DNA, 2139 bp, Aeromonas veronii; identical to SEQ ID NO: 79306

SEQ ID NO: 79317 - DNA, 1800 bp, Aeromonas veronii; identical to SEQ ID NO: 72909

SEQ ID NO: 79318 - DNA, 2139 bp, Aeromonas veronii; identical to SEQ ID NO: 79306

SEQ ID NO: 79319 - DNA, 1800 bp, Aeromonas veronii; identical to SEQ ID NO: 72909

SEQ ID NO: 79320 - DNA, 2139 bp, Aeromonas veronii; identical to SEQ ID NO: 79306

SEQ ID NO: 79321 - DNA, 1800 bp, Aeromonas veronii; identical to SEQ ID NO: 72909

SEQ ID NO: 79322 - DNA, 2139 bp, Aeromonas veronii; identical to SEQ ID NO: 79306

SEQ ID NO: 79323 - DNA, 1800 bp, Aeromonas veronii; identical to SEQ ID NO: 72909

SEQ ID NO: 79324 - DNA, 2139 bp, Aeromonas veronii; identical to SEQ ID NO: 79306

SEQ ID NO: 79325 - DNA, 1800 bp, Aeromonas veronii; identical to SEQ ID NO: 72909

SEQ ID NO: 79326 - DNA, 2139 bp, Aeromonas veronii; identical to SEQ ID NO: 79306

SEQ ID NO: 79327 - DNA, 1800 bp, Aeromonas veronii; identical to SEQ ID NO: 72909

SEQ ID NO: 79328 - DNA, 2139 bp, Aeromonas veronii; identical to SEQ ID NO: 79306

SEQ ID NO: 79329 - DNA, 1800 bp, Aeromonas veronii; identical to SEQ ID NO: 72909

SEQ ID NO: 79330 - DNA, 2139 bp, Aeromonas veronii; identical to SEQ ID NO: 79306

SEQ ID NO: 79331 - DNA, 1800 bp, Aeromonas veronii; identical to SEQ ID NO: 72909

SEQ ID NO: 79332 - DNA, 1719 bp, Pseudomonas sp. TTU2014-096BSC
atgaaaatcgactacgtctatctgaatcagtaccgaaacttcgctgacgcgcacatcaacctggctaagaacagcttagtgattggaagcaacgacgttggcaaaacgaatatgatccatgcgttgcggctcttgctggacaagagcttgtcggacgcagagatcgaaccgacgacacatgatttccattgcgcacaagacggcacgcaggccgactacttcttcattcgggttgcgttctccgaagtaacccaggacgcagtgctttcccagctcaagggccttgtcagtgctgacggaaaatttttcctagagttcggcgccaccagggcaaaccatagttacgagatcgctgcaggctatgacctcgcaacgatggaggttattcctagccgctactatctgaagtacctgcatctgaagtacatccattcccagcgtgaccttgtgcgatatattcgctcggagaagcggcaccttctgcgtcttgcgcaggagtcacgcgaccaggttcaagtggatgccgataccatccagctgcaggcgctcgctgggctgctggagtctgtgaacgacggggtgaagaacctgcactacgtcgccgaagcgaccaaagacctcaacgatgaactgaaggcgctctcccaccatcacgctggatacaacgtgtcgctggataccggctcgatcggtatcgagcagttcatcgaacagttggagctgggggccagcaccaacggttcgcgtgtaatgctcggaggtgacggccgcaataaccaaattctgctggccttgtggaaggccaagagcgtgcttgaacacgaccaagacagcgaggtggtgatctattgtgtcgaagagcccgaggcacatctgcatcctcaccagcagcgcaaactagcgagctatctcatcggtgcgttgcccggccagaccatcgttaccacgcattctccgcagatcgctgcaagctatcgccccgactcggtcgttcgcctgctgcgcaacaacggagcaacccgagcggcaagccaaggttgctctgattgcatcgacagcgcatggacagggcttggctaccgaataagcatcctacctgcggaagcgtttttcgcctcagcagtcatgctggtcgagggaccttcggaaatgctgttctacgctgcgctggcacgtgctcatggctacgatcttgatcacagcaacgtatcaatgctgtctgtcgatggtgtggcgtttgaggtttacaagcgtgtgttaaacgctctggaaattccatgggctgtgcggaccgacaacgacatctccgatgttctgctcgggtcccgaggagcgcaagtggtgtggcgaaacctcgcgggtatgaaccgcgctctttcgttggcaggtatgcctcttctgcaacaccgcccgcagccatacgatcatctggcctcgttgactgatggcacttggcaagcggtcagtgcagccgtcgccccccatggcatcttcctttcgcagatcgatttggagaacgacattgccgccgagcttccgacactgttgaacgggttcaaaggtcatgcgttgcctcaggcaatctcttacctgcaaggcaagaaagccatccgcatgcaggagtttattgaccactgcgggactcggcttagcgcgctgcccaatgggcatctgttgaggccgctgatccattgtatgaccgctgctgcgcaggtttag

SEQ ID NO: 79333 - DNA, 1629 bp, Pseudomonas sp. TTU2014-096BSC
atggctacattcacgcctagtgcggagcaagcccaagccattcaatgtacgagcgatatggtgatagtcgcccgtccaggcagtgggaagactagcgtcctgtcatgcaaggtcagaaaccttgttgcggggttgcgtcgccaccaaggcatcatcgccatctccttcacgaacaaggcgagcgatgagttggagagtcgttgtaaagctgatgctttcgacgtgaagagttctttcttcggtacgatagatgatttctgccttcgcgagatcgtgtttccgtttgcacggcaattgatgcctatgcccgctacagtcaagacggccaagctcagggagttgcccgaagcggtggtaggcatgcttccggcaacgccaatccaggacggtaccattgctaacacggccgagttcctgccgttcctacaggcggcactggctcaagggatcgtcccgcttgaagctgtgggcatacttgcttgctacgtagtcaaacactcccccgcatgtaggaactacctcgtagcacggtattgcgcggtgtatatagacgagtatcaggacagcggatacttccagcatcagctctttttaaagctcaagtctctggggttgaccgctgttgcggtcggagacagtgatcagtccatttatggattcgcgcacaaggattcgaggcatctgatggcacttgcgctgcctggcagcggctttgcgtactttgccatcacaaccaatttccgcagccatccgtccatcaacaactttgcacttcgcctgctcgacccaaatcaccctattacgccgacgagcgatatgcgtgtgttaatcaagacggtcgacggtgaccagcgagcgataggcgcctggctgaatactgccattccccacctaatgcttgcttatcaagtgacctctgcaagcagggttgccattctgtgccgacatcagcactcagcgcgcttgattgcagatcatctgggacttgcccaccatcttgtcgaagagagccctttccagactgcacccgcagccgaggcaagtcttttctcggatgtgcttaagttgcgcttcgaccagcagttgaccgcagaggcactgattgagcagcccggtgtgcccaagctagccgctaacgaacggcgtatgctgcgccgtgcgctattaaattgccgatcttgtttggttagcgacctcgttgcgaccgttttgaatgccgccacacgcctgctggggcagcagccttctgcggaaggtgcgatggagcttggggtcgtttgcggagatcccgacaagctgcgtagatttaaaagccccagtcgcgatgctgttcagatcatgaccctgcacaaggcgaaaggattggagttcgacctcgttttccatgccgatctctacgatcacgtgatcccgacacgtagttatccggcaggatcgtatggtcaggttatcttcgagaatgaggcccaatgcctaaacctgcattatgtggggatcacccgagcaattaaggcttgcgtgttgatgacgtcgagctttcgcatcaacacgcaaggagctgttaagaacggtgctccatcgcagttcattggcagaaacggggcgaacgctacgcccatcgtttggtaa

SEQ ID NO: 79334 - DNA, 2064 bp, Peptoclostridium difficile; identical to SEQ ID NO: 73604

SEQ ID NO: 79335 - DNA, 1287 bp, Peptoclostridium difficile; identical to SEQ ID NO: 73609

SEQ ID NO: 79336 - DNA, 2301 bp, Paenibacillus sp. IHB B 3084
atgcatattgagtgtgtagagattcaaaattttaaaaaattaaaatcttgtcgagtagaatttacagacaaaactacaatatttgtaggagcgaataacagcggaaaaacttccgctatggatgcattaagaaagtttttagataaaaaaagtgactttactataaatgattttacattatcaaattggattgagattaatagaattggagagcgctggttgtctaaatgtggggaaacgactgattttcttatggaggacatagaaaaactaatacctactttggatgtgtggttacaagtatcagaaaacgaaattcattatgtaactcatttaattccatccttagattgggatggaggattactaggggttaggttaagactggagcccaaagacattgagtatctgtataaagattttgttgaatcaattaattctgcgaaagagacgctgtcagctgcaaagtctacaagctcgttttccttgtggccaagaaatcttaaggattatctaagtaaaaaatttcatacacattttatagttagagcatacattcttgatcctagtaaactcttaaatattgatcctgaaagtggtctagcacgacctcaaattttgccttttgatagtgatcctataaatgaagacccatttaagaaactctttttagtacattatattggtgcacaacgaggattttctgattcagctaagacaagtgaagaagatgaatctaccagtagtctagtcggggatctctccacacaactgcgtagatattataatactcacttgaatccaactgaatcaccggacccaactgatattgatgctttgcaagctattgaatcagctcaggatatttttgattccaagctacgcgatggttttgaaaatgcacttattgaactgcagagtttaggttaccctggtttttccgatcctaagataactatttcaacaaaattcaaaccaattgatggtcttaaacatagttccgccgttcaattcgatctaatgccggagaataaacaatttaaggaaatgcatttaagacttcctgagcattataacgggctaggttaccaaaacttgatatcgattatttttaaaatgatgcaatttagagatgaatggatgaaggtgggtaaattagccaagagtactccgagcactaagaatgatttttttatacctccactacatattgtattggtagaagaacctgaagcacatcttcatatacaagttcaacaagttttcattcgtcatgtatatgatattttatgtaataatgatcgtttaaaagggcaagacttctttaaaactcaattaattgtaagcacacattcaggacatattgctcatgaaatacccttttcaagtttgcgttatttccgtaaacaattttcgttatcagataatgaagtcccaatatcaactgttgttaatctctcgaatgtattcggtgaaaataatgaaacagaacgttttgtaactagatatcttcaaataactcattttgacttgcttttcgctgatgcagccatattagtggaagggccaactgaacgaatgctgattccgcattttattcgaagacattttaacgtattgaaccaaaaatatatttctttattggaaattggagggagtcatgcccacactttaaaacctctaatagagagcttgggtttgacaagtttaattataactgatttggattcaatagatcgtaaaagtaaattagctaagcctcctcttcggaacaaaagatatattactggaaatgacacgttaagaacttgggttccatgtagaactgaaatcgatgaattatttgatttaaagtgtaatgaaaaagtaaaaagatatcaaagggctggtttctcaataagagttgcttatcaatatcccattaagattttaatggttcctgatggacccgaggttgaggctcttccgtatacttttgaagatgctttagttttcgaaaacttaacattatttaaaagtcttgaaggaactggtttaataaataagttcaaaaatgcgattactaaaaaagagacaattgctgggttaggcaagcaattttttgatgatttaagaaaagggaaaaaagcggagtttgctctccagctaatttatttagaaaatcttaaagatatcaaagtaccaaagtatattaatgaaggattggcttggctagaggaacagttacaaaagaaacaaccggatagtattattcatcagaattctgttgatattttagtggaagaaatggtgatgaactaa

SEQ ID NO: 79337 - DNA, 1884 bp, Paenibacillus sp. IHB B 3084
atgaacgaaatagaggagaataaagacaattgtatagataatcatgtagatgaagaaatcagtagttgtttgaatctaaaagagttgaggagttttttcttattcgcaggagctggatcgggaaaaactaaatcgcttgtatatgctctgaatcaaattcgagaaaaatattatcatcaactgcagcatagaggacaacaagtatcagttattacgtatactaatgctgcatgcaatgagattagtcgcagggttgattacgaccacttatttaatatttctactattcatgcatttatatgggggttgattaaggggtttgatgcagacattagggactggctatataccaacttacaatcacaaattgaagatttaaaattaaaacaagagaaaggacgtatgggtaccaaaacgtttattgaacgccaacaaagtatagaggcaaaggaaaaccgaattcaaaatattaaacatattaaaaagttcacttataatcctaatggccttaatcaagaaaaagcatctttaagccacactgaggtaataagcataggagcttattttataactaacaagacgttaatgcaaaaaatcctaactaatcaatatccgatcttatttatagatgaaagccaggatactaataaagatctaattaatgcactgtttgaagttgaacaaaaaaatatcggtgttttttcactaggtttgtttggagatacgatgcaaaggatatattccgatggcaaagtagatttaggagtggatttaccggaaaactggaagaagcctgtgaaaaaaatgaaccatcgttgcccaccgagaatcattaatctgttaaataaaatacgttttacagttgatggacaggaacaaaaggcaagaacagataaggaagcgggttttgctcgttttttcatatttccttcaacggctgaaaaaggtaaggctgagaaaatggttgcagatagaatgtcagaaattactgctgataaagaatggtctagtatcgatgcaaattatacatctctaattcttgaacatcatatggctgccaatcgactaggttttttggagttttttcggccactttaccagatagatagattaaggacgggattattggaaggtacactttctgatttatttttatttacacaaattatattgcctatagtagaagcaaataaaattggagataaattcgccatagctagtgttgtgagaaaacattctcctctactaaaaatagcaaaaaacgaagttggtcaacagttaaaaatcaaaaaggctcaagaagcgattaatcagttactctcactttggaatgcagatgtagagccacgttgcattgatgtcttacaatgtgtggaaaaattaaaattatttaatattccagacactttttatccgtttgttaccaatagtaaatatgatcagacgaataaagaagatataaaggaggaaaatgaatatagctctatggaagcttgggctgaatgcttaaatgccccctttagccaaatttcggcatatgattcttatataaatggtaagttgaatttcatgactcatcaaggagtaaaaggcctcgaattcccacgtgtactagtaattattgatgatagcgaagcgcgtggctttctgtttagctatgaaaagttattcggggtaaaagaaaaaactaaaacagatatagaaaatgaatctgtaggaaaagatacaagtattgagcgaacaagacgtttattttatgttacatgtagccgtgcagaaaaaagtcttgctatcttagcatattcagagaatccagaactagtcaaaatgcatgtattaaatgagaaatggttcaaggaagaggaggtcgaagtttttctatag

SEQ ID NO: 79338 - DNA, 1962 bp, Aeromonas schubertii
atgaaaatagagaagataaaactacagaattttcgttgtttcgggcatgaggtggtcgagctaaatttcgaagaagaactgacgatacttgtcggcggcaacggttctggaaagacagcaatgctgcaagctgtgtcccggttgtttggtacatcaccagcgcagcggtcggtacagcgtcgggattttcacatacctattgaccggcaggagctgcagtctggcgacagtctgtttgtcgaagcggtactttccttccctgaactggaagagcaagacgcttctcctcttgatgccgttccggagttcttcaatcagatggcagcttccggtgagggggagccccttaaggcccgggtacgactacaagcaacatggacggatgacggtacgccggaaggagcaattgaagaggatatacgctggataagagtactggatgataattttgaatgggatgattgttccagggttcaggctgtagagcgctcctcgatccagtttatttacttacctgcaaatcgtgatgcgacgactcaggtgaccgctcttctcaaagggcggttatggcaggctgccaaatggtcgacggcatttagggatgcaagctctgataatgccggtcagatccagagcagtttcgaggaagaggagccgtcgaagtttctgctggagcgtctttcgaagcgttggcaacaggtccatgaagctgatacagacactaagccgcgcttaaggctcatcgaaaaccgttttgaggagcttgttcgtaaagccgaattcacctttacgcctgatgaagaaggtcaggagcgccgtttgtccgagctgagtgacggtcagcgctctctgttccatatcgccctcaccgcggcaacgctagaaagcgagcgggaagctttttctttgcctgctgaggacagctcatttgaacaggataagttacgccgtattcacttgacgattcttgccatcgaagaaccagaaaacagcctgtcaccgttctttttgtctcgcatcatcaaacaggcgagagagatcggcacactgccttccgcgcaggttctgctatccagccattccccggctatcttgagccggatagagccggaggaggtgagatattttcgtatggataggagtgcccggtgctcatctatccgtgagcttaccttgccggaagatggtaatgaggcgaacgtttacgtcaggctggccgtaaaagcatatcccgagctttattttgcgcgatttgtaatcctgggtgagggagactcagagcgagtcgttattccgaaaattgcggaagagatgggggtttcccttgatccatcattcgttcctgtcgttccactcggtgggcgattcgtagagcatttttggcggctgctgaatgatcttgagattccacatgccacattgcttgatctagatttggggcgcaggcatggtggggcgaacgccatgaggagttgtcttcagaatctggctgatattgggagcgattgggggagcagaagtcgtgctagtgctgttcagctttccgaccaacagctttataacgaagggccgcaaggtccatggcttcaagcattcaggagggaaggtgttttcttttcctatcccattgatctcgattttgccatgttgttcgccttcccaaccgcttatcaggttgccaatccaggtggcaatggaccccagagtagtgctgctgctattcaagccaaaaaggtcagtacgctgaaaacaggtggtaatcctgccttgtataccgcgcattatgatgacgctttcaaatggtatccgtatctgttcttgagccgcagtaagccagagacccatctggctgcgttttcccgtatccctgatggcgatgtttctgcgtcagctcccgctgagcttagggcccttattgagtacgtaatgcataaactaaatctgccaggagtcggggaatga

SEQ ID NO: 79339 - DNA, 894 bp, Aeromonas schubertii
atgacttttgatgccttcaccaagggacttctggaccggttccgtcctgctttacctgagccgttcaattcgcctggcacgtatcagatcgttacgccatttcgtcgggattatgaggattttcttgaacgtcacggctatcacggtgtgagggttcaacagcttgagggaagacttcttctgacagacctgccaattgacttgtcaaatggatctgaagtacatcgtgcgttagcagattactggcatgaacaattctttggaggcgacgagatctctctgtccttcccgatgataaataggcttgtaaaactgctgctgcaggagaatgcatatatccgtcgggccttacaggcaacgtatcccattgtctttcttgatgaataccaggataccacctatgcccagtacgacttgttgcaaacggcatttgatggtagcgatgctgtctttacggcagtcggcgatgataagcagcgtatcatgggatgggcgggagccatgaatgacgccttcgaccagtttgagaacgactttggtgcgaggcgtatcacattgctttcaaactggcggtcacatgcggatctggttcttattcagcacgagattgctcgccggatagacggcaatgtggaagctgtgcaggcacaagggacccgtgaaattgaaggtgaggtttctgctatctggcaatttcggaacgcagatgacgagaacaattatctggctgaatgggtgaggcgtgaggttcagtcagggcgtgttgcgccacatgatgtagcaattctgatcagaatgcgggcagatcaggtggagggtgagatagcccctgcttttgcggcacgaggtctcaggatcagaaatgcggcccggtcagtcggtgaaattcggtaa

SEQ ID NO: 79340 - DNA, 1797 bp, Paracoccus sp. MKU1; identical to SEQ ID NO: 71784

SEQ ID NO: 79341 - DNA, 1827 bp, Paracoccus sp. MKU1; identical to SEQ ID NO: 71785

SEQ ID NO: 79342 - DNA, 1743 bp, Paracoccus sp. MKU1
ctgctcggcttcccagagctcgacgaagaagaggacgaagacgcttccgccgtccccgactttttcaatcacatggctgcttctggccccgatgaaccgctaaaggcgcgcatgcgacttatcgccaggtggatcgaagacggcacgcctgacgggaccgtcgaagaagacatcagatggatcacgaccctcggcaacgaatttgaatgggagacgcttccgaaagtctccgctgtggatcgcgcgagcatacaggttgtctacgttcccgcccttcgcaacgcggccgaccgtgtcaccgagctcctgaaaggacgcctatggcgagcggcgctatggtcagctgatcttggcgcccgcgcgacggaaggggccgagcttatccagaaccagttcgatcaggaagccccggcaagcttcatcattgagcgtctgacgcacaggtggcagcaggtttacgaaggcgacacggacacaacccctaatcttcggctgattgagagcaggatcgaagatcttgtccggcgcgcggagttcgtttttcatcctgacgaggccggtcgaaaccgaatcctcaccgatctcagtgacggacagcgctcgcttttccacatcgctctgacggctgcaaccctcgagaccgaacaggctgcgcttgccctcgctgcggcggagagcccgttcgatcaggagaagctgaggcgcacgcatctgacgattctcgcgattgaagagcctgaaaacagcctctccccattcttcttgtctcggatcgtgacgttggcgcgggaaatcggcgagatgagcacggcgcaggcgctcatttcgagccatagcgccagcatcctctcccgcatcgaggcggacgaagttcgctactttcggcttgaccgccagacgcgccgcgcgagcgtcaggctgctgaccttgcctgaagacgatgtacaagccagcacatatgtccgcctcgcggtccgttcctaccccgaactatattttgcgcggttcgtgattctggcggagggggactcggagcgagtcgttctgccccgtttagccgaagcaagaggcgttccgcttgacccgtcattcgtgccggtcgtgcctttgggcggtcgctatgtctcgcacttctggagactgctcaccgatctcggcatccctcacgcgacactgctcgacttcgatcttggccgcacccatggcggagccaaaatgatccgaacggcgttcgcggctctagaagaggtggatcgcgacctgactgcaaatcccctcgttattgatggcacgatcagtctcgacgatctcgaagatttggatgacgaagatgttctggaggattgggcggaaaatgactggcttcaggctctcagacatgaagccgtcttcttttccgaccccatcgacttggatttcgcgatgcttgaggcgtttcctgcggcgtaccagcaccccaatccgggtggacgaggccctaggacgacagcagaggcgattgccgagaaaaaaagggtggtcctgaaaaccaacgggaatcccgacatctacgacggcgagcaatgggacgatagcttcacctggtatccatatcttttcctcagccgcagcaaaccggagacccatctcgccgcgctgagcaggatcgctcgtcgaaacctcgctcggcgcgcacccccggaactacgcgccctgatcgatcatgtcagagacgttctgtttcctgagccggctgaagactga

SEQ ID NO: 79343 - DNA, 1869 bp, Paracoccus sp. MKU1
atgcccgtcgcgccggaagattggcgaccacaaggcgtcgatgaccttgaaccgcgagtctgggacgctcttcgagagaccgcgcagagtgtttgcgttaccgccggtgccggagcgggcaagaccgaatttctggcgcagaaggccgcctatctcctgcagacaggtctttgtccggcaccaaagcgcatccttgcgatcagtttcaaacgcgatgccgctcaaaaccttgccgcgcgggttcgccagcgctgccctgcggaccaggcccgcagatttcactcgatgacgttcgatgcatttacgaagcacatgctggatcatttccgccttgcgatcccctatgcctaccgaccgcccgcagactacagcatcgcttttccctccagacaggacatagaggtcttcctgcgaagacacggccgtccggacgtcagtgcggaccggtttgagcgagcggtcgcccgtacaccgctgccgcttgaagaaaccgttgaaaatccgcgcgcgagagagctgctacgggcctactgggatgaccagtatgccatgccggacggcgcacttgtttcttttgcgatgatcaaccgcgtcgttgagtacatgcttcgcgcgaatcccaggatcaagcgcgctttgcgcctcacatatccctttgtctttctcgatgaattccaggacacaacctacgcgcaatatagcctcgtggatgctgcgttcagcgaaagcgatgccgtctttaccgcagtcggcgacgacaagcagaagattatgggttgggcgggcgcaatggataacgcgttcgacgaattcaccgccgacttcaatgccgttcgccatgcgctactcaggaactggagatctcacgggacgcttgttgccatccagcatgtcatcgcacggcagatcgatcccgatgtcgaggaggttgaggcgcgcggcgagctggcgatcgagggggatacggcggccatctggcggttcgacagccgcgagcaggaagctgagcagatagcgcgatggatcaggagcgaagtcgatgatggccgcatcgccccacacgatgttgccatcctcgtgcgcatgcgggcaaacaacgttgaagacgagcttgcgcccgctctccgtgcccacgacctcgcgctgcgaaatcttgccagaaatgttggcgaaatcgccattcaggatttgttagccgagcccctgaccgaagttctcctcccgctcttgcggctgggtgcaagcgtccgcgaccccgatgcttggaatgcgacgcaggaacgcctgcaaacgttggcgggcatcagtcccgaagatgaggccgggcaagagcgcttgcagcgcgatatcggagagttctctcggaaccttcgacagacgatgcgtgacgagccaccggatccggcagtggccgaccggttgttcgcgcaggctctggacttcgccgggatcgagcgtctgcgtcagacctaccccgaatatcgacgcgacgccgattttcagcgagtgcgcaacggctttcaggttcttttgcgggaatgcgtcgagaacgcagcggactggagtggcgttcttgatcacttcgaaggcaaggaccaggtcccgctcatgacaatccataagagcaagggcctcgaattccacaccatgatctttttcggtctcgatgccaagacatggtggagcctgtcgccggagcgtggcgaagagctaaattcattcttcgtcgcgtttactcgagcgaagcagcgggcgttcttcgcttactgctccgagcggggcaatgctatcgactggctggaacagcttctcctgcctgcaggtgtggagcagatcgacggagccaatattgtcgctgccgacaggtaa

SEQ ID NO: 79344 - DNA, 2025 bp, Candidatus Tenderia electrophaga
atgcacatccaaaaagtcaccgttaaaaacttccgtcttctggccgacgtggagctcgtgcttgaggaccaaacgactctggtcgtcggccgcaacaacagcggcaaaacatcgctttcggaggccattcgtcggtttctcgtagaccataacccgaagttcgagatcgaagacttctcgaatgcctcatacgatgacttttgcgaagcgcttaaggccaagaacagaggcgaacaagatgatatagttcgcgctttgctaccgagcatcgagttgcgtctcctatttaggtacgaccccgaccagcttgatctaggccctctcagtgacttcatcatcgatctcaacccagactgcaacgaagcactcgtcgtggcacgctatgagttgcgtgacggcgccattgattctctgttcgctgaccagcgagatggtgacctcaccgacaaagaacggctcgcgttcttccaggtgctacgcgatcgcgttcccgctcttttcattgccagagtatgggccgaagaccccagtgatccaataaaccaaaaacagatgaccgtgagtgcgctccgggtactcctgaagaccggtttcgtcaacgctcagcgtgggttagacgacgactcttcgagagacacagacgttctggcaaaaattctggaaggtctctttaccgctgcgaaggcgccaactgcgaatgagggagaacagcgcatcgctgaagccctgcaagaggccgtgcgcgatattcagcaatcgatcgaccgaggtttcaaagaagagttgcggaaattgatgccgacattgcgaacgttcggctatcctggccttgacggttccgaactagagactgaaacgacactcgatgtcgaacgcctcctttcgcggcatacaaaggtcagatatgcgggacaccatggaatcctgcttcctgagtcctataccggtctcggggtacgaaatctcatcttcatcctgctccaaatcgtcagcttctatcgaacattccgtgccgaaacgtcagctcccggtgtccatctcgtattcatcgaggaacccgaggctcacctgcatccccagatgcaggaagtgtttatccgtcaggtgtcgaagatcgcccagcagctcagcgccgacgaaggcgctcccttgccctggccagtccagtttatcgtatcgacgcactcctcacacgttgctaacgcggccggctttgaggcgattcggtatttccttccgacctccgttgatagcgtccgccagaccaaaatcaaggacctacgagaggggctgcgcaaaacgccggaagagcacagaaagtttctccaccagtacctgatcctgacacgctgtgacctgtttttcgccgacaaggccgtattgatcgaaggcaccggcgagcgactgctgctgcccgtcatcatagaaaagttggaggaatccgaacccgatgtaccgaagttgtccaatcagtatatgacgactattgaagtcggcggtgcctatgcgcacatattctttagtctcctcgattttctggagttgcgtaccctcatcataaccgacctcgattccgtcgtcgccgctgggggtggcgcatgtccagtgcatcagggcgtggccacgagcaacgcctgtctcaatacctggttcgagggtggtgactgttcacccgcagctcttatcgcgaaagacgacgactcaaaggtcgccgggctccgacgcatcgcctatcaaattcccgaagcccaaggcggtccctgcggccgcactttcgaggactcgttcatgttggcaaatatggagatgttcggcattgacggcgatacgcccgacgagcaggctatgtgcgcagggcggaaggtcgacaatatcaagaagtctgagttcgccctcaaatacgcgattgacgagacaagttggacagcacccggttacattctcgacggattgagatggttggcggccagcggtactccggagactaatgcgacgaccggccaggcgggtgttgacgatggctga

SEQ ID NO: 79345 - DNA, 1746 bp, Candidatus Tenderia electrophaga
atggctgaggttgtgggacacttcaatccagccaaggaggctggtgagcgcgcgctcacaaacgtgtatggttgcctggaacgcaaggagagctttctcgttgaggctggtgccggtgccggaaaaacctatgcgcttgttaaggcactccattttcttattgaccgctatcagcacacttttccgcagcggcatcagaagattgcctgcatcaccttcaccaacgtggcgaaagaagagatcgtcgcacggaccgaccggagcccactcatttactgcaatactatccacgcgttctgctggtctcttattagcggatttcaaagacagctccgggaactgctgccgaagcttcgacattggtcggacagaatttccgaagtcggcgatttcggcgagcgcgctgtagagtatgagttggggcacagaagtatcaacgaccgtcgcgtctctattcatcacgacgacgttattgtcttgactataactcttatggacaacgccaagtttaggcgcatcatgagggaaaagtatccaatcattttgatcgacgaatatcaggacaccgacgctgattggatcgactctatcaagagccactttctcggacaggagggcgcccctcaattcgggttcttcggcgatcattggcagaaaatttacggtgatggatgcgggaaaattgagcatccgagcctgacagttgtcggcgtgcaagcgaacttccggtcggtttccacaattgttgattgcttgaatcgcatgaggcctgagctgcctcaacatgtcgttgatccgaacgaacagggcgatgtccatatctttcacacgaacacatggaaggggggccgtcaaaccggcggtcattggggtggcgatctgccttccgaggccgctgaccgtgcgcttcagatggtcgtcgatcgccttgccgaagagaattgggatttgtctccagagagtactaagatcttgatgcttacgcatcgcgttcttgccagcaagcagggatatcacagtattccgacggtcttcaccttcaacgactctttcacgaataaggagcacccacatatcgcctactttaccgactgtctggagccggcatgtgaagcatacctttccaggaagtacggtgagatgttccgtgcgctcggttccaatgtgccagcggtccgtgcccaggctgacaaaaagaagtggtccgaggccatgggcaaactcatagagttaagagatcgcgggacggtcggcgacgtggtggattatttgcttgctgtacgccgtccgaggctccctgatgccgtcgaacggcttgaacgtgaattgcgtgagctcaacccggaagccggtgaggaagtgccgcgtgcgctgaaggagctcggcgatcttagggctgttgcgtatcaagaaatcgttgctctatgccgctacttgtcaggccattctccattcgagaccaagcacggcgttaagggttccgagttcgaaaatgtcctcgtcgttgtaggccgaggatggaacagatataacttcaacgaaatgctcgaattggcagggcaaggagcaaatatacccgctaacaagcaagattccttcgagcgcaatcgaaaccttttctatgtcacctgttccagaccgaagagacgtttaactattctctttacccagcaactttccaatgtggctatgcagacggtccgcaactggtttggtaatgacgccatagaagctctgaatttctaa

SEQ ID NO: 79346 - DNA, 2070 bp, Salmonella enterica
  subsp. enterica serovar Panama str. SA20030878
atgcatattcatcaagttaacatcaagaacttccgcctgttagcagacgtggagctcatgttagaagatcaaacaacagttattgttggccgaaataacagtggaaaaacgtcattatcagaaataatgcgcaggtttttggcagatagcaacgccacctttcagcttgaagatttctccagcgtttgttacgaatattttgagagagccttaaatttactaaagcaaggcgcagaggagaatgtaattcgagatctaattcctgctattgagctccgactgaagctccagtacgacccagttcggcctcagtttggaccattaggcccttttgttattgatttagatcctgactgtactgaagcacaggtggtaatacgctatgaattgaaggacggtcaactggcacagttcttcgaaaaccagcccaaggaaccgctaacccaagagactcgcattgcattcttccgaaccctacgagagcgagttcatagtaatttctgtatgaaaatctgggccgaagacccaaatgatcaagataatcgccgtgaattgcaacccggggcgttacgcagcctggtcaaaacaggatttatcaacgctcagcgaggacttgatgatgtaacatatcgagaatctgacatcttggcgaaaactgtagagggcctttttgctactgcttcttcagcatctgcggatgcagcagacaaacaaatagccgaagctttaaaggtagccgtcgaagacattcaaacccaaatcgacacaagctttggcggtcagctcaaaagcttaattccagcactgaaaacttttggatatccagggctgggaggacaagagctacacactgagactcagttagatgttcgaaagttactatcaaacttcaccaaagttcgttacgcgggctatgggggtatcacactacccgaatcgtacaacggcctcggcgcacgtaatttaatattcatccttttacaattggctggtttctataaggcgtttcgtgctgaggtcgctgagccaggcgtacacctgatcttcattgaagaacctgaagcgcacttgcatccgcaaatgcaagaggtctttatccgacaacttgccaagatagcacagcagttggtcgacagctctgaagacaaacgaccttggcctgtccagttcgtcgtatctacccattcatcgcatatcgccaatgcggcaggttttgaaaatatccgctactttctcggagttccagtaccaggaactctggagggtatccgtaaaaccaagatcaaagacttgcgaaagggactgaaggatataccgtctgaagataaaaagtttctccatcagtatatgacattaacgcgctgcgacttgtttttcgccgacaaggctattctggttgaaggactgagcgagaggttaatgcttcctgttatagttgcaaagcttgaagtgtctgagcccgaaggttcaaaactatccagccaatatgtgacggtaatggaggtcggcggcgcctatgcacatttgttcttggatatgttgcgttttctcgaacttcgcagtcttattatcaccgatctggatgctgtcgatttccctggaggcaaagcgtgtccggttcacagtggcacctattccagtaatgcttgcctgagggcatggttttccgaggatgatcctttcacacttgctggcctacttgttaagaaagattccgataaagtactcaaaggtaatcgcatagcctatcaatgtgcagaagttgagaatggcccctgcggacgaacattcgaagatgcattcatccttgccaatccaaaactatttggtttggtcgagaaagacgctaatgcccaggaaatcgaagcccgcagtaaggctgaaggttggaaaaaatctgaatttgcattgaagtactctatttcaaataccgattggatctcaccaaaatacattgttgacggagttcgctggctggcaagcgaaggtatgagctcaccagatctagcattagcattggctaaagaagtttcagcctgcgttgtggaaggagaagcgtctaatgtttga

SEQ ID NO: 79347 - DNA, 1734 bp, Salmonella enterica
  subsp. enterica serovar Panama str. SA20030878
atgtttgatgcacaatcaccagcagaaaccgcgagccaacgagcgcttgaatctatgtatgcctgcctcaatacaggaaagagctttcgtttggaagcaggtgcaggcgcaggaaaaacgtactctctgatcaaagcactccaatttctgattgcgcgtaataacgatgcatttcagaagcaaagtcagcaaattgcttgcatcacttacactaacgttgcaaaggacgagattgccgcacgaatagatcgtagcccactagtattctgtgaaaccaatcatgcattttgttggtcactcatcagtggctttcagaaactactcagaacacaaatcgaggctatgccagcctggaaagaaaaaattgaagagattggaggaacattaggccaacgtgtcattgagtacaacctcggccatcgctccattcgcgaccataacgtatctattcaccatgatgatgtcctgccacttacgatctcacttatggcacatgaaaaattccatcgtatcattgcggatcgctttccaattattcttgttgatgaatatcaggacaccaacaatgaatggatcgaagcgataaaaacccatttgctgggcaagcctggggcaccactgtttggctttttcggtgatcattggcaaaaaatctatggaggcggatgcggaaagcttgagcatccctgtttaaccgaaattggtaaagaagccaactttaggtcagtcaaagtaatcgttgattctctcaatcggatgcgacctgcactacagcagttcgttaaagatcctgatgctgaaggcgaagtacgtatctttcatacaaacagttggcaaggagaacggcgaaaaggtggacattggggtggggatttacctgcatctgttagcctgaccactttagaacacgtcaagactatgcttgctcgtgaaggttgggatttatcaccctgccacacaaaaatactcatgctaacgcataagcttttagcgaatcagcaaggctattcaaatttggcggcaatatttcgatacagtgaatcgtttacgaagaaggagaaccaacatattgctttctttgtagataagctggaaccagcctgcgatgctttcgctgcccataaatatggaatgatgtttgaagcacttgggggcttctcacctctgttgcgtagccatgcagacaaagcaagctggcacaatgccatgacgcaattgcttgctatatgtgataccggaactgtcggtgatgtaatcgagcacttacgtacctggaagaaaccgaggctcccagatactgtcgaaaaacgtgagcgagaattacgtgattttgacaaaacagcaggttttgaaatgccacgagttttggaggaattagagaaactccaccagattgcttattctgaagtaaagacacttcgccattatcttgatggccactcaccattcgaaacgaaacacggcgtcaagggggcagagtttgaaaatgttctagtcgttgtagggcgaggctggaaccaatacaactttgctgaaatgttggagctcgccggtgcacaggtgatttctgcggcaaaagaagacgcatatgagcgtaatcgcaatttattctatgtcgcctgttccagacctaaaaaacgacttgctatcctatttactcagtgcctgtcgccaaaagcgttggccacacttgagcgttggttcgggaaagagactattatgccagccccgtag

SEQ ID NO: 79348 - DNA, 2070 bp, Salmonella enterica subsp. enterica serovar Weslaco str. 247K; identical to SEQ ID NO: 79346

SEQ ID NO: 79349 - DNA, 1734 bp, Salmonella enterica subsp. enterica serovar Weslaco str. 247K; identical to SEQ ID NO: 79347

SEQ ID NO: 79350 - DNA, 1953 bp, Pseudomonas brassicacearum
atgaagattaccaaaatttctgctgttaatttccgagctctccagaatgtgacgctagagctgcgggacagcctatctctgcttattggcagaaataatagcggcaaaacttcactgcttgtattgtttgagaagttttatgagcctggggtgtcgttcaattatcatgattttccgttagcggtgcgtaaagatttagcggcaattgaccacaaaactgacatgttgccgctatctataagtatgagggttgagatcgaatatgatgaaaaagacagcttgaggcatctgtcagaattcatgttggatcttgatagcgagattaacaatgtcaagattctgtttgagtgcgttgtaaataaggacttgttgctgagggatattgagcagttcgagggggaacgagaaaggtttttgagaaaaaacctcgataggtatttgcaggtcaacgtatacgcatatgctgatgaggatgacctgttacttgaaaatcgaagtaagttggtaaaaaaggaaatagccgcagttagagatctgatcaactttcagataattcatgctaagcgggatgttgctagtagcgaaggtggaaagaaaatgctttctaagttaactacgcaatatttcaataaggcaaacaaggatgtaacagatttcgatccgataaataacttgcttcttaagattgatgagagtcttgaaagtagctacaaggattttttcgagcctttcctgaagacctcaaaggcatttctggggattgaggatattaaggtcgtatctaatctcgagtccaatgaagtgctagagaatagttcgcaagtagtttatggtgaccgttctgagtttctcccggaaacattcaatggtctcgggcacatgaatattctttatctcctgctaagcgtagagattaagaaggagtcatttgctaagacaggtaaaaacataaatctattattcatagaggaacctgaggcgcatacacaccctcagatgcaatatgtttttgctaatcagataaaaagcatattgaacgacattgaaaatatccaggcggtaattactactcattcctctcatattgtatctcaatgcgatttcaaagatattaggtatttgcaaaactcagatggttgtacaagggtaaagaatttctattcggaattgaaagccaaatacggtaaggacgaagattcatttaaatttctagagcagtacctgaccctcaactcttgtgagcttttctttgcaagcaaagttatatttattgagggtgttactgagcggatgttgtggccgtacttcgtagagttatttgataagtcgaaggttcaaagtaaagatcatatttcgttattctcccagaatgtcacaattttggaagtcggtgctaatgctaaggctttcaagcatttccttgattttttagaaattaagactctggtcatcactgatatcgatacaaccaaaaaaactattgatactaaaaaggcaaacccgagaactatctatccatcctttaaagttgcaggtgcagatcataccagtaatgctacgctgaaacactattatgacgcgcccgatttctctgaggaggctaagttttccagctggtttgaaaagttagtcgcacacgaactaaagcattcgtatcctaaaattcatattgcttatcagaaaaaagaagaaggctaccacgctaggagttttgaagatgcttttgtgcatctaaatagggacgtaatcaaaaagaaaattgataatatcaatgggctgaaaaatgcgcacgaatttgatggcgcgcttgatgcgtatgatctgattgaaacagttttagataagaagtctgcgttcgcgtcttctctgttgtacctagcactgacggatgatgaagtcacttggcgtattccggcttatatcggggaggcgttggaatggatatcggaatga

SEQ ID NO: 79351 - DNA, 1995 bp, Pseudomonas brassicacearum
atggatatcggaatgactccttttgagaatattatatcttgcctggaaagaggtgaaagctttgtcctgcaaggaggtgctggaagtggaaaaacagaaaccctgaaaaaattgttggattacatatctaaacacatgccggaaaaaagagtggcatgtataacacatacaaatttggctgcggatgaaatcaaggctcgtgcaggagagttgcatgctattagcacgattcattcgtttctgaacgggatcatcaactcctttcgtatagatctgcataaagtaatacatgagcttttcctattgccagaatttaaagtagggcaagccatggatgacgacaaggagtataaaaagcgcgagcatgaacgttataaaaaggcatacggaaaatatgcagataaagcataccttattctcaagataaaagaggccaaggtcttggggaaaccaatgtatgacaaagatcctcaagcggcaaatactgtattaaatgagaaaataaaacaccttaatgcaagtgtgcttgagcatattaagaaagcttcacctcaaaaggtttgttataacgagaccgcattcgatagttttcgcgatttaagctttggtcatgacgggcttgttaagttggctgtctcgttaatgtgcgaaagaaaaaaattaagaaagatattggctgataagtatgattatatatttgtcgatgagtatcaagatacttctcctgatatagtcaaggcgtttcttgattatgtcgtaaaagaccagaatatagtattcgggttctttggtgactcgatgcagggaatatatgaggatggcgtcggagatgtagagaattatgtgcaagcagatgcgatagagaagataaataaagaggataattacaggtgctcggaacaagttgtcaagctcattaataatctaagggacgatgggctggaacaaagtgttgcattcaaaactcgggagaatggagatttagaaaccctggcggaccgccagggtagagtcaagctcgtttatgcaatttgcgacgataagcctacccagcacagcccacgcgaagacaaagattcataccttaaaaagcttaataaattgattgaaacggcgcggggtgtcgatagctataaaatgttgatgttgacaaataaggctgttgcttctgaagctggattcagtcagttgtatgaaatatttaactctagatttggacaagcaacaaatgagaatttagagaaagtattggcaatatgccatttttctgagctatatgagttgcacgaagattatggaaataagagatatgcaaaagtcatccgtttcgtaaaaaaatctggcttcgtattggattcggttttccacaaagatgaattgttggtcgcgttcaagagtgtttttgatttgaactctccagcgcataatgcgatacatgaatcgtttaaattgaagctattgaagcaatcggattcgtatgaacggttcgtgagaagaagagaagagtttttcgaggctgctatggggaattccagatactctgctttcaaagatcaatacgtatctgggtttgatagtcttagtaaattaaacaaagctggctttgatgttgatgagtatgagtttggtgatctagagcgtgatgtaaagcgagagctgttttataatgatttttttggaggaaaaataactctgggtgaagtgttcaagtattatgattatttgtcagagaaaacaaatttcataactatgcacaagacgaaaggttcggggatcgaaaacgttttggtggtagcagacgagtttttttggagggactacaagtttggtaatgttttttcggctggggatataactgccgagaatagaaagattatgtatgttgcgtgctctagggctatcaagaatttgacgtgtgtgcggataatgagtactgaagaatcctcaactattaaagattatttcaatgagatagaatgtgtaagtttagattga

SEQ ID NO: 79352 - DNA, 1851 bp, Pseudomonas aeruginosa; identical to SEQ ID NO: 75378

SEQ ID NO: 79353 - DNA, 1650 bp, Pseudomonas aeruginosa; identical to SEQ ID NO: 75379

SEQ ID NO: 79354 - DNA, 2397 bp, Pseudomonas aeruginosa; identical to SEQ ID NO: 73790

SEQ ID NO: 79355 - DNA, 1932 bp, Pseudomonas aeruginosa; identical to SEQ ID NO: 73791

SEQ ID NO: 79356 - DNA, 2397 bp, Pseudomonas aeruginosa; identical to SEQ ID NO: 73790

SEQ ID NO: 79357 - DNA, 1932 bp, Pseudomonas aeruginosa; identical to SEQ ID NO: 73791

SEQ ID NO: 79358 - DNA, 2310 bp, Pseudomonas aeruginosa
atgccagaagcggttgtcgccacgccggtagctggaagcatcacccttcgactcctagagctttgtcagttccggcggcttggcaaggtccagctagatatcgataagaaaactactattcttgtcggagccaacaatagcggcaaaacatcggttcttgcagcgctacgccacttcctttcagatggctctcgcttcggcgctttcgatatcagtctgtcgcagtggccgaagttgcgagcgcttggtaaagcttgggaattgctgaaggaaaacccgtcgacagtgattggatccgaagagcaatggatcgagcagcttggagtcattcactcggctatgccgacgttggacctatggttcgatgcggaggctggcatgttccactatgtcgccccgtttctctcaaaattcagctggaaaggaggggccgttggggtacggttgcgtctggagcccgctgcaagcgttgacgagttgaagcagctggcttgggcataccacaccgcgcgactgccggtgaaggatatgggggcggattcgcttgcctggcccattgacctcctcgacttttggttgcgcgagccacaaaggttgggtcaagtccgagcatacaaattagatgcagacaaaaatccactggacgggctcgagacctatgccgctcagactctgccggcagacgccagtccaattgagcgcaaaaatctacagaaattgatacatgttgacttcgtagcagcgcagcggggtcttggaggtgaggaagctgattctcgatctgcttctggcccccatcgtgtcggcatgttctccaatcaacttctcaagtttgctcgacaacacctaaatattgctacaacaggtcatgggcatcgcgcagaccttattaaggcggtcgcggaggcacagcaggaactggacaagaaaattcacgaggcgatcgctccgtcggtggaagaggtcagagaactcggatacccagggctgcacgatccccaagaaattcgcttccgcacgcgcatacagacagctgatttgctcgaccatggtactgcagtccaatacagcatgcagaaggactcactagaagagcttcttcccgagtactccataggccttggataccaaaatctccaatcgctcagctatcaactggtttctttcaaagcggctcgactcaagcctgaaaaaggtgccccggtacccgttcatctagtattggttgaggagcctgaggcgcatcttcatgttcaagtgcagcgtatcttcccagataaggctcacaagctgatcagcccgaacgaaaaagaagcgtcaggacttaaaagccagttaattatcagtactcactccagccatctcgcgcacgcagagagttttgatcgattacgatacgtccgtcgcatagcaaagagcgcagaaaatcccatgccgaccactgaggtggttaatcttgggaaaattttcggtgatgaccaaaagacccgtcaattcgcagagcggtatttccgcgttcagcatactgaccttttgtttgccaatgctgcaatcttcgttgaaggcgttgctgagcgcatgctggtcccgcttttcatcgaacgagattttgaagttctcaacagccgctatctgtcgttcctagacatcggcggtagtcacgctcatcggcttaagcctctcgtggaaaagcttcgcattcccacggtcatcatcaccgacgtcgaccccgttgaggagaaagctgggaagccgacgaaggatggtgagccgaccaccactctagttgcagtggctaatactggccaagccgggctgcaatgcgggaacccgacgctgcgcggttggcatccgaaactgcagcagctcgaagatttcaaaaacccagtagaggtacaacttgtttggagcgaagtctctgaatgtttagtgcgcttcgcctggcaactgcccgtggctgaagcgggcgaccattggcctagcacctttgaagactcacttattctcaagaacattccttggttcaaaggtcttatggatgagaaggtcgacggctatggcaacaaaattaagccgcccaaaggcgcactcggctccgtagctcgacgcgttgccgaccatgaaaatatttcggatttggtcgcatctctacacaaactcatgcacggctcattcaataaaggagacttcgctgcaagcatctttgagatgattgcggcggccgaaccaattgcttgccctaagtacattgcggatgccttagaatggcttcaaaaacaattggatcccaatccggagttggtgccatga

SEQ ID NO: 79359 - DNA, 1947 bp, Pseudomonas aeruginosa
atgactgcggttccgacccttggcaacgatcgcgatgccggcgtagttgatgaaatctgtggctaccttacggaagaaccgccgcgcagctatttcctttttgcgggtgccggttccggtaaaactcgtactctggttgaagttcttcggcgacttaccggcgtcatcgaacacgataaaggcaataagttagcacggcgtctgcgaatgtacgggcgctcgattagggtggtgacatataccaagaatgccgtctcggtcatcaacggacgcctcggcgacaacgacttagtctgcgtatcgacgatccactcattttgttgggagctcatcagcggcttcaacgatgatattcgagaagcacttgttgccgttaaagaagctcaacttgcgaaagaaactgccgaggcgcaagccaagccgagaggcattacgccagctaaacagcgagatcttgacgaaatcaaggatgatatcgaggcctttagagcgaccgaagtgttcatctaccatcctgatcgcaacacgtacggccccggcgcacttgcgcacaactatgtcctcgacgcgacagcgtggctgctccgaaataaacttacgctccaaaccattctcaaggaccgccaccccataattcttattgatgagtcgcaggacacaatgaaaggcatgctggacgctttgatggggcttgcagagcaggaagggagcgacttgactcttgggctgctcggtgatcaccggcaacgcatttatgcgcacgggcacgccgatctttcaagtcttgtcccgcaaaactgggcaacgccagagctgcagatgaaccatcgcagccagcgccgaatcgtcactctcattaacagagtttgggaagctgagcttgatggccggacgcagcctataaacggtgtggagcagcatcctagaactgaaaaggccggaggagtggttcggatcttcgtgggggatacttcgcgttctccggagaacaaagtgatcggtgaacgttggtgctcagatcggatgcacggagccactggggacgccgcgtggtatcaaggccagtatcagttgctcgcgctggagcacaagctcgtcgccactcgtggctcatttctcgatgtgtatgaggctatggtcctgctagatcctgacgccgcagcgccttctggcagtggtgataacaaggggccttctgcagtgcaggttctcctaaacgagcttgctcagcttgaagcatgcgtagatattgacggtgccgtaaacgagttaaaggtcacagaggtatttcgtcggtatggacgcctcgacaacctaccggaggaatgtgtctcacgagcgagtcgcgtggaggagatgctgaatgccatcactgcatttgccaccgcctgcggcaattcaaactcaactattgcagaagtgctcgcaccagtcttgagcgcacacttatttgaagtcgatcatcgcctctcggaagcatatgcggacaagtcgccacctcttccggcaccgggccggggggaagaggaatccaaacaggccaggatgcggcgtgggtggtgtgcgctgttcgccgcaccttggagtcaactcagactttatcgaacttacctcgccgggaattcagttcttgcaacgcatcaggtggtgaaaggttctgagtttatgcacgtcatggttgttatggatgatgctcttgctggtggtttccttatttcctacgacaagatttttggtggtgtggagcttagcaagcgggacaaagagaacgcagagcagggcaaagaaacgactatcgaccgcaccttgcggttgttttacgtaacctgcagccgcgctcaggagtcgcttgccctggtgctctggtcgtccgacccagcagcggcacttgatagaatcaaggaaagcaactggtttaccatagacgaggtagagacaataccttag

SEQ ID NO: 79360 - DNA, 1953 bp, Pseudomonas aeruginosa
ttgatactcaagcaaatgcgcgtgtgtggtttccaatcgtttggcgccaagccagtcactatcgattttcgaaagctgactttcttgattgggcccaatggctccgggaaaaccgcaacgttgcaggcgctctgtcgacttttttcgatcgaccccaatcagcgacgtctgcgcaaatctgatttcttcgttgcgcatgatgaagaagaaaggccggatgagcgaacgctgtggatcgaggcagacttctactttcctgaaatcgccgatgagaccaaagagcatccgaccatcccatgtaattttggtcacatgcggttggacagcatcagaggtgtcccgcgtgtgcgatatcgcctggatgcgacgctaggactggacgatgagattgagcagagcctgcgctacgtctcggaagtcgatgaggatggaaatccgatagccacctctccagtgccgcgtgatgagcgtaatcaaatccaggtgcactatctgccagcacgtcgcgatccagcagagcacatcacctacgggactaatgcgctcttgggccgcctgttgcgagccgtgaactggactgagcagcgtgaaaaaatcagccagttgtctgcagatatttctgcaagcctcagtaccaatcaatcggtcatcaacctgggtgacggtattgctaatgcctggggcaagctgcacaaaggcaagtttttcaaagacccgagcttgacctttgttagccatgagatcgaagcattactgcgacacctctcggtttccttcacccctggtcatggcgaacagcaagtagatttttcgcggctcagtgacggtcagaagtcgatgctttacctaaccttggtgctcacctctcaggcgattggcagggctgtgctcaagggcgatgacgattctttcgacttggataagctaaagcctgcagtgttcaccctagtagccctagaagagccagagaatagtctgtctcctcattacctgggccggatcgtatcgtcgctcaaggcattggtgctgggcaaggatgcctatgatgcgcaggcgatgatcgccacgcatgcgccttcaatgttgcggcgcgttgagcctgagcagattcggtatcttaggcttgatgactcgcgctgcacggccgtaaccaagattacgatgcctccgaaggctggtgaggcctacaaatttgtcagggaagcagtgcaagcctttcccgagatatatttctccaggctggtagtgctgggtgagggcgatagcgaggaaattgtgttgccgcgattgcttgctgcagaaggactcatggtggatgaggctgcggtgtgcatcgcgccattgggtggtcgtcacgtaaatcatttctggcgtcttttgagcgggctgaaaatcccttacgttacgcttcttgatcttgacgtggctcggcacggtggcgggtgggggaggatcaactacgttgcaacgcagctcaatctccattgcccaaaccaagggtatatgcctgatgaccagcttgcgaaactcccaagctgggataaccccaaatataaaattctgaaggttgagaaaagtcgggagtggaggaactacatcgctgagcttgaaccgtttgacgttttcttttccagtccaatggacttggacttttccatgctctgcgccttcccacaagcctttggtgtcgaggccaaagaccttgtggcaccgaagatcggccagctcagatccgtgctgggtgatagcttctttgacgaaaaacagtacaccgtgactgagcgtaagcatttcgccgcgtaccacaggttgttcaaggtcgacagcaagcctaagtcgcacattgaggccctttcgaatctctctgacgatgatttgagggagggtatgccaccctcgctcaagcgactggtcaagcatgtgatcaaaatggccagggagcttcacgaatga

SEQ ID NO: 79361 - DNA, 1668 bp, Pseudomonas aeruginosa
atgatcaaggtcgacgcttggaagccttccgccggcatcaagcttgagcctaatgcagagattgccgcgacggagcaacagcgcagtatagcgctgactgctgggccaggctcgggtaaatcagagttgctggctcagcgcgctgacttcctactcactacgggtgtatgtcgttatcccaaacgcatcttggccatcgccttcaagatcgacgccagtaacaacctgaaggaacgcgtttggcggcgttgcggtgcggcctatgcaggccgcttcgacagctacactttccatggattggcgaagaggatcatcgagcgcttcaggccagtgctagctggcgccgatgcattaaatccagatttcaaaattgtcgcgaagggcaaggctcaccctgtgcagacggagtttaaagagctcatcccccttgccatcaagatcctggatgcctatccggcggcagtaaatgctatacgccagacctacagcgatgtcttcctagacgaattccaggactgcacggacgagcaatacgagctggtgactaagctgttcaaaggatcaggtcgtcgcgtgacggcggtaggggatgttaagcagaagatcatgggttgggcaggggccctggaaggcgttttcgccagtttcgttgatgactttgaggctcaacatctcaacatctatcggaacttccggtcgcaaccgcatttgctcaggctccagaacgacatcatcaaagtactagatcctgactcggaaatgcctgctcacttgctcgccggtgagggtggagaggtgcatgtattgtcctacgccgattgccaggatgaagccaccgacttggctaagcgcatcgctagctggataaatgtagaaggtatcgctccggctaaaatcgctgtgctaccgcgtaatcaaccggaggcgtattgcattcgacttatggctgagctcgacaattggggcatcagctatcgtaacgaaaacaaggcgcaggacatttctaccgagcctatcgcccaggttatcgtggattacctgctgtgcatttacggcctgagagagcccaaagcctggactcgtctgacgcgtcgaatcatccaagtagaggatgatgcagagagcgaactaaagaccaattggagccgttacatcaaggaagcacggaagtctgctgcggctgatcttgcaactaaaacctttgaccagcgatggacgctactggaggagttcctcaagatggttgggcctgcgctgctggcagggctctcccatgattacgagtcctgggtgcacctgcgagagcagattgagagtgtcaagaaatatatcgatgaagccttggcaaaagaacctgaccttctgaaagcactggcccagctctccgatgatcaatcgattcggatcctcactgtgcacaagagcaagggccttgagttcgacacagtagtattgctgggcgtggagaatcaagcctatttcggcaaggatcaccacgaagtgcagtgcacattcttcgttggtgtatcgcgtgccgagagacggcttgtggtgacgacggcaagtcatcgtcagaatctcgctcagcttgaatactggagatccgcccgcaccgttcaggcggaattccttgcgtacgtgaatctctggaagacccactccaactga

SEQ ID NO: 79362 - DNA, 1932 bp, Pseudomonas aeruginosa
atgaagcttcaaacgatccggctctcgaacttccaatcattcggagcggagcccaccgaaattcggctggaggagattacttacctcatcggccctaatggctcaggcaagacggcagcactccaagccctatgccgtctgtttgcctttgatccatcactgcgccggatcttgcgctcggactttcacgtcccgttcaacgaagcggcaccgcctgctgagcgtcagctatggatcgaggctgacttcttgttcccggaacttgacgacgatgacgatgaagacaacagcacgatagcccctcatttcggtcacatgcgccttgacgaagttgatggcacgccgcgcgtgcgtttccgcctcaccgccaacatgggcctggatggggacatagaagaaaacatggtctatgtgctggacatcaatgcagatggctcgccactgacaactggtcaggtcccccgatctgaacgcaaccatatccacgttcactacctgcccgcacgccgtgatcctgcagatcacattgcctatggcgccaatgccctactgggacgcatgctgcgttcggtgaaatgggatgccgagcgggcggtcatcaagggcctgaccgaccaaatcagcgacagcttggcggccaatccatccatcaacgcgttcagtacaagcttgaagtcagcatggagtgctttgcacaagggaagcttctttgtcgaccccaagctcacatttgttgcgtctgaaattgaagccttgctgcgacacatgtcggtgtcattcacgccgggccatgacgagcagttggtcgacttctcgcgactgagcgatggtcagaagtcgatgctgtatttgtccctcgtgctgtcctcgcaagccatcggtcgtgcggtcctagctgaagatgatgattcttttgacgcggacaagctgcgcccgcccgtgtttacggtggttgtggtcgaagagccagaaaacagcctttcgcctcactaccttggacgaatcgtcaatgcactcagcgagatgacccgcgatggagatgctcaagcactgatcgcgacccacgcgccgtcgatgctgcggcgcgtcgctccggagcgcatccgctatctgcggctgacccacgagcgaacatcgcgagtcgcgcatatacagctgccagacgccgctgaggaagctcacaagtttgtgcgtgaggctgtacaagcttttccggaggtctatttctcgcgacttgtcgttctgggcgaaggtgatagcgaagagatcgttttgccacgactgctgcaggtcaaaggggcgcccattgacgagtccgccgtcacgattgctccgcttgggggcagacacgtcaatcacttctggcgcctgctgtcagctttgcagatcccatatctgacactccttgatcttgatgtcgctcgttacgctgcaggctgggggcgaattaaggtcgtcaacgatcaactggcgaaatttgaaccagcaaaagtgctccctaaagactgggatctgccgaaatggaacaccaaggaggcccccgttcggactcactgccattttggtgaagagaagaaaaacgtcttccgcgcactagaacgtcgcggcatctacttctcggcgcccatggacttggacttcgcgatgttgctggcctttccagaagcctacggtgtcgaaagggaggagccggatgaagcaacgatcaaggccgtcctcgggaagaagcaccacgacaccagccaatacagccaagacgaacagaagctgttcagcacctaccatcagcgcttcaagcttggtagcaaacccgcagcccatattgaggcattggctcagctgacagatgaagagttgctggctgacatgcccgtatcgctgagcagattagctgataccgtcatcgccaaactcgcggagttgccggagtga

SEQ ID NO: 79363 - DNA, 1677 bp, Pseudomonas aeruginosa
gtgattgcggtcgatgcctggaaacctgcggatgggctgattcttgaaccgaatgcactggcggcagccgaggagcgggcgtgcagtctggcgcttaccgcaggccccggagcgggaaaaactgaaatgcttgcgcagcgggcagactttctgctgcgcacggggacctgtcgttatccgaaacgaattctggcaatttctttcaaagttgatgccagcagcaaccttaaagagcgcgtaaagcggcgttgtggttctgagctcgcctcgcgttttgacagctatacctttcacgcttttgccaagcgcatcattgatcgtttccgtccagtgctgacgggcgagtatgcgctggatgttgggtacaaaatcgcagatcgaaagcctggtccatcacgaaccttgatcgaattttccgatctggttccgtttgcgatccagattctgcgacagtctgcagtcgcgagaaacgctattcggcaaacctacagtgacgtcttcctcgacgaattccaggactgcaccaacttgcagtacgagttgctcagaatcgcttttcaaggtacgagaattcgcttgaccgccgtgggcgacaccaaacagaaaatcatgggctgggctggagccatggacggcatctttcaggctttcgttgccgactttgatgccgctccgctcaatatgtaccgcaactttcgctcaaagccgcgactgcttcgcttgcagaacgagatcattcgcaagcttgaccccttatcggtcatgcctgatgagcagcttgccggcgacgaaggcgaggtacttgcttggcgcttcgaggatagtcgtcaggaggctgactacctcgcaggcttgattgaaggttggataaagaccgagcagttgccacctgcggaaattgcggtcctgattcgtaatcagctcgacctgtacgccgatcatttaatggcagcacttgaggcgcgtggcatccccttccgcaacgagcagcagatgcaggacataacggtcgagccggctgcgcgtttgatcgtggactatctctcctgcctatatggtaagcgcgagcccaaagcctggattcggctcatgaatcagctcatcccttttgctgatgaagagattcaatcgaacgcacgaaaggaccttgatcggctcgtcaagcagcaacgaaaagagatagctattgccgagctggtcgatgagccctactcaggctggtgggagttggttcgagcattcctgaggcaagtcagtatcgaaacgctggtgtcgctttccccagactacgagtcacgcgataggttgaaggaggtggttcgcgatacccaggccagaatcgaggaattgctaaagttggagtcggacttacccaaagctcttgagcggttctcagacgaccaagccgtacgaatcctgaccatccataagagcaagggccttgagttcgattcggtcatcatcatggccgtcgaaaacgaaatcttctttggcgatcaggatgaaaaccgatgcgcctatttcgtcggggtttctcgtgctaagaatcgtttggtccttacgcatgccgatcaacgggagcgcccagcgggacattcgaggcgctgggatgtgcaacgcacagctcaaaatgaatactttggctatgccacgccgttctgtaaaaaagagcaatag

SEQ ID NO: 79364 - DNA, 2139 bp, Pseudomonas aeruginosa
atgcacatttctaagctcagcctggtcaactacagaaacttttccaacaccaaaatcctgctccaaaagggtatcaacaccatcattggtgaaaatggatcaggtaaaacgaatctgttccgagcgatcaggctactgctcgatgacaacatgatccgatccgcctaccggttggactcaactgactttcatagaggtctgggaaggtggcaggggcattggatcatcatcagccttgagttcgaggagatctcggctgatgaagcagtccaggccttgttccggcatgggacgggcggcatcgacgatgagacgatcggcaaagccacctacaacctcatcttccgcccaaagaaagagatcaggcttcgcctctctcaattggacgatggcgaccacgctggtctcgctgcgatcctggctccggtcactttggacgactacgaaaccatcttcacgggccgaagcgacgccgacttcaacgacgaggctttctacaaggaggtggtcggtgacttcgagaacgccaggttcaacgaagagatcgagtaccccgccatcggcgccaagattccgagcgtgctgtccgtttccaaggagatttccttcaccttcgttcaggcacttcgagatgtggtatcggagttccacaacaacaggaccaatccactcttgtcgctgctcaagggcaagagcggcgatatcgatccggtggcattccagctcatcaccgatggggtgaaggctttgaatgattcgatcgaggcgctgccggatgtgcaggtcgtccggaccgatatcagggacaccatcaaggatgcagcaggcgaggcgtactcgccctcatccttgtcgatcaagtccgatctgcctgacgaagctgacaaactgttccagtcgctcaagctgtttgtcggcgaatcgggagaaagccacgaagggccgatccatgagttgagcctgggtggcgcgaacctgatcttcctcaccttgaaactgctggaattcaagtatcagaaagccaagcagtcgatcgccaacttcttgctgatcgaagagccagaggcccacatccacacacacattcagaagacgcttttcgacaggcttcagtacgacgacacccagatcatctactcgacccattcgacgcatatctcagaggtcagcaacgttcagaatgtaaatattctcgggcgggagcgtgatcgatgcgaggcctaccaaccgtccacgggcctgagctcagaagagatcggcaatattcagcgctacctggatgcggttcgcagtaatctgttgtttgccaagagtgtcattctggtagagggcgatgccgaagaaatcctgatcccgattctggtcaagaaggtgctgggcatcagtctggatgaactcggaatcagcttgatcaacatccgaagcactgggttccagaacgtagccgttctcttccacgatgatcgaatccgaaagcgatgcagcatcgtcaccgatctcgacaagtccatcattgacacaacgcccgcagggggcgaccccgaggaagtgcttcggcgcaagaaaaagtaccaagcctctcaggacaagggtatcgcccgaaaggcgcttctggacgagtcgttcaaagacaatccatgggtttcgccattctttgcgcctcacaccttcgaggttgatttcgttgccgctggaaatgcgaacaaagtggttggcatcctccctgatatctacaaagatgcgccaaccattgctaccgccaaggcagagcttgagtcaccggacatcgccctttacggccagcgcgtgctgaccatggcgggcaactatgggaaagggtggttcgccatcttgctagggaagaagatcgatccacaaacagccatcccgtcgtacattctcgatgccatcgccttcgcgcacccggtagtcacaaaagaagtctggttcaatgtgctgagctatcgcgtcaactacatcgatgcggaggatctcgtcactgcatcggcggtgtttgatggattcagggccaaattgctggccttcaggaagggagacctcgatttcgttgacatcagaaatgaaatgctggccaccttccccgacgatcgcatcaacgacgtcctcaaggttttctag

SEQ ID NO: 79365 - DNA, 1800 bp, Pseudomonas aeruginosa
atgtttacgtgggacaaggacgatctgaatccagagcaagaagctgccattctggagcctggaagtgtttttctcatcgcatgccctggcagcggaaagacccgcacgctgacctacaagatcgcgtatgagttgtccagactgaaatcgaacaagcagttcgttgttgcgattacgtatacgcaccgcgcggccgacgagatccatgagcgcattgagggccttggggtggacacatcccgactatggataggaacgatccactcgttctgccttgaatggatactgaagccctacggtatctatcacgaggcattggaacggggctaccgcgtgatcgatcagcatgagcgtgagaagattttggaggctctgtgcaagccctaccaaaagccaaagataacgttttgggattgcgaattttatttcactgaaactggctatgtgctttcctgtccgcaagcgtggaaacacaccggcctgcacgccatattgggacagtatttcgagaagctgcaggaaagccggcagatcgactttgaactcattctctactatgcgtatcaactgatcgccagccgtcctgcgatcagcgtccttctagggcagttgttctctttcgtgctgatcgacgagtatcaggacaccaagcgaattcagtactcgatcatcacggccatcttgaaagccggccagggtgcgactaaggccttcatcgtcggcgatccgaaccaagcgatttaccagtcgctcggggggtatccgattgctttcgaggatttcaaaacgatggctggcattgacttgaagaagctcgaactgtcgaagaactaccgctcctctgagcgcatcatcgactacttcggaaactacaacgtccacgacacgtgcattgaagccgcatcgtacgacaaggcatatccgagtcttgtttcgttcgatgccacggtgaacaagacgggcctggaagccgagttgatccggctcatccgcttcaacatcgagactgtcggtatcgcgccccacgaggtgtgcgtgcttgcaccacagtggacacaccttgccagcatgacacgccgtttgtgcgcgagcatgcccgagtattcgttcgatggcccgggcatggttccgtttgcacgcgacactgaaaatttttggtacaggctttctaagatcgcactcacgcaggcatcgccgggaatgtatgtgcgcagacttcgttgggccggtgaaatccttgctgacttggaggcggctggcgctagcgtatccaagctcacccgaaaatcgttgttgagagaatgcaatgcgatccaggtcgatgagacggatggactcacctacctcagcacattcttcgagaggttgttttcaagcctggccatcgattttcgactcttgaccacccttagggagcatcacactgcgttcttcgacagttcgcaagcgcggatcaaccggctgaaaagtgagggcagcgaattcatcggagacatcgggactttcagaaaggtttttcagagccggacgggcatcactatctcaacgatccacggcgtgaagggggcagagttcgatgtggtgatcgcctatgccttgctggaggacatggtgccgcacttcaatgatccgaacggccaagaaagtgcaatgaagcttctgtatgtcattgggtcgcgagcgaggaagaacttgcatctgatctcggagcggggtcgtattcgccagtactctggtgaggagtatcaaatcacccgcaagctcgctgcatgtaattttggttatgaccaggttccatag

SEQ ID NO: 79366 - DNA, 2334 bp, Pseudomonas aeruginosa
atgcatttgaagaagttggccgtccggaatttcaggcggctgcgaaacgttgtaattgatcttgcttccgacatctctatttttgtcggtgccaacaacagcggcaagacatcagtcgggcatgcactccagttattcactggcggtggccgcttcaacattcacgactttagtgccgatctttgggccgacatcgttgcgtttggtgagggcgatggcgaggcgagccttcccacgatggaaatcgacgtttggttcgaaatcggtccggacgatgttcaccgtgtcatcgatcttcttcccagccttgcttgggaaggcaagctggttgggatgcgtattgcctacgcgcccaccaatcccgcggcgacgcatgcacgctatatcgaagtgcgccagcgcgtgctcgatgcggtcgctaagggtgaagacggagcgcccgccttcgatccctcgccacgtaacctgcgggagttccttcgcgacaggctacatgacgaatatgagctgcgctatttcgtactcgatcccgcgcggttcgatgcgaagatggtggcagaggctggctatgacccggccacgctcaccggacgcgaccggagcggccgtgagatcttgaagggccttctccacattgacttcttgaacgcacaacgccatctctcggacggcccaggtggctctcgcgccgaggatctctcccgtgtactcagtcgtttctacgggcgcaacctcgaacagaaaggcgaagatatcgaagcgttgcgcgccctcgcagcatccgaagtctcgcttaatgagcatctcgaacgagtgttcgaaccgacgctcaagagcttgtcgaagctcggctatccgggcctctcaaacccgcgcatgatgatccgctcggccctcgaccctgcccagatcatgagcggtcgagatggcgcgatcgttcactatgcgttgggagccgatgacgggaagcccgacccgcctaccttgcccgatcgatataacggtcttggcttcaaaaacctcatcttcatggtggtcgagctactcgacctccacgctcaatggctggcggtcgaggaaaaccgtccgccggtccacctgatcttcatcgaggagcccgaagcgcacctccatgcccagcttcaacaggccttcatccgcaaggtgatggacatcctagcgctcaagggcgaggaccgcacgcactatacgagccaagtcgtcgtcacgacccattcgactcatatcctttacgaacgaggcttccggccgatccgctattttcgtcgaagccgtgcacagaatgtgtcgacctccgatgtgctcaacctctcggttttctacgacagcaccgatccggacatccgaagcttcctcgagcgctatttgaaactcgcgcactgcgatctgttcttcgccgatggcaccgtgctagtcgaaggcaatgtcgaacggctgctattgccgcagatgatcgccaatgccgcgccgcggctgcaatcgacctatctcaccgtcctagagatcggcggagcgttcggttaccgattcaaaacgctgatcgagtttctcggactgacaacgctcatcatcaccgatctcgacagcgtgtttggtccactgggacaggatggcgagggtgcggcacccgctggtcaaccagaggccgcggaaccagccgccgagaacgcgcaggctgccggcgctcacgctgaggatattgacgatgacgaggaggatttgcctgcggctgcggagaagcccgggaaggcgtgcatagccggtcatccgggcgcggcgacgtccaatcagactttgcttcaatggctaccgaaatgcgacgcggtcgccgctctgtgggaggcgacggctgagcagaagatccaggcgaggacggacgacaatgacgctttggtacgcgttgcctaccagtgccggaccgatgtcacttggggcggagaaaccctggcgctggccgggcgcacgctggaggaagcattcgcactcgaaaatcttggctggtgccaagacaagaaccgtaagccgcttcagctccgcatcgccaaggccgacgagaagaacctgaccacgcttgcggaacgcatccacaagcgcgtgcaggctaagagcttcagcaagacggacttcgcgctcgccttgttagccgaagatccgagcagttggtcggtcccaacctatatcgccgagggcctgagctggcttgagaccgagattgcgccgccggaaccggacgaggatctgccgcatgaggaccagccgcatggggaagcgccccagggtgcaccggccgccgccaacgaggtagcagcatga

SEQ ID NO: 79367 - DNA, 1878 bp, Pseudomonas aeruginosa
atgacaagccgggtcggcagtcctgacacacaagccgatctagatgttcgagcttgtctcgatctgacgccgccacgctcgtttgtcgtggtcgccggtgcggggtcggggaaaacgacctcgctgatcaaggctatcgcgcacctagccgaaactcgcggtcctgccctgcgccgcgccgggcagcaaatcgcctgcattacatataccgaagtcgccgtcggtgagatttcggccgatgtcggggcctcgccgctattccacatctcgactatccacagtttcctgtggtcagtcatccggccgttccattcggatgtcgcgacttgggtagccacccgcatcgacgagaagatcgcggagcgacgcgcgcactacgacaagcctcggactcaggcgaaaacgaaggcccgcctcgaacaggagatcgcagatctcgaagccgagctgactgcgatcagtgaagtagagaagttcgtctacggcaccggcagcagctacgctgagggcattcttggccatgacgatatcctcaaactcaccccagcctgcgtcgcagcgcatccgctgctgaggcaactcgtcgctaagcgctttccctacatcttcgtcgatgagagccaagacaccaatccggaggtcgtcgaggcgttacggcacattgcgggcgaacatcctggcttgtgtgttgggttctttggagacccgatgcagaagatttatatgagcggagcaggcgctgtcccgctgaacgacggctgggcggagatcacaaagcccgagaacttccggtgcccgacatcggtgcttggggtcatcaatgcaatccgcgcccctggcgacggtcttgagcaggtgcgtggtcggacgataaccgttgatggcatcgagcagccgcttgccggtacctccaatctgttcatcctgccggcggacgcggagcggagtgcgcgcctcgcggccgttaggcagtggctggccaccgaaaccggcgacgctctgtggctaagcgacgtgcgggaaggcgatgtccgcctgcttgtactggtgcaccgcatagcggccaaccggctcgggttccctaatctgtatgctgcgctcaatgaccgagccccaatgagtctgagtgaagggctgagcgatggcacagcctggccgctccgtccacttgtccagcacatacttccgctagttgtcgcggcgcaagcgggcgatcggttcacagtgatatcgaccttgcgcagcgaatgcccgaggcttgaaccagcgcggcttcgaggacaagcgacggcccccgttcttacagcgctacagcaagcgctcgacgggcttgttggtctgttggcagcaggatcgcaggcgactatccgggacgtcttgacgcatgtgcgagatcacgagttgctgcgccttgatgatcgcttcgccatgcatctggttgcagagcctgtggatgacggcagcagcggtttcgagaacgttcaagcctatctggcatgcggtgtcgacgaactctgggcctaccggcgctactttacagaggagtcaccgttcgccacgcatcatggggtgaagggtgcccaatttgagcgcgtattggtcgtcatcgacgatgaggaagcgggcttccggcagtattcttacggcaagtatcttgggtacgtccccctctcggacaaggacgaagccaatctggcggcaggtgaagagtccgtacttgatcgaacccgtcgcctcttctatgtgtgctgctcgcgagcaatgaaggacctagcagtcgtggtctttgtgcccgaagtcgcagcggcccgcaatgcgatcgttgcgcagaatttattccccgaggccataatccgaggtgcggagcatctgggctga

SEQ ID NO: 79368 - DNA, 2139 bp, Pseudomonas aeruginosa
atgcacgtatccaagctcagcctggtcaactacagaaactttgccaatacaaaactactattccaaaaaggtatcaacacaattattggcgaaaacggatcaggtaaaaccaacctgtttcgagcgatcaggctactgcttgatgacaacatgatccgctccgcctaccggcttgattcaactgactttcatcgcggtttggaacgatggcaagggcattggatcattattagcctggagttcgaggagatttcggcggatgaagcagtccaagccttgttcctgcatgggacggccggcatcgatgatgaggcaatcggtaaggccacctacagcctcatcttccgcccaaagaaagagatcaggcttcgcctttctcagttagacgatggcgaccacgctggtctcgctgcgatcctgaatgctgtcactctagacgactacgaaaccatcttcacgggccgaagcgacgctgacttcaacgatgaagccttctacaaagaggtggttggtgactttgaaaacgcccgattcaacgaagaaatcgaatttcccgccatcggcgccaagattccaagtgtgctatcggtttccagggagatttccttcactttcgttcaagcgctgcgagatgttgtatcggagtttcacaacaacaggaccaatccgctgttgtcacttttgaagggcaagagcggtgatattgatcctgtggcattccaagcgattaccgatggggtgaaagcattgaatgactcgattgaggcgttaccggacgtacaagtagtccgagccgatatacgagacaccatcaaggacgcagcgggcgaggcttactcgccctcatctctttcaattaagtctgatttgccagatgaagctgacaaactgttccagtcgctcaagctgtttgttggcgagtcaggagaaggccacgaagggcctatccacgaattgagcctgggcggcgcgaacctgatcttcctcacattaaaactgttggaattcaagtatcaaaaagccaagcaatcaatcgccaacttcctgctaattgaagagccggaggcccacattcacacacacatccagaagacgctctttgacaagcttcaatacgacgacacacaaattatctactcgacccattcgactcatatttcagaggtaagtaatgttcagaacgtgaacattctcggaaaagagcgtggtcgatgcgaggcctaccagcccgccactggtttgactccggaggaagtcggtaatatccagcgctatctggatgctgttcgcagcaacctgctattcgccaaaagcgtcgttcttgtagagggcgatgcggaagaaatcctgatcccgattttgatcaagaaggtgcttggcgtcagcctggatgaactcggcatcagcttggtcaacatccgaagcaccggctttcagaacgtcgcagttctattccacgatgatcgaatccgaaagcgatgcagcatcgtcaccgatctcgacaagtccatcattgacacaacgcccgtcgctggcgactctgaaagactgctccggcgcaagaaaaaatatcaagcatctcaggataaaggaatcgccagaaaggcgctgctggatgagtcgttcaaagataatccatgggtttcgccgttctttgctcctcacacctttgaggtcgattttgtcgcggccgggaacgctcgtaaggtggtgggtattcttcctgatgtctacacggatgccccaaccatcgtgacagccaaggcagagctggagtctgctgacattgcgcgatttggccaaagagcgctgactatggcggacaactatgggaagggatggtttgccattttgcttgggaaaaagatcgatccggaaacggccatcccggagtacattctggacgccatcgccttcgcgcatccgatagtcacaaaggaagtttggttcaacgtactgagctatcgcgtgagctatattgacgagaatgagatttttactgcacctgcggttttcaccgaattcagggaaaaacttttagcctttagaaaaggtgagattgatttcgttagcatccgaaacgaaatgctggccaccttccccgacgatcgtatcaacgacgtccttaaggtcttctag

SEQ ID NO: 79369 - DNA, 1800 bp, Pseudomonas aeruginosa; identical to SEQ ID NO: 73795

SEQ ID NO: 79370 - DNA, 1953 bp, Pseudomonas aeruginosa; identical to SEQ ID NO: 74520

SEQ ID NO: 79371 - DNA, 1668 bp, Pseudomonas aeruginosa; identical to SEQ ID NO: 74521

SEQ ID NO: 79372 - DNA, 1953 bp, Pseudomonas aeruginosa; identical to SEQ ID NO: 74520

SEQ ID NO: 79373 - DNA, 1668 bp, Pseudomonas aeruginosa; identical to SEQ ID NO: 74521

SEQ ID NO: 79374 - DNA, 1791 bp, Pseudomonas aeruginosa
gtgcatttagccgaattgaatatctccaatttccgcaagctccgcgaggcgaagctttgttttcaggccggtttgaacgttttggtcggtgccaacaatgtgggcaagagcgccgttgtcgacgctctacgggccttgctagccggtcatgaggagccgtatccgcgcttcgacgtggaagaccgccaccgcccacaggagggtgagcctgagggagacatcgactttcactatgtattccgagaccttagccatgatgacgaggcggatttcctcgctgcgctgaaacccgggctcggtggccaaatggaagcgcacatccacgtgcgttattcggacgcggacatgaccggccgcttccgggtcaaacgctggtgtggagatcacgaggatgttcctctgtcctccgacatgatggagaacttgcgaggggtgtaccttcagccgctgcgcgatgcatcgcagagtttgcgccctagcaggaacagccagctttcgcgtctgttacacctgttcactgacggagccggccgcgagggaatcaatgaagccctacgggatctggatgagcaacttaagcagcacgcccccatcctcaatacccaggcggccattgtcacccgccatagcgatatgctcggcgaccagctcgcccaagcacttgccgtagggctaagcgccagcgacttccagcgtctgtcctctcgcctgtcgctttccgtagatgcattcgaaatcgaacagaacggcctgggctttaacaacttgatcttcatggctgtggtacttagcgagctggccaagaataccgatgctacgtaccgcgggctgattgtcgaggagccggaggcacatctgcaccctcaacttcaggctgtgctgctgcgctacctggccagcctgtcggtggtggcgggagaaaagcctgtgcagctcttcgtcaccagccattcgaccaactttgccagcaacgccaagctcgattgcttggcctgccttgttgagtccgaggaccgcgtagagacgttctttccccgcaaagttcagtttaagaaaggcaagcgcgagaagcttgagcgctacctggacgtgacccgtgccgagcttttctttgcccgccgcgtgatctttgtagaaggagcggccgaactaatgctggtcgatgcactggcgaccaaagccggctttgatcttcgcgccaacggagtgagcctgatcagcgtcgaggggctgaattttgactctttcctacctctcttcggtgaaaacgcactgagaattcccgtcgccctaataaccgatgctgatccccaggcacaggcagagaaggctgaggacgaaggggacgaaggggacgaaggggacgaagaggccaagcgccaaaagaccaaggccttgtatccggcgctgggcgacgaggtggtggtgtcccgtaacacagcgaaaatgaaggcccaagaagatcgctatgtgaaggtctttcatggcgtgaagacgctggaatacgatctggccctccatgaaatcaaccgcgaggcaatgctgaccgccttggctgatccgcatccgaagattgccaaggcattgcgcaaggcggttgaagccgaagaggacaacaccagcaaggcccgcgtgctgttccgtagcatgtttgagcgacggcagaacaacgtgcagaaggggcgcttcggccaagcactggcccaggtgattagtgacggtgcaaattgtgaggttccggactacatccggaaggctatcgagcacgtctgtcaggtggaggagcgctga

SEQ ID NO: 79375 - DNA, 1728 bp, Pseudomonas aeruginosa
atggatttatccgccgagcaacaggccatcgtcgatgcccccttggttcctctcgcggtgatcgcctgcgctggcagcggaaagactgccacggcggtccgtcggttggtcgaaatgcgtcggctcctcgccgaggaccgtgggcgggtggccttactatcgttctccaatgtggccgtgaacactttccgtcgaggctatcaggggcttgcacagaagttgcccgacagtgccggccgaggtcgggtggacatcgacactctggatggtttcattacgagccacatcctgcgccctcatgcattcaggacgatgggggcgtttcaggcagcctttctggtgaccggatcagaacccttcctagctggtttcacctgcaagacagggaactttcccatacccatcaatcaggtgaaggtcggtattcagggtggagagccgttcttctactacgactaccgcggtaacccggagctgcttgaccagaatgcggccaagcaggtggtcaccaggctcgggcgtacaggcgcctacactcatgaccttggccgctactggtgctatcagacccttcgcaaccagccggaagtgctgcgggcattggtccgacgctatccacatgtgttggttgacgaatcgcaagatatcgggacgctgcatcaggccattcttgagctgctggctgatacaggcgtacagatgtccctcattggtgatccaaaccaggggatctatgaattcgctggtgccgatggaaacttcctgcgcaactacgggaacaggggaggtgtcgatgcctatgccttgacccgaaactatcgctccctccctcctatactaaatttggcgaacaacctatctgggcgtcatgacgagcctaaccgcgaggccgaagtggggacaaatggtgcctacttcattggatattccgaggcagagttaccgcgtctagtcgatgccttccttgccgaagtcgccagtctcgggttgcggacagaggacgccgccattctctgcagaggagcttccctggcggaccaactagccggagtgattgccccctccggtagaggcaccgtcaaactctttgtcgaagccgccctgcatagggacatgcacagtcacttcttggatgccttcaaagcggtgtcacgtgcagtcatcagcctgctggagaatccaccaaaggagcttctgacaaagctgatatccccctcgcaggacgcgtcgttgcgcgagctcaggcggcgtctttggaccttcacccgtgatcccgaactcggactaccgtcctctgaactggcggctgcgactgagtggcaccgtcttttgctggagcatgttcgcaccttgctcaatgggatccagcaagatttcggtttggctcccatcgatcgtctggggaataagcttgcgcgaacggagttgccagacggccccctcaatggtggggttgatctggctggggaagcacggccacggatccgcatagacacggttcaccaggccaagggcgaaagcattgatgccgtactgtacgtggccactcgtcaacatattcaggctatgttggatggcgtgcagactgagctggggcgcatcggctatgtagcagtaactcgggcgcggaatctcttctggctgggtgtcccgtccaaagccttgaaggcactacgcccggcgttgctggctgctggattccaggaagccggcaagcgtaaggtatga

SEQ ID NO: 79376 - DNA, 1953 bp, Pseudomonas aeruginosa; identical to SEQ ID NO: 74520

SEQ ID NO: 79377 - DNA, 1668 bp, Pseudomonas aeruginosa; identical to SEQ ID NO: 74521

SEQ ID NO: 79378 - DNA, 1953 bp, Pseudomonas aeruginosa; identical to SEQ ID NO: 74520

SEQ ID NO: 79379 - DNA, 1668 bp, Pseudomonas aeruginosa; identical to SEQ ID NO: 74521

SEQ ID NO: 79380 - DNA, 1905 bp, Pseudomonas aeruginosa
atgaagcttcaaacgattcgtctatcgaatttccagtcttttggagtacagcctactgagctcgggctggatgatattacatacctgattggccccaacggctcaggtaagacagctgcgctccaagcgctttgccgcctgtttgctttcgatccatccttgcgccgcatcctgcgatcagactttcacgtccccttcgatgaggagatcgtgccggaagagcgccagctctggatagaggccgatttcctcttcccggagctggcggaagatgaagacaacagcaccgttgctcctcactttggccacatgcggcttgatgaggcggatggaattccgcgtgttcgttttcgcctcagtgccaccatgggcccggttggtgacatagaagagaccttggtttatgtcttggacatcaatgcggatggttcgccgctcaacacagcgcaagtgccccgttctgagcgcaaccatatccatgtccactacctgccagcccgccgtgacccagctgatcacattgcctacggcgccaatgcgttgctcgggcgcatgctgcgtgcggtgaactgggatgcagagcgtgatgttatcaagggtctcactgaccaaatcagcgacagtctggcggccaacccatcggtagatgcattcagcacaagcttgaaagcggcttgggatactttgcacaaaggcagtttctttaccgacccgaaaatcaccttcgtggcctctgaggtcgaagccttgttgaggcatatgtcggtttccttttcgcccgggcacgatgagcagttggttgacttctcacgtctgagtgatggccagaaatccatgctctacctgtccctcgtgctctcgtcacaggccattggtcgcgccgtactggctgaagaggacaaatcattcgatgtcgacaagttgcggccaccagtttttaccttggtggcagtcgaagaaccggagaacagcctttcgccccattacctcgggagaatcgttaattctctgaacttgatgacaggtaatggcgacgcgcaagcgctgattgctactcacgcgccgtcgatgctgcggcgcgttgctcccgaacggatccggtatctgcgtctgaccgaggggcgaacatcgcgcgttacccatatccagttgcccgataccgcggacgaagcacacaagtttgtgcgtgaggctgtgcaagcctttccggaagtctatttctcccgccttgtggttctgggggagggcgatagcgaagaaatcgtgcttcctcgactccttcaggccaaaggtgctcctgttgacgagtcggcagtctcgatagcgccgctgggcgggcgtcacgttaatcacttctggcgattactgtctgccctgaaaattccttacctgacgctgcttgatctggatgtcgcgcgccatcaggccggctggggtcgaatcaaatacgtgaatgatcaattgggtaaatatcggctagatcagcagcttcccaaggattatggcatcccaaagtgggactcgaccgagaatatggttcgggacttcgacaactatcttgaggcgcttgaggatagagatgtgtacttctcgtaccccatggacctcgatttcgcaatgctactcgcctacccggacgcctacggcgtagtgagagaaaagcccgatgagtcaacgatcaaggctgtccttgggaaaagtcaccacgatgcaagtcaatacagcgaggacgaacagaagttgttcggcacatatcaccgcagcttcaagcttggcagcaaaccggcagcgcatattgatgcgctcgccaagctcagtgatgagggcctgctcgcgaacatgcccgaatctctcggacgcttggccgatgccgtgatcgccaaactcgcggagttgcccgagtga

SEQ ID NO: 79381 - DNA, 1677 bp, Pseudomonas aeruginosa; identical to SEQ ID NO: 71997

SEQ ID NO: 79382 - DNA, 1953 bp, Pseudomonas aeruginosa; identical to SEQ ID NO: 74520

SEQ ID NO: 79383 - DNA, 1668 bp, Pseudomonas aeruginosa; identical to SEQ ID NO: 74521

SEQ ID NO: 79384 - DNA, 1953 bp, Pseudomonas aeruginosa; identical to SEQ ID NO: 74520

SEQ ID NO: 79385 - DNA, 1668 bp, Pseudomonas aeruginosa; identical to SEQ ID NO: 74521

SEQ ID NO: 79386 - DNA, 2337 bp, Pseudomonas aeruginosa; identical to SEQ ID NO: 72916

SEQ ID NO: 79387 - DNA, 1878 bp, Pseudomonas aeruginosa
atgacaagccggatcggcagtcctgacacacaagccgatctagatgttcgagcgtgtctcgatcggatgccgccacgctcgtttgtcatggtcgccggtgcggggtcggggaaaacgacctcgctgatcaaggctatggcgcacctagccgagacccgcggtcctgccctgcgccgcgccgggcaacaaatcgcctgcatcacatataccgaagtcgccgtcggtgagatttcggccgatgtcggggcctcgccgctattccacatctcgaccatccacagtttcctgtggtcagtcatccggccgttccattcggatatcgcggcttgggtagccatccgcatcgacgagaagatcgcggagcgacgcgcacactacgacaagcctcggactcaggcgaaaacgaaggcccgcctcgaacaggagatcgcagatctcgaagccgatctggctgcgatcagtgaagtagagaagttcgtctacggcaccggcagcagctacgctgaaggcatccttggccatgacgatatcctcaagctcaccccagcctgcgtcgcagcgcatccgctgctgagacaactcgtcgctaagcgctttccctacatcttcgtcgatgagagccaagacaccaatccggaggtcgtcgaggcgttacggcacattgcgggcgaacatcctggcctgtgtgtcgggttcttcggagacccgatgcagaagatctatatgagcggagcaggcactgtcccgctgaacgacggctgggcggagatcacaaagcccgagaacttccggtgcccgacatcggtgctcggggtcatcaatgcaatccgcgcccctggcgacggtcttgagcaggtgcgtggtcggacgataaccgttgatggcatcgagcagccggttgccggtacctccaatctgttcatcctgccggcggacgcggagcggagtgcgcgcctcgcggccattaggcagtggctggccgccgaaaccggcgacggtctgtggctaagcgacgtgcgggaaggcgatgtccgcctgcttgtactggtgcaccgcatggcggccaaccggctcgggttccctaatctgtatgctgcgctcaatgaccgagcccccatgagtctgagtgaagggctgagcgatggcacagcctggccgctccgtccacttgtccagcacatacttccgctcgttgtcgcggcgcaagcgggtgatcggttcacagtgatatcgaccttgcgcagcgaatgcccgaggcttgaaccagcgcggcttcgagggcaagcgacggcccccgttcttacagcgctacagcaagcgctcgacgggcttgtcggtctgttggcagcaggatcgcaggcgactatccgggacgtcttgacgcatgtgcgagataacgagttgctgcgcctcgatgatcgcttcgccatgcatctggttgcagagcctgtggatgacggcagcagcggcttcgagaacgttcaagcctatctggcatgcggtgtcgacgaactctgggcctaccggcgctactttacagaggagtcaccgttcgcgacgcatcatggggtgaagggtgcccaatttgagcgcgtattggtcgtcatcgacgatgaggaagcgggcttccggcagtattcttacgggaagtatctcgggtacgtccccctctcggacaaggacgaagccaacctggcggcaggtgaagagtccgtactcgatcgaacccgccgcctcttctatgtgtgctgctcgcgtgcaacgaaggacttggcagtcgtggcctttgtgcccgatgtcgcagcggctcgcaccgcgatcgtggcgcagaatctattccccgaggccgtaatccgaggtgcggagcatctgggctga

SEQ ID NO: 79388 - DNA, 1905 bp, Pseudomonas aeruginosa; identical to SEQ ID NO: 79380

SEQ ID NO: 79389 - DNA, 1677 bp, Pseudomonas aeruginosa; identical to SEQ ID NO: 71997

SEQ ID NO: 79390 - DNA, 1905 bp, Pseudomonas aeruginosa; identical to SEQ ID NO: 74222

SEQ ID NO: 79391 - DNA, 1674 bp, Pseudomonas aeruginosa; identical to SEQ ID NO: 74223

SEQ ID NO: 79392 - DNA, 2355 bp, Pseudomonas aeruginosa; identical to SEQ ID NO: 73986

SEQ ID NO: 79393 - DNA, 1953 bp, Pseudomonas aeruginosa; identical to SEQ ID NO: 73987

SEQ ID NO: 79394 - DNA, 1851 bp, Pseudomonas aeruginosa; identical to SEQ ID NO: 75378

SEQ ID NO: 79395 - DNA, 1650 bp, Pseudomonas aeruginosa; identical to SEQ ID NO: 75379

SEQ ID NO: 79396 - DNA, 2298 bp, Pseudomonas aeruginosa
atgcgtatccagcacttggagctcgcgaattttcgcaagctgaagtccgtcagaatcgatttagccgccgaaacgactctcttggtgggggccaacaatagcggtaagtcgtcagcgatgctggcgttgcgcaagttcctggttaagcccacgacgttccgattgcaggatctgaccctctgccacatcgccacgcttgatgcgattgggcgtgagtgggaacaggcggatgaaagcttcacgattccgaaaaccaacacctgggccgactggctgccgacactggatgtgtggatacacgccgcgcagggtgagctccaccacattcgcgatctgatccccaacttttcttggtcaggcggcatggtgggaatgcggtttcggttggagccggacgaccttccaatgctgtactccgattaccgaaaagagcgaacgcgtgttgccaagcttctagaggaaatacagaaccaggctgcggatggacaggagcggcctcctttgcagttatggccgcaaaaccttcatgactacctcaaccggcgcctggtgaaaacgttcaaggttcgttggtaccgtttgaatcccagcgagctttcaccccctaaccccaagactagaaccgccccccttcaggcactggccgatactgcagtaccgcttgaccgaaatccacttctgaaccttatccgcgttcacgagatcaatgcacagcgcggatttggggatagtgccgacgaaggacaagaagagagcaaggctggtagcggccgaaagctatctgagcagctacgcacctactatcgccgccaccttgaccctggcgatagtccagatgtgtcagatctggaagcgctgagggcgattgaggcggcacaaagtgcctttgacagcagactcacaagcagctttgcgccggcgcttagggaagtagcgggcctcggttacccaaacaacagcgatcccagcatcaaggttgcaactcgcctcggcccaacagacggactggatcatgaggccgctgtactgtttgagctggactcggttgcgggtgcaccaggtgaaccgcgcttgagtcttcctgagacatccaatggactgggttaccagaacctcatttccatgatcttccggttgatggcgtttcgtgatgactggctgagaaagtcccgcactcccgaggagcgcagtgctgctaacgttgagcccatccatctagtgctggtcgaagaacccgaagcacacctgcacgtccaagtgcaacaggcattcataaagcatgcataccatgtgctgtgcaatgatccgttgcttgaggagttcccgaacctaagaacccagctggtcgtcagctcccactcaagccacgttgcgcatgaaatcgagtatgagcacctgcggtacttcaggcgccttccatccggtatggcggacatccccatccccgtgtccaccgtctcaaacctcagcacagtattcggtcaagccgggaagaccaaagagttcgtcacgcgctacttgcgagcgcatcacgcagacctcttctttgcggacgcagtaatcctggtcgaaggggctgcagagcgaatgattctgccccacttcttgcggcagcatttcaaatttcttgatcagtgctacatcaccattctcgatatcggaggaagccatgctcatcgtctgagaccgttgatcgacgcattgggcatcgcgacgctggtgattaccgacctcgatgcaggaaaaaataaggcagcccaacctgtagctagaggggctgatcaggtcacgaacaaccccaccgtccgccattggatgcggggaacagggctcggtcatgacgtggatacattgctcgacctggacgactcgcacaaggtggaagagatcgatgacctctattcgatcagaatcgcctatcaaaccccagtgacgatccggcttccaaaatccggcgcggaagccgaagcgttgccaaacacgttcgaggacagtctcgtattgagtaatgtccagcgcttcaccggaaagcctcggcgcggattgatgcgtgcgttcagcgaggccattcagaacgccgatacagtacaagcgttgggggtggctctgttcgagaagctacgtactggcgacaaagcggaattcgcattggaggtcctgggcgatcctgacttcggtcagctcgtggtaccggcctacattcacgaaggtttgacgtggctgcaatcgaaacttgagctcaaacgcaaagatcttctggtcgttccgcccgctatcgtcgaggtgacagaagaatga

SEQ ID NO: 79397 - DNA, 1872 bp, Pseudomonas aeruginosa
atgaatccagcaacgactgagcatggcgatcacatccgtaatgcagatgaggtgatccgggattgcctggacttagatcacccacagagcttcttcctgtacgccggcgcagggtcaggaaaaacacattccttagtcacagctgtgagcgagctgaaatcgcgtgaacacaaaaggctgaccttcgaagggcgccaagttgccatcatcacctacaccaatgcggcgtgtgaggagatcgcccgtcggctagagcacgatcccttggtggtcgtatccaccatacacgcgttttcctggcgaatgatccaaggcttcaatgacgacatccgtgaatggctgcgcatcaaactcgcggaggatattgctgagctgaacgataagctcgccagagccaggggagacaacaagacggcgcgtgcaaaccgtgcatccctcgaaagcaaaacacgacggctggcagcactgggcgacgtcatcaactttacctacagtccaacgggggagaaccgggggcgccaagcgctgaatcatgccgaggttgtccagatggcggcagcctttattcagcggcctccgttgctggatgtgatggccgatcaatacccgatcctcctgatcgatgagagccaggatacctacggcccactcatggatgctttccttaccgcccaatcactgatcccaaagcggttttgtcttgggctgctgggcgacaccatgcagcggatctacaacgatgggaaagagcatttggagcaggccatccctgctcactgggccatcccagagaagcccgtgaacagacgatgcccaacgagagtggttgaactgatcaacatcattcgccgggccgccgacgatcatcaacagaccccacgacccggtgccatacgaggggccgtacgtatgttctgcacccggcaggttgctgctggtggatttgagttggaggcgcagatcgctcagcggatgtcgcaagtcaccggcgatgagcagtgggccgctggaacctcggcgcgaaaaacgctcatcctggagcacaagatggctggcaggcgcctcggttttgagggggtctttaccccgctctacgcagctgagcatctgcgcacaagcttactggatggcacgctaccggtactcagacttttctttgagggcctcatgcctatcttggacgccgccaatagcagcgaattcgccctcatggaagccgtacgattgaggtcacccctcctcgatgctgagcacatgagagttgctcccaaccaacttgcactgcttcagcaggttggtgctgcctgtcaaactctgtgtgggttgttcagcgacaacgaccctcccctggccgagattgtgcgggtgctagcggaaacggggctgctcgaaataccagatcggctcagagcggccctcgtgctaggtgtgaccgacgaggagccccctgagaccgtcgaccgtgaagcgcttgaggtgcatgcctaccgggtgctgttggggcgacattattctgaaatggccgcattcgcagggtacgcccaaggcttgtcccctttcgatacccaccaaggggtgaaggggttggagtttccaagagtcatggtgatcctcaacgatgaagaggctggagggttcctcttcagctacgagaagctgctgggcgttgagccgccctcagcgaacgacatcaagaatcagcgggcaggtaaagatgacgcgctgtcccggacgcgacgtttgttgtatgtcacttgcagccgggccgaggaaagcctcgcgattgtggtgtacaccgcgcaacccgagctcgcgaagcaacgggttatcgaggccggctggttagagcccgaagaggtggagatcgtatga

SEQ ID NO: 79398 - DNA, 2337 bp, Pseudomonas aeruginosa; identical to SEQ ID NO: 73776

SEQ ID NO: 79399 - DNA, 1878 bp, Pseudomonas aeruginosa; identical to SEQ ID NO: 73777

SEQ ID NO: 79400 - DNA, 1785 bp, Pseudomonas aeruginosa
atgagggtttctcgggtcaggttgatcaatttcgccaatttctcggatgttgatgtcgagacgggggaaagtatcgtcatcgtgggagagaacaaggttggcaagagcaatttcattcgcggcctgcagttgatccttgatccgggcttgtctgaacgcgatcgacaactggggcttgaacatttctgggacggacttggcgaagacaaggttggtgcgaccattgaggtctctgtggatctaacggacttcacaaacgatccccggctgatggctcacctcaacgattgcgtgattgatcctggcccacccatggtggcccgactcacctaccgcttccagcctaaggcgggcctggggcgcgccccggaatcgttgaaggactatgagtatgtgatcttcggtggcaacgatcccgaaatgcgtatcggcggcgcacttcgccggatgttgccaatagatgttcaggtagccctgcgtgacgctgagaaggaccttgcgagctggcgcaattcgccattgaggccactcattgaggatcttgccgcgtcgttggatgatgacgcccgtgaggagattcagaatcaggtcgaccaagcacagcgagagctggctggacacgaggaagtggtagcgacagcagaacggatcagcgaacggctgatcgcaatcgccggggggcaacatgctgtcccggtatcgctcggacttgcacctacacgagtggatgcattgctgcgtagccttcggctgcttatcgacaacggtgttcgcggtgtcggcgatgccagcctaggaacggcgaatctgatcttcctggccttgaagagcctcgaactcgaccgtctcgtctccgagggggagcgcgaccacacattcttcgtcgtcgaggagcccgaagcgcacctgcatccgcatgtccagcgtcttgtctatcgctactttctcggcacaagagcggaagatgaggacgaagcccctccactgacgacaattctcactactcactcgccgcatatcgcaagcgttacaccgattaggtccatcgttctcctgcgtcataacgcaacggacgggaaaaccgtcgcggtttcgaccgcgaacacacctttcacacagagggatgaagacgacctccagcgctacatcgacgtcactcgcggagaaatattattttcccggggagtgattctggttgaaggggacgccgagcgcttcatcattcccgcgttcgccgacgccctcgggattcctttcgacatacttggaatcactgtgtgctcggtcgggggggcgaacttcactccttatgtgaagcttttgggccctaaagggctaaatattccacatgtaattttgacagatcgcgacccggtcaatggcaaacctccactagcccacaggcgattaattaatctcttaaacgaggtcgatgacgaatatggttacgatgacctggatatagatgaggtgctcaaatacgccgcagagtttggatacttcgtcaacgagagcacgctggaatccgacctatttgccgccggaatgaccgaggcgatgaagtcggtaatcgagcaggagttgccgctgaggcaagtcacccgggacgcattgcaagagtgggtggatgatccggatcaggtcgatgaagaccggctgctgaagttgattgaacggattggcaaggggagatttgcacaggcacttgcgccgtcggtgtctgaggacgtttgcccggcctacattcgctctgcgctggagcatatccgcgatgccgtcgcgtaa

SEQ ID NO: 79401 - DNA, 1338 bp, Pseudomonas aeruginosa; identical to SEQ ID NO: 73899

SEQ ID NO: 79402 - DNA, 2397 bp, Pseudomonas aeruginosa; identical to SEQ ID NO: 73790

SEQ ID NO: 79403 - DNA, 1932 bp, Pseudomonas aeruginosa; identical to SEQ ID NO: 73791

SEQ ID NO: 79404 - DNA, 1905 bp, Pseudomonas aeruginosa; identical to SEQ ID NO: 72778

SEQ ID NO: 79405 - DNA, 1677 bp, Pseudomonas aeruginosa; identical to SEQ ID NO: 71997

SEQ ID NO: 79406 - DNA, 2409 bp, Pseudomonas aeruginosa
atgaagctacaggcatatcggctgcagaactatcgccgactgcgcgacgtcgtcattgagcttgacgacgagatttccatcttcgttggcgccaacaacagcggcaagacgtctgccgtacaaggcctgtactcgatgctccgtggcgaagcgaagaagttcgaactcttcgacttcagtgcggcgctgtgggccgagatcgacgcggtcggcaggacgccccctggcgatgaggatgcgcccaaaaggttaccgtccatcctcttggatctctggttccgcgtcggtgaagacgaccttgccactgcgatgtcgctgctgccgagcactgagtgggacggcaagtgcgtcgggatccgggtggcgttcgagccgcgggatgcccacgagctcgtctggaagttccatgaactacatgagaaggccaataacgcagctgtcgcgcttgcggccaagcgcaaggccgccggggagcaagccgtggaggcgggcgcggaagacgcggctgcggtggtggccgatgccggcgagtacaagccttggccagaaagcctgacgaagtacctcaccagggaactgagcaaggaatacaccttccgctactacgtgctcgatgagcgggcttttgtcggctatcaggcaaaggaggccgactacgagccgctacccttaggcaaggagccgggcggtgcggccattctcaagtcgctggtgagggtcgacttcctgcgcgcgcagcggcacctcgatgacccagatgccggtagttctgatcgcgcagagagcttgtcgcggcgtctgagcaggttctatcaccgcaacctggagaagcgtggcgacgaccatgcggctctcaaggcgctagatacctcggagaaggagctgaacttccacctgaaggaagtcttcaatgacaccctcacgcgcctggccaagctcggctatccgggcgtcaacaatcccgagatcgtgattcgggcggccttggatccgaccactgtcttggggcaagacgccaaggttcactacgtgatcccgggcgtagcttccgcccaactgccagacagctacaatggcctggggttcaagaatctggtctacatggtggttgagctgctcgacttgcacgagcagtggaaagccgaggaggacaagcgagctccgcttcatttggtcttcattgaagagccggaggcgcatctgcacgcgcagatccagcaggtcttcatcaggaacgttttgcgcctccttgaggatgctaacgatcacgcgactttgttccacacacagctcgtcatcaccacgcactccccgcacattctctatgaacgcggattttcgcccattcggtatttccgccgcgtcagcgaccagttgggccatcacacggatgtgcgcaatctgtcgctattcaaaacggacgcgtccgatgctccagcgcgcgaattcctgcagcggtatctgaagctgacgcactgcgatctctttttttccgacgcggtgatattggtggaaggcaacgtcgagcgtctgctcctgcctgcaatgatcgagttggtggccaagcgcctgcgttcttccgccctaaccatccttgaagtcggtggtgcgttcgcgcatcggttccaggagctgatcgccttcgttgggctcacaacactggtcatcacggatctggacagcgtgacggtcaaaacggacgccgagaaggccgccgcgcaaggtgcaggcgccgatgacggagatgacgaggacgacgacctgaagcccttcgagcttgaagacgacgacgaagcagaaccgggtggcaagaagaagtccaagaagcgtggcagcacctgccatgcacacgtggaaggtgccgtcacgtccaaccaaaccctcatcagttggatcccgaagaagcggtcgatggcagaactctgggaagtcacggcgaagcaaaagacgctgtcgctggctgaggattccagcgctgaggttcgggtggcttaccagaccaaggtttcggtgacggtgggtgcgacgacatcactgctctgcggccgcacacttgaggaggcctttggtcttgagaacgcggactggtgccaggctgaggcaaaccggtcggtcggcctcaagctcaagcgcgcaccgagcagccctgaagagctggctgagaagttacacgatagggtggtcggcaagaacttcgacaagacccgctttgcgctggaggtcctcgcaagcgggccgctcaatggctggaaggttcccgcgtacatcgcggagggcttgacctggctcgaagccaaagtggcccacgagcttgaggcggatgccgccatcgccaccgaggtcgcgactattgagccgactacagccgatgttgtcgctatcattgttgacccggggcagacggcatga

SEQ ID NO: 79407 - DNA, 1926 bp, Pseudomonas aeruginosa
atgagcagacgaattgatagcccagataccgacgccgaccgcgagatccacgcatgtattgtagcgacgcctccacagcccttcgtggttcgtgctggcgcaggttccggcaagaccacctccctaatcaaggcgctggactgggtgatctcggagcacggcgccagcatgcgggcgaggaagcagaaggtcgcgtgcatcacgtataccgaccttgccaccaatgaaatcctggcggatgtcaacgatgacccgctggttcatgtctcgaccatccacagcttttactggtctattgcaacgacgttccaggccgacatcaaggtttggctgcagaacgacatccgcaggcggatctccgaacttgaagaagagttcgagaattacagctcgcgtgtccggcagaccacgcgcgacaggaacaaggccgaccaagagcgatatgcccgaagcctggaggctgtggccagcgtcaggacgttcaactacggcgtgggcagtgactacgccaagggcatacttggccacgaggacatccttcagctcgccgacttcctgctacaaaaccgcccgctgttccgacgggtcgtggcgctgagctacccgtttgtgtttatcgatgagagtcaggacacgttcccgggtgtagtgaagtctttcaaggaagtggaagcccagatgcagggcaagttctgccttggttttttcggcgacccaatgcagtcgatcttcatgagaggcgcaggggacatccagcttgaggatcattggcgggccatcacgaagccggagaacttccgctgcgccaagcagatccttgacgtcgccaatgccgtgcgcgcgcagggcgatggtatggagcaagtccgcgggctgcacgagaaggtcgatgggaacctcaagctggtggaggggtcggcccggatgttcgtcttgccgaacacgctgaaccgaaccgaggctttagcaagagtccgagcctggagctcggcgacgaacaacgacgagggttggacaaccccagacatcgcagtcaagattcttgtcatcgtgcaccgcatggccgcaaaccggcttggcttcggtggcatctactcggcgctgaacgacaagacgtcggatgccatgaagcaagggatgcaggacggcaccggatggcccgttcgacccttcctaagttttgtgctaccgatcattgcagctgtgaaggccggcaatgagttcgcggcgatgagcctgctccgggaattcagcccgcgcctggcgcctgcggctctgaccggccgacgtgccgcggatgtattgcgagagctgcacgcagctgtgtcgaggcttgtcgccatgctggacgaggcagggaccaccattggtgacatagctctccatctcagtaacacgggtctttttgagttcgacgagcgctatgcgcgtgttcttgggtttgtcagggatattgctgacaccattcaggagcccgaggctgctgatgcagttccggccgaaggattatcctcggacgcggcaatggccaagttcttccattgctctgcgcaagagctttggccctatgaacgctatgtctcagaaggctctccctatgccacgcagcacggcgtgaagggagcgcagttcgaacgcgtcatggtggtgatggacgaggaagaaagcgactaccgaacgtacaactacgagcgtgtcttcgcgagtgctgaggcccgcgctgcagatcgtgcacgagcactagacggtgatgaaaacacttggagccgaacgctgcgactgctttacgtctgctgcactcgtgcccagcgggggctggtactagcgttctttgtcgccgaccctgcgaccaccctggaaaacgtcgtggcgagcgggatcttgccgcgaagcgcagtctttacacaggacgtattagttggatga

SEQ ID NO: 79408 - DNA, 2310 bp, Pseudomonas aeruginosa; identical to SEQ ID NO: 79358

SEQ ID NO: 79409 - DNA, 1947 bp, Pseudomonas aeruginosa; identical to SEQ ID NO: 79359

SEQ ID NO: 79410 - DNA, 2139 bp, Pseudomonas aeruginosa; identical to SEQ ID NO: 79368

SEQ ID NO: 79411 - DNA, 1800 bp, Pseudomonas aeruginosa; identical to SEQ ID NO: 73795

SEQ ID NO: 79412 - DNA, 1905 bp, Pseudomonas aeruginosa; identical to SEQ ID NO: 72778

SEQ ID NO: 79413 - DNA, 1677 bp, Pseudomonas aeruginosa; identical to SEQ ID NO: 71997

SEQ ID NO: 79414 - DNA, 1953 bp, Pseudomonas aeruginosa; identical to SEQ ID NO: 74520

SEQ ID NO: 79415 - DNA, 1668 bp, Pseudomonas aeruginosa; identical to SEQ ID NO: 74521

SEQ ID NO: 79416 - DNA, 1905 bp, Pseudomonas aeruginosa; identical to SEQ ID NO: 79380

SEQ ID NO: 79417 - DNA, 1677 bp, Pseudomonas aeruginosa; identical to SEQ ID NO: 71997

SEQ ID NO: 79418 - DNA, 2139 bp, Pseudomonas aeruginosa; identical to SEQ ID NO: 79368

SEQ ID NO: 79419 - DNA, 1800 bp, Pseudomonas aeruginosa; identical to SEQ ID NO: 73795

SEQ ID NO: 79420 - DNA, 1905 bp, Pseudomonas aeruginosa; identical to SEQ ID NO: 72778

SEQ ID NO: 79421 - DNA, 1677 bp, Pseudomonas aeruginosa; identical to SEQ ID NO: 71997

SEQ ID NO: 79422 - DNA, 1851 bp, Pseudomonas aeruginosa; identical to SEQ ID NO: 75378

SEQ ID NO: 79423 - DNA, 1650 bp, Pseudomonas aeruginosa; identical to SEQ ID NO: 75379

SEQ ID NO: 79424 - DNA, 1608 bp, Pseudomonas aeruginosa
ttggcaggccatgaggagtcctacccgcgctttagcgtggatgaccgccatcgacccaaggtggggcagcctgacggcgacatcaccttccactatgtattccgtgggcttgatgcgaatgacgaagcggacttcttggcagcactccagcccgggaacgatggcaagctggaggcacacgtctggattcgatattcagatgcggacaagggagggcgcttcaggatcaagcgttggtgcggggcccatgaggatgtcggcctaacgtcggacatgatggagaatctgcgcggggtctatctgcagcctctgcgcgacgcctctcagggactgaggccaagccggaacagccaactgtcccgactgttgcagctgctggctgatgaggctgggcgcgcgggcattaatgaagctctcaggcgcctggatgatgagctaaaggcgcatgcgcccatcgtgcgcacccaagacgcgatttcaacgcggcatagttccatgcttggtaagcagctggcacagcttctggaagtcggactgagtgcaagcgatttccaaaggctttcgtcacggttgtctctgacggtggactcgtttgagatcgagcagaatggtcttggtttcaacaacctgattttcatggctgtcgtcctcagcgagctggcaaagaatccggaagctacgtaccgagggttggtcgttgaggagcctgaggcgcacctgcatcctcagcttcaagccgtcttgttgcgctaccttgagagcattcaaatcattgacggagagaagcccgtccagctatttgtgaccagccactcgcccaattttgcaagtatcgccaatctggattgcctcacttgcctggtggagacaggtgagggagtcgagacgtttttcccgagaacgattaagttcggcaaggggaagcgcgagaagctggagcgctatctggatgtgacccgagcggaattgttctttgcccgacgggtgatatttgttgaaggcgcggctgagctgatgctgatagatgccctggcaacgaaggccggccacaaccttagggagcacggagtcagccttatcagtgttgaggggttgaacttcgattcgtttctgccgctgtttggcgaacaagcgttgaagattcctacagccctgattacggatgctgaccccgtggctgaagcggccgatggagaagagcccgaagcattgtatccgggagctgacgacgttgtgcaagtgtctgacaacacggcgaagatgaaggcgctcgaggataagttcgtgcaggtgcgccatggtgtgaagacgcttgagtacgatttggcgctgtacgcggacaacagggatgcaatgttgaaggcgcttgcagaaatgcacccgaagatcgctgtagcggtaaaggcagcggtggacgcggcaggtagcgatgcggagaaggctcgcgcccttttctccggcatgttcgagcgtcctcagaacaacgtgcagaaggggcgattcggtcaggaactcgcgcaagtgttgaaggacggcgcagcttgcgtcgtgcctgcttacatccgtgaagccatcgagcacgtctgccaagtccgggtggccccatga

SEQ ID NO: 79425 - DNA, 1737 bp, Pseudomonas aeruginosa; identical to SEQ ID NO: 74587

SEQ ID NO: 79426 - DNA, 2337 bp, Pseudomonas aeruginosa; identical to SEQ ID NO: 73776

SEQ ID NO: 79427 - DNA, 1878 bp, Pseudomonas aeruginosa; identical to SEQ ID NO: 73777

SEQ ID NO: 79428 - DNA, 1785 bp, Pseudomonas aeruginosa; identical to SEQ ID NO: 71894

SEQ ID NO: 79429 - DNA, 1338 bp, Pseudomonas aeruginosa; identical to SEQ ID NO: 73899

SEQ ID NO: 79430 - DNA, 1905 bp, Pseudomonas aeruginosa; identical to SEQ ID NO: 72778

SEQ ID NO: 79431 - DNA, 1677 bp, Pseudomonas aeruginosa; identical to SEQ ID NO: 71997

SEQ ID NO: 79432 - DNA, 1953 bp, Pseudomonas aeruginosa; identical to SEQ ID NO: 74520

SEQ ID NO: 79433 - DNA, 1668 bp, Pseudomonas aeruginosa; identical to SEQ ID NO: 74521

SEQ ID NO: 79434 - DNA, 1953 bp, Pseudomonas aeruginosa; identical to SEQ ID NO: 74520

SEQ ID NO: 79435 - DNA, 1668 bp, Pseudomonas aeruginosa; identical to SEQ ID NO: 74521

SEQ ID NO: 79436 - DNA, 1905 bp, Pseudomonas aeruginosa; identical to SEQ ID NO: 72778

SEQ ID NO: 79437 - DNA, 1677 bp, Pseudomonas aeruginosa; identical to SEQ ID NO: 71997

SEQ ID NO: 79438 - DNA, 2424 bp, Pseudomonas aeruginosa; identical to SEQ ID NO: 71738

SEQ ID NO: 79439 - DNA, 1932 bp, Pseudomonas aeruginosa; identical to SEQ ID NO: 71739

SEQ ID NO: 79440 - DNA, 1851 bp, Pseudomonas aeruginosa; identical to SEQ ID NO: 75378

SEQ ID NO: 79441 - DNA, 1650 bp, Pseudomonas aeruginosa; identical to SEQ ID NO: 75379

SEQ ID NO: 79442 - DNA, 1785 bp, Pseudomonas aeruginosa; identical to SEQ ID NO: 71894

SEQ ID NO: 79443 - DNA, 1338 bp, Pseudomonas aeruginosa; identical to SEQ ID NO: 73899

SEQ ID NO: 79444 - DNA, 2424 bp, Pseudomonas aeruginosa; identical to SEQ ID NO: 71738

SEQ ID NO: 79445 - DNA, 1932 bp, Pseudomonas aeruginosa; identical to SEQ ID NO: 71739

SEQ ID NO: 79446 - DNA, 1746 bp, Pseudomonas aeruginosa
gtgtatctggccgagttgaacataaggaactttcggaagctgaaggcggcgaaactttgctttcaggcaggcctgaacgtattggtgggggctaacaacgtaggtaagacggctgtcgtcgatgcactccgtgccctgttggctggccatgaggagtcctacccacgctttagtgtggatgaccgccatcgacccaaggtggggcagcctgacggcgacatctccttccactacgtattccgtgacctcgatgcagatgacgaagcagattttttggcagcactccagccggggaacgaaggcaagctggaagcgcatatctggattcgatactcggatgcggacaagggagggcgcttcagaatcaaacgttggtgtggaagccatgaggatgtgggcctcacgtcggacatgatggagaatctgcgaggcgtttacctacagcctctgcgcgatgcctctcagagcctgagaccaagccgaaacagccaactctcccgactgttgcagctgctggctgatgaggcggggcgcgcgggcatcaatgatgcccttaagcgtcttgatgatgagctgaaggcacatgcgcccattgtccgcactcaagacgcgatctcaacgcgacatagctccatgcttggtaagcagctggcacagatcctggaagtcgggctgagtgcaagcgatttccaaaggctgtcgtcacggctgtctctgtcggtggactcgtttgagatcgagcagaatggcctaggtttcaacaacctgatttttatggccgtcgtcctcagcgagttggcaaaaaatccggaagccacgtatcgagggttggtcgttgaggaaccagaggcacaccttcatcctcagcttcaggccgtgctattgcgctacctggagagcatccagatcattgccggggagaaacccgtgcagttgtttgtgaccagccactcgcccaattttgcaagcatcgccaacctggattgcctcacatgtttggtggaaacggatgagggggtcgaaacgttcttcccacgaacgatcaagttcggcaagggaaagcgcgagaagctggagcgctatctggatgtgacccgagcggagttgttttttgcccgacgggtgatattcgttgaaggcgcggctgagctgatgctgatagatgccctagcaacgaaggccggccacaacctcagggaacacggggtcagccttatcagtgttgaagggttgaacttcgactcgtttctgccgctgtttggcgagcaagcgttgaagattcctacagccctgattacggatgctgaccccgtggctgaagcagccgagggagaagagcccgaaacactgtatccgggagccgacgacgttgtgcaagtgtctgacaacacggcgaagatgaaggcgctcgaggataagttcgtgcaagtgcgccatggtgtgaagacgcttgagtacgatttggcactgtacgcggacaacagagatgcaatgctgaaggcgcttgcagaaatgcacccgaagattgctgtggcagtaaaggcagcggtggatgcggcaggtagcgatgcggagaaggctcgggcccttttctccggcatgttcgagcgtcctcagaacaacgtgcagaaggggcgattcggtcaggagctcgcgcaagtattgaaggatggcgcagcttgcgtcgtacctgcttacatccgtgaagccattgagcacgtctgccaagtccgggtggctccatga

SEQ ID NO: 79447 - DNA, 1731 bp, Pseudomonas aeruginosa
atgaacgagctttctccggaacagcgggcgattgtcgatgcccccatggcgccattggcggttatcgcgtgcgcaggcagtgggaagacaggaaccgccgtgcatcgagtcgttgaaatgcgcaggcggcttggcgaagagcgtggcagggtggcgttgctttcattctccaatgttgctgtcgagacgttcagaaaaggctatcagtcattggctcaggtgttgcccgctggcgctgggcgcagtcgcgtggacattgatacgctggacggtttcattaccgccaacgtcctacggccacatgcctatcgaacgatgggagccacgcagtctgcatttctagttatcggtagtgagccgtttctcaacgggtttacatactggacaggccagtatcctcttcccgtgacgaaaatacaggtggcgtttcatgaaggcgcaccgatcttctactacgacgtttttgggaagcctgaactgctgaatcaagccgtcgcccgtaagttggtcgatcggctgggccgtgtgggtgcctacacccatgactttggccggtattgggtctatcgaacgatgcaagagcaacccgccatcctgcgggcactggcgcgtcgctatcctcatatcgtcgttgacgagtcgcaggacattggtacggcccaccaggccatcttggatctgttagcaggtgccggcgtgcaaatctcgctaataggagaccctaatcaagggatttacgagttcgccggggcggacggaacattcctaaaggggtatcacgctcgtgctggcgtcgctgcgtttgcgctgacccgcaactaccgctcactcccttccattcttgacctagccaaccgaatatcggggcgcggtgacacaccgggacgagaggctggggaggaaggaggtggcgcctactttatcggttacgcaaaagccgagctaccacagttgatggacgcgttccacgctgaagtggccaacttggggcttcgtccggagaaatctgcagtcatctgtcgtgctagagcgcaggccgacgagttggcaggtgtggacgcccctgcgggccagggtgtggtcaagggatttgcttctgcagctgttttgcgcgacaagcagcgggactatcattcggcgttcaagttggtagcaagctgcattgtcgcgctattggatagtcccccggacgggttgttgtcgaagcttgccaagcccgcccactttccagaagtaaaaggccttcatcgattgttgtgggcatttacgcgcaacgccggtgttggcctgccatcgtctgaactcgtcgccgcgaaagagtggcatgcagcgttgttggagcggattcggaatctgttggaccgagttcaagcggatttcggttttcggccagtgggcaaccttggcagaaagctggcaaagagagggctgccggagacgccgcttgcgttagcggaagacttggccgcggaccgcggcaccagaattcgcgtggataccgttcatcaagtcaagggcgagagcatcgatgcggtactttacgtcgccacaaaagagcatgtcttggccatgctcgacggtgttggtaccgagcttggacgcattggctatgtcgccattacccgagcaaggaacctcttgtggataggtgtgccagccaacgcgctcaaagagctaaggccggcacttttggcagctggccttcaggaagcaggggcaattgcgacctga

SEQ ID NO: 79448 - DNA, 1872 bp, Pseudomonas aeruginosa; identical to SEQ ID NO: 74442

SEQ ID NO: 79449 - DNA, 1656 bp, Pseudomonas aeruginosa
ttggcgctaggtggtcctggtgcaggcaaaacacacgtcgcgctggtcaaagcgcgtgatgagattcgctctgggttgctcaaaccaggccagaagatcctcttcttgagcttcgccaggcctaccgtagcgcgcatcatcgaaaaggcttctgagctgatttctcgcgaggacctgaagcaacttgaggtcagcacgtaccacggttttgcttggagcattctccgaagccacgcctatctgttgaatggcaggccgagcttgcagcttctgccaccacccgaggcagcagcgcatttggcagatatcgataaggcccagcacgaaaatgagaagcgacgcctattcgagcacgagggccgcctgcatttcgacttgttcgcaagcttggtcagcgaactgctgagccgtagtgaccggctaagcgccatcttctccgacgcctatcccgttatcatcctcgacgagtttcaggacacaaactgtgatgaatgggcgctgatccagcagcttggaaagcgtagtcgcctcattgctctggccgaccctgaacagcggatctatgagtttcgaggcgctgatcctaggcgggttggcgactttctggagatcttcggcgccgcccacttcgatttcgcaggtgaaaaccaccgcagcagcggtaccgatatcacgacctatgggaatgacctgctcactggcgcaaacaagggcaaggtctatcagcaggtaaaaatctcgcgttacggcttcatgcatggaaagagcctgcacttcaatgccaaggccgcagtgctctcggcgttggatcgcctcaaggcaataccggacaaatcgatagcgatcctggtgccatccaaacggctgatgctcgagctttctgattacctttcttctgcagctgatggtctaccagagctacatcacgacgttgcaatggatgctgaaccgccggctctcgccgctggcgttatcgccacgttactggagggggggacggctggcgatgtggcgagccgcatgcttaatgcacttcactcgcacattcgtggacgccgcggaggcaagcctaccccccagtccgagctggacctggcaggtgctcttagcggattcctctcctcgggaaagatccgcggtgccaaacgccagctgattgtcagcgaagttcagcgtatcgcagagttgcggcagcaactgcaattaacgggcgaccctgcggaggactggttgcagctgcgcggcctgttgcaagcgtccgctgcggtagccttgaagcaagtagcaacagatgctcgctaccttcgacttcttcatcgtggctcggtactgcgggctaacttgggtgcgctgtggcgtgcccagggagagtacaagggggctgaggaagcagtccgcagtgccttgatgcaggagcatttcgctgcaggtcaaaaggactggcgcggcatccacctaatgacgatacataagtccaaagggaaagagttcgacgaggtcatcatctacgacggcctattccagcgcattgccaaagccccgcaggatccaaaaatctgcgctcaggatcttttagtgctacgggtgggagtgactcgggcgatacgtcgaaccaccattctgactccgaagcgcgatacctgccctttcctgtga

SEQ ID NO: 79450 - DNA, 1953 bp, Pseudomonas aeruginosa; identical to SEQ ID NO: 79360

SEQ ID NO: 79451 - DNA, 1668 bp, Pseudomonas aeruginosa; identical to SEQ ID NO: 79361

SEQ ID NO: 79452 - DNA, 1953 bp, Pseudomonas aeruginosa; identical to SEQ ID NO: 79360

SEQ ID NO: 79453 - DNA, 1668 bp, Pseudomonas aeruginosa; identical to SEQ ID NO: 79361

SEQ ID NO: 79454 - DNA, 1872 bp, Pseudomonas aeruginosa; identical to SEQ ID NO: 74442

SEQ ID NO: 79455 - DNA, 1656 bp, Pseudomonas aeruginosa; identical to SEQ ID NO: 79449

SEQ ID NO: 79456 - DNA, 2070 bp, Pseudomonas aeruginosa; identical to SEQ ID NO: 73876

SEQ ID NO: 79457 - DNA, 1740 bp, Pseudomonas aeruginosa; identical to SEQ ID NO: 73877

SEQ ID NO: 79458 - DNA, 1905 bp, Pseudomonas aeruginosa
atgaagttgcagacgctgcgcctatcgagttttcaatcatacggtcctgtgcctactgacgtcggcctcgaagccatcacctatttgatcggtcctaatggttccggcaagacagctgcactccaagcactctgccgcctgttcgctttcgacccgtcgcagcgtcgtatccagcggtctgacttccatgtcccagccgacgagaaggattttccgggagagcggcagctttggatagaagtagatttccttttccctgaattggcgagtgacggagacaacagtacggttgctcctcattttggacatatgcgcctagatgagccggacggcattccacgagtgcgtttccgtctgagcgccgccatgggccccgaaggcgacatcgaagaaacctttgtttatgtactggacgtcaatccagatggttcgccccttaccacggcgcaggtgccgcgagccgagcgcaatcatattcatgtccactacctgcccgcacgacgtgatcccgctgctcacatcgcttacggagccaacgctttgcttgggcggatactccgagctgtgcagtgggaagaagagcgagacgtcattaggggactcactgatggcataagcaatagcctggcagccaacccatcggtcaatgcgttcagtgtgcatctgcaaaagtcatggacgtcgctgcacaaaggcagtttctttgctgatcctaagatcactttcgtggcatctgagatcgaggccttactgcggcatatgtccgtctcgttcacaccaggtcatgatgaaaacttggtcgacttctcgcgactgagcgatggccagaaatcaatgctgtatctgtccctcgtgctgtcgtcacaggccatagggcgcgccgttttagcagagcaagataagtccttcgaccctgacaaactgcgccccccggtttttaccctgattgctgttgaagagcctgagaacagcctttcccctcattatttgggacggattgtcagtgcattgaatgcgatgacaagccaaggcgatgctcaagccctcatcgctacgcatgcaccttcaatgctccggcgcgtcgagcctgagcacatccgctacttgcgcctgaccgaggaacgacaaacgcgagtaacgtgcattcagttgcctgaaaaaacagacgaagcacacaagttcgtgcgcgaggcagtacaggcatttcccgaagtctatttctctcgattgattgtcctcggggaaggagacagcgaagaaatcgtgttgccgcgcttgttgcgagccaaaggcgcgccgattgatgagtcggctatcgcgatagcgccattggggggcaggcacgtcaaccatttctggcgtctgctggaagccctgcagattccatatctaacgctgctagatttggatgtggcccgccatcaagcaggctgggggcgcttcaagtatgtaaacgaccagttgcgcgcgtttcgagcagataaggttctcccggaaggtcatggcattcctaagtggaactccgatgagcataaggtgcgtgactatcccagttacttaggggcttttgaggagagaggcatctacttctcggatccgttggatctcgatttcgcgatgcttctcgcttacccagatgcttatggcgttgagctggaagcaccagatgctggtgctatcaaagctgttctagggaaaagccatcacggttcatcccaatacagcgaagacgaactcaagctgtttggcacctatcatcagcacttcaagcttggcagcaagcccgcagcgcatatcagtgcacttgctcaactgagtgaccaagagttgcttaaggatatgccggcatccttgagtcgtctggcagacgcggtcatcgccaaactcgcggagttgccggagtga

SEQ ID NO: 79459 - DNA, 1674 bp, Pseudomonas aeruginosa
gtgattgcagtcgacgcctggcagcccgctgacgggctgacgctggaaccaaatgccaaactcgcagccaaggaacaggaacattgtcttgcgttgactgctggaccaggggcaggcaagaccgagatgctggcacagcgagctgattttcttttgcgcactggcacttgtcggtatccaaagcggattctcgccatctcgttcaaagttgatgccagcaagaacctgaaagaacgggttcagcgtcgctgtggctcagatctgggctcacgtttcgatagcttcacttttcatgcttttgccaagcgcgtcatcgatcgatttcgaccggttttgaccgggaatgatgccctggacgcgggttacacaatcatcgataggaaggtgggtttctcccgaacacaaattgcgttcggcgatctggtgccgttggctattaagatattgcagacgtctaaagtagcccgtaacgccattcgccaaacctatagcgatgttttcttggatgagttccaagactgcaccaatctgcagtacgaccttataaagctagcttttcaggacaccagcatacgtctcaccgccgtcggtgataccaaacaaaaaattatgggctgggcgggagcgcttgacggaatatttgaagccttcgctgctgacttcgcagcggtaccgctcaacatgtaccgcaatttccgttctcagcctcgcttactcagagtgcaaaacgagatcatccgtgtcctggacccagcgtcagccatgcccgacgagcagctggcgggggatggaggtgaggtatttgcgtggcaatttgaggacagccgaaaagaggcagagtgcttggccgacttgattgccaactggataagagttgaacagcttccaccgtccgaaatcgcggtgctggtttccaagcagttggagctgtacgccgaccatctcatggcagctttagaggtgcggggcattccgttccgtaatgagcagcagatgcaagacatcactgtcgagcctgcagcgcgcctgatcgtggattatttgtcctgtctatatggccagcgcgaacctaaagcctgggttcggttgatgaaccagttgattcctttcgcggatgatgaaattcaatccagtactcgcaaggatttagatcggctgattaagcagcagcgaaaagccgctgtcgtggctgagcttctcgatgtgccgttctcaggttggtgggaatcggtacgggcgtttttgaagcaagtcagtatcgaaaccctggtcgcgctttcgcctgactatgaatccctcaacaggctcaaggaagttgtccgggacaccagaatgcgcatagaagagttgctcaagattgagcctgatctgctcaaggcccttgagcgctttgcggatgaccaggcggtacgcatcatgacgatgcacaagagtaagggcctggagttcgattcagtgatcctcttgggtatcgaaaaccaaaccttttggggaaaggcagacgaagagcgttgtgcgttctttgttggggtttcacgcgcaaagcgtcggttagtcatgactgtatgtgagcgacgtgagacgccccctgccaagccttacaagtggcgagagcagagagtgcctcatgctgagtttctcagttacaccaccccgtttttaagtaacgcatga

SEQ ID NO: 79460 - DNA, 1905 bp, Pseudomonas aeruginosa; identical to SEQ ID NO: 72778

SEQ ID NO: 79461 - DNA, 1677 bp, Pseudomonas aeruginosa; identical to SEQ ID NO: 71997

SEQ ID NO: 79462 - DNA, 2139 bp, Pseudomonas aeruginosa; identical to SEQ ID NO: 79368

SEQ ID NO: 79463 - DNA, 1800 bp, Pseudomonas aeruginosa; identical to SEQ ID NO: 73795

SEQ ID NO: 79464 - DNA, 1905 bp, Pseudomonas aeruginosa
atgtacctcgctgaactcggcataaaaaacttccgcaagctacgtgacgccaagctggaatttcagcctggattgaatgtgctcgtcgggcccaataatgtgggaaaaagcgcagtggtcgatgcgctccgtacgcttctcgctggacatgaagagccatacccacgactcgatatctccgatcgccaccggccccatgaaggtgagccagggggcgacatcagcttccatttcgttttcaaagatctcagccatgaggacgaggccgacttcatcgcagccctcaagccctgtccagacaaaaccatggaagcgcacatccatgtccaatataccgatcccgagcagaccggtcgcctcagggttaagcgttggtgtggcgatcatcaggacatcgcacttacttcggacatgatggaaaacctacgcggtgtctatctgcaaccccttcgagatgccgcccggggtctgcggccaagccgtaatagccagctagctcgccttcttcacctgcttaccgatgaacctggtcgtgaagcgataaatgctgctttgaaagccctggatgagcagctccaagagaacgaagcaatcaaaagtactcatgccgcgatttcgacgcggcatgcgtccatgatgggtgagcagctagctcaggtactttccgtggggcttagcgcaacagattttcagcggctttccgcaaggctctctctaacggctgagtccatggagatcgagcagaatgggctcggcttcaataacctgattttcatggctgtggtgctcagcgaactggcaaaaaatccagatgcagcctatcgaagcctgattgtcgaggagccagaagcgcatctgcaccctcaactgcaacgcgttctcctgagttacctagctggcattcctactaaagagggcgaaaagccggttcagctgtttgtcaccagccactcgccgaattttgctagcaattcaaagcttgaggcccttgtgtgcttggtcgagaacgaagctggcgtagagaccttcttcccccgtgatatccaattcgcgaagggtaagcgtgaaaaacttgagcgctatctcgatgtgacgcgagcagagctgttcttcgcccgccgcgtcatattcgtcgaaggagctgccgaacttatactggtggacgcactcgcgaggctcatgggcttcgatctgcgggaatatggagtcagcctcatcagcgtcgaggggctcaactttgattcctttctgcccctgttcggggagaaaggccttcgaattcctgtcgcggtcgtcacggatgctgatccattcgaagctgaagagatactcgaggaagcggtggcagatctcacagacgcgcagctagaggaggagttgcttgacgaagctgccttcctcgacgaggtcgacgcacaggacgaagatgacgcggaggaattaccccaagaggaagccgacgcagaccccaagaagaaaaaacgggtcaagcgcaaggccgcttatccgtcgctcggcgagaaaattcgggtgtcgagtaatactttgaaaatgaagtcttctgaagacaagtacgtgaaggtgtaccacggggttaaaacgctggagtacgatctggcgctccttgaggaaaatcgaggcgcaatgttggatgcgctggccgatcttcaccctaggatttcaaaagcgctacgcgagattgtaaatcgcgcgcccgacaacactgccaaagccaaagcgctgttctgcgggatgttcgagcgtaaagacagcagtagcaacgtgcagaaaggtagcttcggccaagcacttgccgagcagattgcaaaagtgcctggatgcaaagtacctgagtatcttgagcaagccattcgtcatgtttgccagggagcggacaagccatga

SEQ ID NO: 79465 - DNA, 1722 bp, Pseudomonas aeruginosa
atgaaactgtccgaggaacagaaggcagtggtcaacgcgcctctgcagcctatggcagtaacggcttgcgccggcagcgggaaaactgaaacggcaatccgacgattgatctccattcggcaaaaactcgaagatcatcgcggccgagtcgtgctgctatcgttttccaacgtcgcggtgaataccttcaacaaggggtatgcgaagcttgcgtcggatctcccagatggtgccattcgtaagcgtgtggaggtggacacgctggatggttttttcacgcagcatgttctacgtcctcacgcctatcgcaccatgggtgcgaatcaagcggcctatctcgtatcgggatcggagccatttctgaatggtttccaatactggaaagatgaaaaaggccagcggccaataccggtgaaggatctccaagtgagtttcgtgaacggtgatcttgtgttctcaagcgactcttatggaaaagttgaaacgcttgatagcaagaaggccattgaggtcatcgagaagctgggacgcactggtgcctacacccacgatttgggtcgttactgggtgtgtagaacgttgattgatcaacccgcgatcttgcgagccttggccacccgctatccgcagattctggtagatgagtcgcaggacttgggtacgatgcaccaagtcctcttggagctgcttatggatgcgggagtgcaagtttccttgataggggacgtaaatcaagggatctatgccttcgctggtgctgatggcacgtttttggaagcattcgccagtcgtcaaggtgtgaaaggctacaacctaacccggaactaccgttcactcccttcaatcatcgacatcgccaaccagctttgcggtcgtaacgatgagtctgatagacagccacagcaaggcggagcgtttttcgttgggtacaaggatgccgaactgccgcaactcgttgattctttcaaagctcatctcaatgggttgggcatgcaggacatcgatgctgtcatcctaagcagaggatctgatagagccgctaaactgtccgggaaaacagccgctcccggacaaggtacagtggccatgttcgcggaggcatcgttgatgcgcgatcaggaacgtcgattccaggatgccttccgacttgtgtgcaaagccgtcgtcggcctgaccgaaaacgccccaccagggcttagctcagcgctacagggcacgcctcaagatgaatggatgctggcgttaagacgaatgctgtggacatttacacgcaacgaggaaacgggactgccgctctcttcgctcgaagctaaggtaaaatggcatccgcagctcctaaaaaatctgcgcgatttactcgccaagatcgaaaaagaattcgggctgagaacggtcgagacctttggccaaaggatggccaaaagaggcttggaagataccgcactcgctggtgctgaagccgctgaacagacagggccgggaataagggtcgagactgttcatcaggtcaaaggtgaatctatcggcgcggtgctttatgtcgcgacaaaagccaatatcaatgcgttgctggaaggcaccgggacagaagaaggccgcatcgggtatgtggcactcacaagagcgaaaaacctgttttggctagcagttcccaacagctgcctaggagcgatgcgtggtcgcttgatcaaggctggcttcgcagaattactcgcacagtaa

SEQ ID NO: 79466 - DNA, 2292 bp, Pseudomonas aeruginosa; identical to SEQ ID NO: 73992

SEQ ID NO: 79467 - DNA, 1911 bp, Pseudomonas aeruginosa; identical to SEQ ID NO: 73993

SEQ ID NO: 79468 - DNA, 1923 bp, Pseudomonas aeruginosa
atgaggctatgcagtctgtttgtgagtaacttccagtcctttgggccggccatggaagaggtttcgttcgaagatgttacttacctcttaggccccaatggcgcaggaaaaacagccgcgctacaggcgctctgcaggatgttttcagttgaccccagcttgcgccgaattcgccgttccgactttcacgtcccggtcgcagaggctgagcaaccagagcagcgtcaactttggttggaggcagatttcacgttcgacgaaacactcgacgatgaagataacgacaccgtgccgccgttcttcgggcaaatggcgatgcgtaaagcaggagagtccccgcgggtacgctttcgcctagaagcaacaatgtacgaggatggggaaatcgaagagcagtttctcttcgtgaccaagacggatgagaatgacgatcctgtatcgaaacaggcggttcccaagcggcatcgtgacactatccatctccactacctccccgccaggcgcgacccttccgatcacgtagcttacggggcgacagcgcttctgggccggctccttcgtgccgccaattggaatgacgaccgcgagacagtaagggaactcacggagcagatcaccgactgcctagtcgagaacgagtcagtaaaaacgctgagcgatagcctcaccagcgcttggcagcgcctgcacaagggggacttcttcgcctcgccccgcctgacgttcgagaactctgagatcgaagcattgcttcggcacctcacggtctctttcagcccaggtcatggagagaaccaggttgattttgcacgtctgagtgacgggcagaaatccatgctttacctctcgcttgttttgtccgcgctcacgatagggcgagaggtgaggtctggagagaataaggccttcgatccccataagctgaaaccgccggcattcacaattcttgcagtggaggagccggagaacagcctttcgccgcattatctcggacgcatcgtcaattcactgaaatcctcggttgacctggacgcccaggctctaattgctacacaagcgccttccatgctgcggcgggttgagcctgaaaacatccggtaccttcgactgaatggtgatcggtgtacccaagtcacaactattcagctacctccgaggcttactgacgcgtacaagtttgttagggaggctgtgcaggcctttcctgaggtctatttcgcccgtctggtcgtgctgggagaaggtgatagcgaagagatcgtgctcccaaggatccttcaggcgaaaggtgcgcctgtcgatgagtttgccgttgcaatcgcgccactgggtggccgccatgtaaaccacttctggcggctgctttctgcgatcggcaccccttacatcacgcttttggaccttgatgtcggccgtcaccagggaggctgggggcgcgtgaagtatgtaagggatcagctagatcagtttgcacctcaagacagcctgcccgctggctggacttaccatgaatggaacgatccccaaacgcctgtgcgaacccactactggttcgagggtgggaaggtaagcctgttcaatgagctcgaaaaacgtaacgtcttcttctccaaccccttggatctagattttgcaatgttgtgcgccttcccggacgcctatgaggctgaagccatcccggcaaccctgaagtgccacaccaaggtcctgggagatagccatttcaatccagaccagtacgacgaagaggagcagggctggttcgaggcctaccacaagctcttcaaattgagcagcaagccggcggcacacttgggcgcgttgggaaggctcaccgatcaggaacttcttgatggcttgcctgactcgctcgatcggctagcagacaaggtgatcgaacggctcgatgagtcaccggaatga

SEQ ID NO: 79469 - DNA, 1671 bp, Pseudomonas aeruginosa
atgatcaaacctgaacgctgggttccctccccaggaattcgactggaaacaaatgcgtgggaggctattcgtgagcgcgaaaggtcagtggtgcttactgctggtccgggtgcgggcaaaacagaggtacttgcgcaacgagctgactttcttctacgtaccaacgcatgccgctacccgaaacgcatccttgccgtttcattcaagactgacgcaagccggaacctcaaacagcgagtacagcttcgctgtggatgggattacgcatcacgcttcgacagcgttaccttccatggctttgcgaagcggatcattgaccggttccatccagtcttggtggatgaggcgctaagccaggactatgaaattggtccggagtacatccggggccaacagatcacttttgggcacctgcttccgttcgcccttcggatcgtgaaagagagcgcgatcgcacgcaatgcgatacggcagtcctatacgcacgtgttcctcgacgaattccaagattgcacggcagaccaatacgaactgatcaaactactgttccacggcacaccggcgattctgacagccgttggggacaccaagcagaccatcatgggatgggcgggtgcgctcgagggaattttcaaaacctacgctgacgactttgatgcccgcgctctacgtctgttcttgaacttccgatcccagccagcacttctgcgaatgcagaacgatgttattcgggagatcgaagctgaggctgtgatgccggatgacctcgccaagggcgaaggcggggaaattctggctgggcatttccgaaatgccgctgaggaagctgaggctatcgcgaaccttattcagcgctggattactcaggacggaattccacctagtgaaattgccgttttgatgcctcgccaagttgaagagtatggcgaattcctaatgcttcggctcacagatctgggaatcgctcatcgcaacgatcacgaccttcaggatctcctgaaagagccagcagtcagccttgtcgttgactacctcacttgcctgtacggccagggtgaggctgaagcatggtcacggttaatggaccatttcaccccgtttgaagaagacgacagccaaagcagtgcccaacggatcttcgaagagacctaccgggctcacctcaagaaggttaagcaggagcgaaaaacagcgaatccatatgagtcgtggtgggatatggccaatgaattcctcaagaaactcggtctttcgtccgtcagcgcactctccgccgactatcgctccaaggctcgcctgttagaggttgttcgcgaagtccgtgatcgcatccgggctctactggcgatcgagccagatctactcagggcattggcacgcctttctgacgattcggcagtccgcttcctaaccatgcacaaaagcaaaggcctggagttccattcggtagttgtgctaggcgtcgagaagcaaacgttctgggggcagctcgaccaggagcgctgcgtgttttttgttggggtctctcgggccaaacacagcctcgtgctcaccaccgcggactatcgaccacgaccgaagagcgtcaggagatgggatgagcatcgggccccgcatgccgagtttgtgagccacgttgtgcggcatctcaccagccagcactttaagtag

SEQ ID NO: 79470 - DNA, 2139 bp, Pseudomonas aeruginosa; identical to SEQ ID NO: 73800

SEQ ID NO: 79471 - DNA, 1797 bp, Pseudomonas aeruginosa; identical to SEQ ID NO: 73801

SEQ ID NO: 79472 - DNA, 1905 bp, Pseudomonas aeruginosa; identical to SEQ ID NO: 72778

SEQ ID NO: 79473 - DNA, 1677 bp, Pseudomonas aeruginosa; identical to SEQ ID NO: 71997

SEQ ID NO: 79474 - DNA, 1905 bp, Pseudomonas aeruginosa; identical to SEQ ID NO: 72778

SEQ ID NO: 79475 - DNA, 1677 bp, Pseudomonas aeruginosa; identical to SEQ ID NO: 71997

SEQ ID NO: 79476 - DNA, 1905 bp, Pseudomonas aeruginosa
atgaagttgcagacgcttcgcctatcgaattttcaatcttacggtccggggcctactgaagttggtctcgaagccatcacctacttgatcggccctaatggttccggcaagacagctgcgctccaagcattgtgccgcctgttcgctttcgacccctccttgcgtcgtatcctgcgttctgactttcacgttccaatcaatgagaaggatattccggaagagcgccagctttgggtagaagcagattttcttttccccgagcttgcgaaggacgaagacaacagcacggttgctcctcattttggtcacatgcgtctggatgagccggagggcactccacgagtgcgtttccgtctgagcgcagccatggggcccgatggcgacatcgaagaaacctttgtatatgtactcgacgtcaatccagatggttcgccgctcaccactgcgcaagtgccgcgagccgagcgcaaccatatacatgtccactacctgcccgcacgacgtgaccccgccgaccacattgcttacggggccaatgctttgcttgggcggatactccgagctgtgcagtgggacaaagagcgagaagccattaggggactcacagacgacataagcgatagcctggcagccaacccatcagtcaatgcgttcagcgagcatctgcaatccgcatgggcatcgctgcacaaaggaagtttctttgctgatcccaaaattactttcgtggcctctgagatcgaggccttgctgcggcatatgtccgtctcgttcacaccaggccatggcgaaaacttggtcgacttttctcggctgagcgatggtcagaagtcgatgctctatttgtccctcgtgctttcgtcacaggccataggtcgcgtcgtcttagcagatcaagataaatccttcgatcctgacaagctgcgtccccccgtttttacgctggttgccgttgaagagcctgaaaacagtctttcccctcactatctgggaaggattgtcagtgcattgaatgccatgacaagccaaggcgatgctcaagccttcatcgctacgcatgcaccttccatgcttcggcgcgtcgagcctgagcatatccgctacttgcgcctgaccgaagagcgacaaacgcgagtaacgcgcattcagttgcctgaaaaaacagacgaagcacacaagttcgtgcgcgaggcagtacaggcattccccgaagtctatttctctcgattgattgtcctcggggaaggagacagcgaagaaatcgtgttgccacgcttgctgcgagccaaaggcgcgccgattgatgagtcggctatcgcgatagcgccattggggggcaggcacgtcaaccatttctggcgtctgctggaggccctgcagattccatatctaacgctgctagatttggatgtggcccgccatcaagcgggttgggggcgcttcaagtatgtaaacgaccagttgcgcgcgtttcgagcagataaggttctcccggaagatcatggcattcctaagtggaactccgatgagcataaggtgcgtgactatcccggttacttaggggcctttgaggagagaggcatctacttctctgatccgttggatctcgatttcgcgatgcttctcgcttacccagatgcttatggcgttgaactggaagcaccagatgctggcgctatcgaagctgttctagggaaaagccatcatggttcatcccaatacagcgaagacgaactcaagctgtttggcacctatcatcagcacttcaagcttggcagcaagcccgcagcacatatcagtgcacttgctcaactgagtgaccaagagttgcttaaggatatgccggcatccttgagtcgtctggcagacgcggtcatcgccaaactcacggagttgccggagtga

SEQ ID NO: 79477 - DNA, 1674 bp, Pseudomonas aeruginosa
gtgattgcagtcgacgcctggcagcccgctgacgggctgacgctggaaccaaatgccaaactcgcagccaaggaacaggagcattgtcttgcgttgactgctggaccaggggcaggcaaaaccgagatgctggcacagcgagctgattttcttttgcgcactggcacttgtcgttatccaaagcggattctcgccatctcgttcaaagttgatgccagcaagaacctcaaagaacgggttcagcgtcgctgtggctcagatctggcctcacgtttcgatagcttcacttttcatgcttttgccaagcgcgtcatcgatcgatttcggccggttttgaccgggaatgatgccctggacgcgggttacacaatcatcgataggaaggtgggtttctcccgaacacaaattgcgttcggcgatctggtgccgttggctattaagatattgcagacgtctaaagtagcccgtaacgccattcgtcaaacctatagcgatgttttcttggatgagttccaagactgcaccaatctgcagtacgaccttataaagctagcttttcaggacaccagcatacgtctcaccgccgtcggtgataccaaacaaaaaattatgggctgggcgggagcgcttgatggaatctttgaagccttcgctgctgacttcgcagcggtaccgctcaacatgtaccgcaatttccgttctcagcctcgcttactcagagtgcaaaacgagatcatccgtgtcctggacccagcgtcagccatgcccgacgagcagctggcgggggatggaggtgaggtatttgcgtggcaatttgaggacagccgaaaagaggcagcgtgcttggccgacttgattgccaactggataagagttgaacagcttccaccgtccgaaatcgcggtgctggtttccaagcagttggagctgtacgccgaccatctcatggccgctttagaggtgcggggcattccgttccgtaatgagcagcagatgcaagacatcactgtcgagcctgcagcgcgcttgatcgtggattatttgtcctgtctatatggccagcgcgaacccaacgcctgggttcggttgatgaaccagttgattcctttcgcggatgatgaaattcaatccagtactcgcaaggatttagatcggttgattaagcagcagcgaaaagccgctgtcgtggctgagcttcttgacgtgccgttctcaggttggtgggagtcggtacgtgcgttcttgaagcaaatcagtatcgaaaccatggtcgcgctttcgccagactatgagtcccacgacaggcttaaggaagttatccgggacactagaatgcgcatagaagagttgctcaagattgagcctgatctgctcaaggcccttgagcgctttgcggatgaccaggcggtacgcatcatgacgatgcacaagagtaagggcctggagttcgattcagtgatcctcttgggtatcgaaaaccaaaccttttggggaaaggcagacgaagagcgttgtgcgttctttgttggggtttcacgcgcaaagcgtcggttagttatgactgtatgtgagcgacgtgagacgccccctaccaagccttacaggtggcgagagcagagagtgcctcatgctgagtttctcaggtacaccaccccgtttttaagtaacgcatga

SEQ ID NO: 79478 - DNA, 2136 bp, Pseudomonas aeruginosa
gtgcatatttcaaggttacaactcgtcaactaccggaattttaaatgcgcgaatgtagttttcaacaagggcgttaacacgatcatcggcgagaacggatcaggcaagacaaacctgttccgtgcgttgcgtcttttactcgacgacacgctgctacgcgcggcatataggctcgatgagaaggacttccaccggggccttggcgactggcgcggtcactggatagtcattagcctcgagttcgatgaggtatcccaagacgaggcgattcagtccctctttctccatgggaccggtaacatcgccaacgcggcgatcggcaaggcgacctacaaccttattttccgccccaaggcggcagtccgacggaccctggccgaccttgccgccggtgatatggtaggacttgctgaggcacgttcgaagatcaccattttggattatgaaacgatctttaccggcaagagcaccgcaaacttcctcgatcccgaaacctataagcaactggctggcgacttcgacgcggtaatatttccccaagaactgacgaacccggctatcgggggcgtcatcccgggtatgctctctatctcgcgcgaagtctgcttcaccttcgtgcaagcactgcgcgatgtggtctccgacttccagaacaaccgcactaaccccctcctaactctgctcaagtgtcgaagcggtgagatcgatccgcagagcttcgaaccaatcaccgcgctcgtcaaagggctcaatgatgcaatcgagggcctaccagatgtgggaaccatccgcaccgatatccgcgacaccatcaccgatgcagcaggcgagacctactccccgcgatcactttcgatccgatcggatctgtccgacgaggccgaccgcctgttccagtcgctcaagctgtttgtgggcgaaagcgaggaagaatatgagggcgcgattcacgagctgagcctgggcggtgcaaacctcatctacctgacgctgaagctgctcgagttcaaatatcagaagcagaaagagtccttcgccaatttcctcgtgatagaggagccggaggcgcacatccacacgcatatccagaaaacgctgttcgaccggctgagctttgacgacacccagatcatctattcgacccattcgacccacatatccgaagtgaacaacgtcctgaacatcaacatcctcggccgacaccacggacgttgcgaggtgtttcagccatctgcgggacttgacgctggccagattggcaatatccagcgctaccttgatgcggtccgcagcaatctgctcttcgccaaaagcgtggtcttggtcgaaggcgacgccgaggagatcctcatcccgatactcgttaaaaaagtgttcgggctgagcctggacgagctggggatcagcttgatcaacatccgcagcaccggcttcgagaatgttgcggtacttttccataacgagcgcatccgcaagcgctgcgcgatcatcaccgaccttgaccgcgcgtttattgacacgaccaaggacatactcgacagtgacgataaggcggcagcaaagaagaaggcactgggggcacagatcgctggactccagcgcgaggcagcgcttaaggtgttgtgtgacgggaatccttggctgacggcgcacttcgccgaccacactttcgaggttgatttcgtctccgccggcaatgtcggcactgtcgtttcggtgctgggcgacgtctataaggatggcggcaccatagcgacatcgaaaatggagctggaatcgggcgacatcacacgtttcgggacgcgcgtgctgacgatggcacgttatgcaggaaagggatggttcgccatcatcctggggcgaatgataacgccagaaactgttattccggattacatcctcgacgctatcttccaagcacatctcccggtatccattcatacatgggcgcgagtgctggattatcgggtctcggtccttgccgagtcacaactacacgcggcagtggacatcgacgcgatgcgcgcgcaaatcagacgctactatagcggcgagatcgactttgctggggtccgcgccgaaatgctacaggcctttccggccgacggcatcaacacgatcctggctggcttctag

SEQ ID NO: 79479 - DNA, 1797 bp, Pseudomonas aeruginosa
atgtttgtctgggacaggaaagatctgaacgacgctcaagtcgcagccatcgagcatccaggcagcgtcttcctcgttgcctgcccagggagcggtaaaacgagaaccctcacctacaagatcgcccgcctgttgtcggagcttaagtcggacaaaaaacgcgtcgtcgcgatcacctacacgcaccgggctgctgatgagattcacgaacggatcgagcagcttggcgtcgatacgagccagctttggattggcacgatccactccttctgtctcgaatggatcttaaaaccctacggaatctatcactcggcgctaaagctcggtttccgggtgatcaatgcccatgataccgaactaatgctggaggagttctgcagcgcggtgcagggcactaagctcagcagcttcgactgcgcatattacttcgcgccgaacggctatgtcctgacatgcaacaagaccgacaagcatcaagcaattgagggagttttgcaggcatattggaaggcgcttgatgccgagcggcaggtcgattttgagctgatccttttctacgcctatcaactcatcgagaagaatccctcgatcagcgtgctgctcggctcgatcttcgaatgcgtgctcctcgatgagttccaggatacgcgggaaattcaatatgcgatcctcgcatcgatcctgaaagcgtctaaaggcggtgcctccgcctttgttgtaggcgaccctaatcaggcaatctatggctcgcttggcggctatgcgatcacggcggcggactttgggaggcagtgcggcatcgccttcaaggaaatggagctatcagacaattaccggtcgtcatcgcgtattgtgagctatttcggcaactacaacgtcttcccttcgaaggtcgaggcggtgggaaaagacaaggactacgcgagcgttgtgtcgttcgatcaccagacgcaccgcgacgcgctggaggaagagcttgtaaggctcatcaaattcaacgtcgaaacgctggggatcgctcagcatgaggtttgcatcgttgcgccttggtgggtccatctcgcgagcatgacacgccggttggtcgcagcgcttccgacctattcgttcgatggaccgggcatggtgccgttcgcgcgcgacattgacaatttctggtacaagctagcccggatcattctgacggaggcgtccccacagctgtatgtacgccgaatgcgatgggcgggagaggtaatcgccggcctcagcgatgcgggcgtcgaggttccagatctggaccgcaagacactgctgcgcgcctgcaacgccatcaccatcaccgagaccgatggcctggtctatctcagggcgttcttcgaccagctatgttccactttcgagatcgatcgccgcagttgtgcagcactccaagagcatcacgacgctttcttcgaatgctcgcagaagcgcatcgataaactcatcaaggaaggcgctgaggcgattgctgaattggcgatgtttaggaaggtctttgcgaatcgcactggtgtcaccgtatcgacgatccatggggtcaagggtgccgagtatgacgcagtgatcgcctatggtctgctagaaggcatggttccccacttcagtgatccgaaccaagccgagacggcgaaaaagctcatgtatgtggtgtcgtcgcgggccagaaagaacctacatctgatctctgagcgcggtcgcagtcgaggctggagcggagattatcaaccaactggcgtacttgctggatgtgcattccgatacgaccagttttcttga

SEQ ID NO: 79480 - DNA, 2070 bp, Pseudomonas aeruginosa; identical to SEQ ID NO: 73876

SEQ ID NO: 79481 - DNA, 1740 bp, Pseudomonas aeruginosa; identical to SEQ ID NO: 73877

SEQ ID NO: 79482 - DNA, 1905 bp, Pseudomonas aeruginosa; identical to SEQ ID NO: 72778

SEQ ID NO: 79483 - DNA, 1677 bp, Pseudomonas aeruginosa; identical to SEQ ID NO: 71997

SEQ ID NO: 79484 - DNA, 1905 bp, Pseudomonas aeruginosa; identical to SEQ ID NO: 72778

SEQ ID NO: 79485 - DNA, 1677 bp, Pseudomonas aeruginosa; identical to SEQ ID NO: 71997

SEQ ID NO: 79486 - DNA, 1953 bp, Pseudomonas aeruginosa; identical to SEQ ID NO: 79360

SEQ ID NO: 79487 - DNA, 1668 bp, Pseudomonas aeruginosa; identical to SEQ ID NO: 79361

SEQ ID NO: 79488 - DNA, 1905 bp, Pseudomonas aeruginosa; identical to SEQ ID NO: 72778

SEQ ID NO: 79489 - DNA, 1677 bp, Pseudomonas aeruginosa; identical to SEQ ID NO: 71997

SEQ ID NO: 79490 - DNA, 2070 bp, Pseudomonas aeruginosa; identical to SEQ ID NO: 73876

SEQ ID NO: 79491 - DNA, 1740 bp, Pseudomonas aeruginosa; identical to SEQ ID NO: 73877

SEQ ID NO: 79492 - DNA, 1905 bp, Pseudomonas aeruginosa; identical to SEQ ID NO: 72778

SEQ ID NO: 79493 - DNA, 1677 bp, Pseudomonas aeruginosa; identical to SEQ ID NO: 71997

SEQ ID NO: 79494 - DNA, 1905 bp, Pseudomonas aeruginosa; identical to SEQ ID NO: 72778

SEQ ID NO: 79495 - DNA, 1677 bp, Pseudomonas aeruginosa; identical to SEQ ID NO: 71997

SEQ ID NO: 79496 - DNA, 1905 bp, Pseudomonas aeruginosa; identical to SEQ ID NO: 72778

SEQ ID NO: 79497 - DNA, 1677 bp, Pseudomonas aeruginosa; identical to SEQ ID NO: 71997

SEQ ID NO: 79498 - DNA, 1905 bp, Pseudomonas aeruginosa; identical to SEQ ID NO: 72778

SEQ ID NO: 79499 - DNA, 1677 bp, Pseudomonas aeruginosa; identical to SEQ ID NO: 71997

SEQ ID NO: 79500 - DNA, 2292 bp, Pseudomonas aeruginosa; identical to SEQ ID NO: 73992

SEQ ID NO: 79501 - DNA, 1911 bp, Pseudomonas aeruginosa; identical to SEQ ID NO: 73993

SEQ ID NO: 79502 - DNA, 1785 bp, Pseudomonas aeruginosa; identical to SEQ ID NO: 71894

SEQ ID NO: 79503 - DNA, 1338 bp, Pseudomonas aeruginosa; identical to SEQ ID NO: 73899

SEQ ID NO: 79504 - DNA, 2424 bp, Pseudomonas aeruginosa; identical to SEQ ID NO: 71738

SEQ ID NO: 79505 - DNA, 1932 bp, Pseudomonas aeruginosa; identical to SEQ ID NO: 71739

SEQ ID NO: 79506 - DNA, 2292 bp, Pseudomonas aeruginosa; identical to SEQ ID NO: 73992

SEQ ID NO: 79507 - DNA, 1911 bp, Pseudomonas aeruginosa; identical to SEQ ID NO: 73993

SEQ ID NO: 79508 - DNA, 1905 bp, Pseudomonas aeruginosa; identical to SEQ ID NO: 72778

SEQ ID NO: 79509 - DNA, 1677 bp, Pseudomonas aeruginosa; identical to SEQ ID NO: 71997

SEQ ID NO: 79510 - DNA, 1905 bp, Pseudomonas aeruginosa; identical to SEQ ID NO: 72778

SEQ ID NO: 79511 - DNA, 1677 bp, Pseudomonas aeruginosa; identical to SEQ ID NO: 71997

SEQ ID NO: 79512 - DNA, 1851 bp, Pseudomonas aeruginosa; identical to SEQ ID NO: 75378

SEQ ID NO: 79513 - DNA, 1650 bp, Pseudomonas aeruginosa; identical to SEQ ID NO: 75379

SEQ ID NO: 79514 - DNA, 1953 bp, Pseudomonas aeruginosa; identical to SEQ ID NO: 74520

SEQ ID NO: 79515 - DNA, 1668 bp, Pseudomonas aeruginosa; identical to SEQ ID NO: 74521

SEQ ID NO: 79516 - DNA, 1803 bp, Pseudomonas aeruginosa; identical to SEQ ID NO: 71790

SEQ ID NO: 79517 - DNA, 1653 bp, Pseudomonas aeruginosa
atgggtggtccaggctccggaaagacgcatgtcgccctggtcaaagccagggacgagattcgatcagcaaagctcctatcaggccagcgcatcctgtttctcagcttcgcgaggcccacagtggcacgggtccttgagaaagccaaggaactcatcaccgcggatgatctgagacttctagatgtcaacacctatcacggcttcgcatggagcgttctgcgaagtcatggctatctgctcagcaacggaaagccgctccagctcctaccacctcccgagggctccgcgcgcttggctcactttgccaaggagcagcatcaccaggagaagttgcgccttttccatgaagaggggctgctccacttcgacctcttcgcccagttgacggctgaactgctgcgccgcagccggcggctggcaggtatctacacagcgacctacccgatactcgtcgtggacgagttccaggacacgaacgccgacgaatgggcgatggtccgcgagcttggacgcggctgcaggatcattgccttggccgaccccgaccagcgtatttacgaattccgcggcgccgatcctcagcggctcaaggaattcgtggaccagttcgaccccttgccagtcgagtttgaaggggagaatcatcgcagtgccggaaccgacatcgcaacgtacggttcagacttgctcaccgggaaaaacaagggcgccgtctatgccaatgtgtcggtggtcgagtacggcgtgtactacggaaggggtccgcatttccatgcgaaggcccagctcatccaggcaatcaagcgacttcgcaaggagccggcctggtccatcgcagtgctcgtcccatccaaggccttcatgcttcaagtgtccgactacctctccgcggagtccgatggcatgcccaaccttcgccacgaggtggcgatggacgcggaatccccggcgcttgcggcaaacgtcatcgccacgctaatggaaggaggcccttcggagcttctggctgcgcggctactctccgccttacatacccacatccggggccgcagtggcaccaaacgccctgcgcaggcggaactcgacatggccgacgccatcgaccaatacttggtctccggaaagatccgcggcaagaatcgccaagcgttgatcagcgagtgcgcgcgcctagcagcgcttcgccaggacgtcgtattcaccggccatcctgaagaagactggttgactgcgcgggggcttctcgcgacgtctgccgttggccaactgtcgcgcgttgccgctgatgccaagtatctccgcctgcttcacaagggctcaaacctgcgggcgtctttgtcagagctttggagatcccaaggacagtatgtcggcgctatcgaagctgtccggggcgctttgctgcaggagcacttcacagcagccgccaaggaatggcgtggagttcatctcatgaccattcacaaagcaaagggtaaggagtttgacgaggtactgatttacgaggggcgatatgctggacgaattgtgcctgcgaatgcagatacttctcgtcaaagccaagcccttttggcactgcgggtcgcagtcacaagagctatgaagagagcaacaatcctgacgccatcgggagaccgcagcatttttttgtaa

SEQ ID NO: 79518 - DNA, 1785 bp, Pseudomonas aeruginosa; identical to SEQ ID NO: 71894

SEQ ID NO: 79519 - DNA, 1338 bp, Pseudomonas aeruginosa; identical to SEQ ID NO: 73899

SEQ ID NO: 79520 - DNA, 1953 bp, Pseudomonas aeruginosa; identical to SEQ ID NO: 74520

SEQ ID NO: 79521 - DNA, 1668 bp, Pseudomonas aeruginosa; identical to SEQ ID NO: 74521

SEQ ID NO: 79522 - DNA, 1905 bp, Pseudomonas aeruginosa; identical to SEQ ID NO: 72778

SEQ ID NO: 79523 - DNA, 1677 bp, Pseudomonas aeruginosa; identical to SEQ ID NO: 71997

SEQ ID NO: 79524 - DNA, 1905 bp, Pseudomonas aeruginosa; identical to SEQ ID NO: 72778

SEQ ID NO: 79525 - DNA, 1677 bp, Pseudomonas aeruginosa; identical to SEQ ID NO: 71997

SEQ ID NO: 79526 - DNA, 1953 bp, Pseudomonas aeruginosa; identical to SEQ ID NO: 74520

SEQ ID NO: 79527 - DNA, 1668 bp, Pseudomonas aeruginosa; identical to SEQ ID NO: 74521

SEQ ID NO: 79528 - DNA, 1953 bp, Pseudomonas aeruginosa; identical to SEQ ID NO: 74520

SEQ ID NO: 79529 - DNA, 1668 bp, Pseudomonas aeruginosa; identical to SEQ ID NO: 74521

SEQ ID NO: 79530 - DNA, 1905 bp, Pseudomonas aeruginosa; identical to SEQ ID NO: 72778

SEQ ID NO: 79531 - DNA, 1677 bp, Pseudomonas aeruginosa; identical to SEQ ID NO: 71997

SEQ ID NO: 79532 - DNA, 2070 bp, Pseudomonas aeruginosa; identical to SEQ ID NO: 73876

SEQ ID NO: 79533 - DNA, 1740 bp, Pseudomonas aeruginosa
atgcctgatccgcagtcaccggccgaggttgccagccagcgcgctcttgatgccatgtttcgcagcctggatgccggagagcacttccggctagaagctggagcaggcgctgggaagacctactctctcatcaaagcgctccactatttgatcgagcgccacaaaagcacatttccaaggaaaaacaagcagattgcgtgcattacatttaccaatgtggcccgcgatgaaattgccgcccgtactgacagaagcccaatggtgtactgcgacaccaatcatgccttctgttggtcattgatcagtggcttccagaaacaactccgtggtttggttgaggcgatgccggcatggcaagagagaattgcggaagctggaggcggcctgggtaaccgtgtaatcgagtacaactttgggcaccgttccattcgtgaagatcgcgtgtctctccatcacgatgatgtgttgcccctcactgtttcattgatggagcatgccaaatttaggcatatagtgacagatcggtttccaatcattcttgtggatgaatatcaagataccgataaggattgggtcgaggcgattcagcggctgtttttggggaatccgccttcacccctattcggcttctttggcgaccattggcagaagatatatggcaatggatgcggaagacttgagcatccgcaagtcaaggagattggcaaggaagccaacttccgatcagtcaaagccattgttgactgcctcaaccggatgcgcccggagctacaacaatttgtcgaagaccctgacgctattggacaggtcagcgtatttcatacaaatgcctggactggaggacgacaaaccggtgcccattggggaggagatttaccttcggaagtcggccacgacacacttgagggagtgaaggcctcgttgacacaagagggatgggatttttccccggaaagtacaaaggtactcatgctgacgcataggcttcttgccagtgagcagggctatgccagcttgccatcagtctttcgttacaacgattcctttgccaagaaggaacatccgtatattgccttcttcgtagaccagttggagcctgcgtgcgatgccttctccgcgaataggttcggcgccatgttcgatgcgctgggcggtaacacgccgctattgcggagtcaggccgataaggcagcctggcacgatgcgatgagccagctactggcgattcgcgaaaatggcacggtcggagaagtcatcgaccacctgctcaaccggcggaagccaagactcccggaagccatcgagaagcgtgagcgggaactacgcgagttcgatcgagcaagcggcgaagagatgccggccgcactggcggagatagagaagctacgcgcggtcagatacgcagaaatcaaaacgctacggagctatctggatgggcactctccttttgaaaccaaacacggagtaaagggcgcggagttcgagaatgttcttgttgtcatcggtcgcgggtggaaccagtacaactttggagagatgctcgaactggcaggaagcgcagccatcccacccgggaagcaggcggccttcgagcgaaatcgaaacttgttctatgttgcctgctcaagaccgaaacgccgccttgccctgctgttcacacagcagctttcgccagatgccatcgcaacacttgaaaggtggttcttgccagagagcatccgtgctgtcgctttttcgtag

SEQ ID NO: 79534 - DNA, 1905 bp, Pseudomonas aeruginosa; identical to SEQ ID NO: 72778

SEQ ID NO: 79535 - DNA, 1677 bp, Pseudomonas aeruginosa; identical to SEQ ID NO: 71997

SEQ ID NO: 79536 - DNA, 1800 bp, Pseudomonas aeruginosa
atgaaactcacaaggatttacgttagcaattttcgcaactttcgcgacgcggacattgtcgtagatggaagtgtcgtcatcgtcggcgagaatcgcgttggtaagagtaacctgcttcatgctttgcgacttgttttcgatcccagcttacccgatagcggtcgacagcttggacagggcgatttctgggatggcttgggagagccactcgaagacgaagaaatcactgtcttcgtagagttgcaggagtttgaagatgatctggatcttctcgcccagctcacggactttcgactcgacgacgatccgcacacagtgcggcttacctacaaattccggccgattcctggcttagagggggcgccagaatgcgacgacgactacgagttcatctgcttcggcggtgaagtcgagacgaagcggtttggtcacgaagtgcgtcggcgcattgctatggacctcctgccggcgctgcgcgatgctgaaggtgatctagctacgtggcgccgctcgcctttgcggcccttgctcgaacgcgcctttgcaagcgtgtctggcgaagacctcgcaggtgttcgcaatgccgtccaggccgcgacgggacaactggcggatttcccttcggtgcagaacttggagcaggctctgcagcaactgttcgcatcgatgagcggtcccaagcaggatatcgaacctagcctagggttcgggacgaccgacgtgacacgcctgttccgcaatcttcggctactgatcgatggcggcctacgcacaattagcgaggccagtctcggttcggctaatgtggcgttcctgaccttgaaggccttggagcttcgccaactgatgggcgagaaccggcgcgaccacacgttactggcaattgaggagccagaggcccacttgcacccccatctgcaacggtccgtgtatagccatctattcgaggggcttgcgggtgaggaggagaatgagtcgctctcactactcctgacaacacactcgccgcatattgctagtgtcgcacctctgcgctccctggtgctgcttcgcgacacggttgacgaggggactgtggccgcctcggccgcgtcgatcgacctcaccgatgaagaggaggacgatcttgcgcgctaccttgacgtgacgcgtgccgagatgctgttcgctcgagggattgtcttggtcgaaggggatgccgagaaattcttgctgccggtgtttgccgcctcaatggggtacgatctcgatcatctcggtattacggtgtgctcggtagcgggcacgaacttcacgccatactcgaaattccttgctgccttaggcatcccgttttcaatagtgaccgattgggatccacagggagaccggacacctctcggctacaaccgttcgtggcgactcgtaaaaactattgaggaagtaagaacgggtgaggatcaacgtgggctcatcgaggagatcaagaggatcgagcagtacagcgatttctctgatcgctgtgaggggtatggagttttcaccaatctcgacacgttagaagtcgacttgtttgaatatgaagatttcacagcggccatcatcgaaacactccgggagcaaaggttaagcgaggagcggcaggcttgggtgaaccagtgggaagacgacccagagacgttggatcgggagaactacctcaagctgatcgaagccgtcggaaaagggcgatttgcacagcgtttggcgtctcgcattgagggtattgcaccgcccccctacattgcgcgcgcaattacctacgtggtcgaccgtgtctga

SEQ ID NO: 79537 - DNA, 1788 bp, Pseudomonas aeruginosa
gtgtctgatcgcgcggcctacctgcgggcggccgcgcagcttcagcgcaatgcggggcaatgggctgcatacgaatcccgtggtcattgcgtcgtgctggcggggcccgggagtgggaaaaccaagactctcgtgacaaagttggcgcgtatgctcgcggaggacgtgccggaatctcgcggcatcgcgtgcatcacatataacaatgaatgcgcgcgtgagctggaagttcggctggcttcactcggagtggcgccgggtggacgtgtgtttgtcgggaccgtgcattccttctcgcttacgcagatcctcttaccttatgccaaggttgcccgattgggtttgcctgagggcttcggcgtggcgacccgggctgagcgacaggcagcactggccgaagcggtgaacctcacgatcgaagcgcccggcaatcctcaagattgggagttccggcttggcaactatcgccgatcaatcttaaatcgcgacagtcaagaatggagtaataccgatccggagcttgcgcgccttgtggaaacctacgaagcacagcttcgtcgtcgtggcttgatcgacttcgatgatatgcccttgctcgcggttcgagcgctgcgtgacaacccgtggttgcggcgggcgctgctcgccaaataccccatacttgtcgtcgatgagtaccaggaccttggtgtcgcgctgcatcgtatggtgatggggttgtgttttcgagcgggcatgcggctctttgcagtgggcgacgttgatcagtcgatttacggattcaccggggctcgccctgatttgctccgcagattgtcagagcgcgacgacgtcgagactgtgcgcctgcggctgaactaccgcagtgggaaccgtatcgtcctggcatcgcgcgtggccttgggtgaagagcgtgactacgaggcggctgatgctgcggcgcagggaacggtttatattcacccgacaggcggtacctatgagcagcaagcggaccaccttgtcggagagttgttgccccaggctctgaggcgtcacccgcaacttggttaccgtaatgctgcagtgctctacccggccgcatggatcggcgatgctgtagccggggcggcgcaagctgccggcataccaatcgtgcgcacagatggcaacgctctgtacccacgttccagtcgcgtcatgcagtggttggaattgtgtggccaatggtgttgtggtggatggcgaacggggaagccgcgttttgctcagctagcgcgggaggggcggcgactgttcgcagagtccatacatagcgatggccaggcgatggactttcatcgccgattgatcgccaccctgtgggatagccgggatgcgaacctgaacctacatggttggcttgcaagactgtcgatagacgtgatccagccattcgcctccgaatgtcctgcgctgagggatgagatggacaccctggccgtcttcgctgctcggattgccccggcgggagatcgtgcagatatggttctgggcgagttggctggcgacggcgagcatttgaatcggctaacactgtcgacgctgcacagcgcaaagggcagagagttcgatgtggtgtttatgtttggtttggaccgcgggcggttaccgcgcaacggtgttggtccgcaacaggtcgtcgaggcgcgccggctgttttacgtaggctttacgcgtgccaagtctgagattcatctggtgcatactgcggagcgttcatcgccgtttgtggaagaaattgaaaatcacttggccgagggtgcttga

SEQ ID NO: 79538 - DNA, 2070 bp, Pseudomonas aeruginosa; identical to SEQ ID NO: 73876

SEQ ID NO: 79539 - DNA, 1740 bp, Pseudomonas aeruginosa; identical to SEQ ID NO: 73877

SEQ ID NO: 79540 - DNA, 1785 bp, Pseudomonas aeruginosa; identical to SEQ ID NO: 71894

SEQ ID NO: 79541 - DNA, 1338 bp, Pseudomonas aeruginosa; identical to SEQ ID NO: 73899

SEQ ID NO: 79542 - DNA, 1851 bp, Pseudomonas aeruginosa; identical to SEQ ID NO: 75378

SEQ ID NO: 79543 - DNA, 1650 bp, Pseudomonas aeruginosa; identical to SEQ ID NO: 75379

SEQ ID NO: 79544 - DNA, 1785 bp, Pseudomonas aeruginosa; identical to SEQ ID NO: 71894

SEQ ID NO: 79545 - DNA, 1338 bp, Pseudomonas aeruginosa; identical to SEQ ID NO: 73899

SEQ ID NO: 79546 - DNA, 1956 bp, Pseudomonas aeruginosa; identical to SEQ ID NO: 72882

SEQ ID NO: 79547 - DNA, 1671 bp, Pseudomonas aeruginosa; identical to SEQ ID NO: 72883

SEQ ID NO: 79548 - DNA, 2334 bp, Pseudomonas aeruginosa; identical to SEQ ID NO: 79366

SEQ ID NO: 79549 - DNA, 1878 bp, Pseudomonas aeruginosa; identical to SEQ ID NO: 79367

SEQ ID NO: 79550 - DNA, 2337 bp, Pseudomonas aeruginosa; identical to SEQ ID NO: 73776

SEQ ID NO: 79551 - DNA, 1878 bp, Pseudomonas aeruginosa; identical to SEQ ID NO: 73777

SEQ ID NO: 79552 - DNA, 2139 bp, Pseudomonas aeruginosa; identical to SEQ ID NO: 72908

SEQ ID NO: 79553 - DNA, 1800 bp, Pseudomonas aeruginosa; identical to SEQ ID NO: 72909

SEQ ID NO: 79554 - DNA, 1851 bp, Pseudomonas aeruginosa; identical to SEQ ID NO: 75378

SEQ ID NO: 79555 - DNA, 1650 bp, Pseudomonas aeruginosa; identical to SEQ ID NO: 75379

SEQ ID NO: 79556 - DNA, 2337 bp, Pseudomonas aeruginosa; identical to SEQ ID NO: 73776

SEQ ID NO: 79557 - DNA, 1878 bp, Pseudomonas aeruginosa; identical to SEQ ID NO: 73777

SEQ ID NO: 79558 - DNA, 1905 bp, Pseudomonas aeruginosa; identical to SEQ ID NO: 72778

SEQ ID NO: 79559 - DNA, 1677 bp, Pseudomonas aeruginosa; identical to SEQ ID NO: 71997

SEQ ID NO: 79560 - DNA, 1905 bp, Pseudomonas aeruginosa; identical to SEQ ID NO: 72778

SEQ ID NO: 79561 - DNA, 1677 bp, Pseudomonas aeruginosa; identical to SEQ ID NO: 71997

SEQ ID NO: 79562 - DNA, 2337 bp, Pseudomonas aeruginosa; identical to SEQ ID NO: 73776

SEQ ID NO: 79563 - DNA, 1878 bp, Pseudomonas aeruginosa; identical to SEQ ID NO: 73777

SEQ ID NO: 79564 - DNA, 2424 bp, Pseudomonas aeruginosa; identical to SEQ ID NO: 71738

SEQ ID NO: 79565 - DNA, 1932 bp, Pseudomonas aeruginosa; identical to SEQ ID NO: 71739

SEQ ID NO: 79566 - DNA, 1851 bp, Pseudomonas aeruginosa; identical to SEQ ID NO: 75378

SEQ ID NO: 79567 - DNA, 1650 bp, Pseudomonas aeruginosa; identical to SEQ ID NO: 75379

SEQ ID NO: 79568 - DNA, 1905 bp, Pseudomonas aeruginosa; identical to SEQ ID NO: 72778

SEQ ID NO: 79569 - DNA, 1677 bp, Pseudomonas aeruginosa; identical to SEQ ID NO: 71997

SEQ ID NO: 79570 - DNA, 2136 bp, Pseudomonas aeruginosa; identical to SEQ ID NO: 79478

SEQ ID NO: 79571 - DNA, 1797 bp, Pseudomonas aeruginosa; identical to SEQ ID NO: 79479

SEQ ID NO: 79572 - DNA, 1851 bp, Pseudomonas aeruginosa; identical to SEQ ID NO: 75378

SEQ ID NO: 79573 - DNA, 1650 bp, Pseudomonas aeruginosa; identical to SEQ ID NO: 75379

SEQ ID NO: 79574 - DNA, 1905 bp, Pseudomonas aeruginosa; identical to SEQ ID NO: 72778

SEQ ID NO: 79575 - DNA, 1677 bp, Pseudomonas aeruginosa; identical to SEQ ID NO: 71997

SEQ ID NO: 79576 - DNA, 1905 bp, Pseudomonas aeruginosa; identical to SEQ ID NO: 72778

SEQ ID NO: 79577 - DNA, 1677 bp, Pseudomonas aeruginosa; identical to SEQ ID NO: 71997

SEQ ID NO: 79578 - DNA, 2337 bp, Pseudomonas aeruginosa; identical to SEQ ID NO: 73776

SEQ ID NO: 79579 - DNA, 1878 bp, Pseudomonas aeruginosa
atgacaagccggatcggcagtcctgacacacaagccgatctagatgttcgagcgtgtctcgatcggatgccgccacgctcgtttgtcatggtcgccggtgcggggtcggggaaaacgacctcgctgatcaaggctatcgcgcacctagccgagacccgcggtcctgccctgcgccgcgccgggcaacaaatcgcctgcatcacatataccgaagtcgccgtcggtgagatttcggccgatgtcggggcctcgccgctattccacatctcgaccatccacagtttcctgtggtcagtcatccggccgttccattcggatatcgcggcttgggtagccacccgcatcgacgagaagatcgcggagcgacgcacacactacgacaagcctcggactcaggcaaaaacgaaggcccgcctcgaacaggagatcgcagatctcgaagccgatctggctgcgatcagtgaagtagagaagttcgtctacggcaccggcagcagctacgctgaaggcatccttggccatgacgatatcctcaagctcaccccagcctgcgtcgcagcgcatccgctgctgagacaactcgtcgctaagcgctttccctacatcttcgtcgatgagagccaagacaccaatccggaggtcgtcgaggcgttacggcacattgcgggcgaacatcctggcctgtgtgtcgggttcttcggagacccgatgcagaagatctatatgagcggagcaggcactgtcccgctgaacgacggctgggcggagatcacaaagcccgagaacttccggtgcccgacatcggtgctcggggtcatcaatgcaatccgcgcccctggcgacggtcttgagcaggtgcgtggtcggacgataaccgttgatggcatcgagcagccggttgccggtacctccaatctgttcatcctgccggcggacgcggagcggagtgcgcgcctcgcggccattaggcagtggctggccgccgaaaccggcgacggtctgtggctaagcgacgtgcgggaaggcgatgtccgcctgcttgtactggtgcaccgcatggcggccaaccggctcgggttccctaatctgtatgctgcgctcaatgaccgagcccccatgagtctgagtgaagggctgagcgatggcacagcctggccgctccgtccacttgtccagcacatacttccgctcgttgtcgcggcgcaagcgggtgatcggttcacagtgatatcgaccttgcgcagcgaatgcccgaggcttgaaccagcgcggcttcgagggcaagcgacggcccccgttcttacagcgctacagcaagcgctcgacgggcttgtcggtctgttggcagcaggatcgcaggcgactatccgggacgtcttgacgcatgtgcgagataacgagttgctgcgcctcgatgatcgcttcgccatgcatctggttgcagagcctgtggatgacggcagcagcggcttcgagaacgttcaagcctatctggcatgcggtgtcgacgaactctgggcctaccggcgctactttacagaggagtcaccgttcgcgacgcatcatggggtgaagggtgcccaatttgagcgcgtattggtcgtcatcgacgatgaggaagcgggcttccggcagtattcttacgggaagtatctcgggtacgtccccctctcggacaaggacgaagccaacctggcggcaggtgaagagtccgtactcgatcgaacccgccgcctcttctatgtgtgctgctcgcgtgcaacgaaggacctggcagtcgtggcctttgtgcccgatgtcgcagcggctcgcaccgcgatcgtggcgcagaatctattccccgaggccgtaatccgaggtgcggagcatctgggctga

SEQ ID NO: 79580 - DNA, 2136 bp, Pseudomonas aeruginosa; identical to SEQ ID NO: 79478

SEQ ID NO: 79581 - DNA, 1797 bp, Pseudomonas aeruginosa; identical to SEQ ID NO: 79479

SEQ ID NO: 79582 - DNA, 2115 bp, Pseudomonas aeruginosa; identical to SEQ ID NO: 72562

SEQ ID NO: 79583 - DNA, 429 bp, Pseudomonas aeruginosa; identical to SEQ ID NO: 72561

SEQ ID NO: 79584 - DNA, 1785 bp, Pseudomonas aeruginosa; identical to SEQ ID NO: 71894

SEQ ID NO: 79585 - DNA, 1338 bp, Pseudomonas aeruginosa; identical to SEQ ID NO: 73899

SEQ ID NO: 79586 - DNA, 1851 bp, Pseudomonas aeruginosa; identical to SEQ ID NO: 75378

SEQ ID NO: 79587 - DNA, 1650 bp, Pseudomonas aeruginosa; identical to SEQ ID NO: 75379

SEQ ID NO: 79588 - DNA, 1953 bp, Pseudomonas aeruginosa; identical to SEQ ID NO: 74520

SEQ ID NO: 79589 - DNA, 1668 bp, Pseudomonas aeruginosa; identical to SEQ ID NO: 74521

SEQ ID NO: 79590 - DNA, 1953 bp, Pseudomonas aeruginosa; identical to SEQ ID NO: 74520

SEQ ID NO: 79591 - DNA, 1668 bp, Pseudomonas aeruginosa; identical to SEQ ID NO: 74521

SEQ ID NO: 79592 - DNA, 2337 bp, Pseudomonas aeruginosa; identical to SEQ ID NO: 73776

SEQ ID NO: 79593 - DNA, 1878 bp, Pseudomonas aeruginosa; identical to SEQ ID NO: 73777

SEQ ID NO: 79594 - DNA, 1782 bp, Pseudomonas aeruginosa
gtgtatataagcaggatagttgttaagaatttccggtctttgaagcatctcgacgttcctattgaatccgggtcatcagccatcattggcgagaatagtgtcgggaagtcgaatctcttccacgctgtccgcgtctgtctagatgggcagctttcgtcaagttatcgcgctctactgaaagacgatatccattgccaggtggatctggccgccccgttccaagtgcttattggtgttgagttttctggcttccaagggaacgagaatcaagaagcgttgctgcacggcgctgaaattgcggaggaccgggctcggctgttttaccgatttaggccgaagaggatggtccgggaggagtgggctcgcggagagcttcaacgccccttgattcttgaggattattcttgggaactagcaggtggggggaatccggctgtagatcttgccgcaatcgagtggtcggatgagctgcaggatctgggcgcaactagcatccatcttcagtatcttcagtcctaccttatcgtcttcttgcccgcgttgcgcgatgtcgaggccgatctgcagtcgcggcggtcgactctcactcgactcatcgaaacttttcagatcggtgcagatgagcaacgtgatctggtcgaagcagttgaggctgcgaacatagaaattgaaggctcagccaccatccaagggattgccgaatcaatcgatcgcgcattcaaagatataactgggccagcctttagtctcgatgtggatctcggcctttcctcgccgacctttcagtcaattctccggaacctaattgttctattgagcagcgagcttgtctcgaagtttgagccgcgacgcaatggtcttggcctaaacaacatcctttacatcgcaaccctcgtagagtatttccgtaagcgcgctgaggtcggtcgatcagcgggagagctactcctgatagaggagccggaagcacatctgcatccacagttgcagaacactctgcttgaagcgctccgctcgatgcctttccagtctctggtttcaacacacagtacgcaggtcacagccaaggtgccgttggccaattacgtggtcatgacgatgcaagcggatggaacgccattcgcagttgcaccagcctcaaatcatcggcttagcctctcggagcagcaggatctcagtcgttatctggatgccacgaaatccaatttgctcttcgcccggaaggtcatgctggttgagggggctgcagaaatgctgttgatccccccgctcgtcaagcaggtgttgaatatagatctggagcgcgagggtatctctctcgtggccatacatggcgttcacttttcctctttcgctcgcctctttgcggctgactgcctgccgaagcgctgcgcgattgtgggggacgctgatcgtgaagttgtaccggatccactcgatgatgacgtgcctgtaccgccaaatctggatctgctccgtgggccctacgtagaggttttccttggtgccacgacattcgagatcgaactgaccaccgaagaaaacttgccgatgctcattgccgctgctaccgaactcggcgctccaagactgcgtcaggcgctagaaaaccaccaattgattgggccccccgtctccgctgagttaaggaacaaggtcctgcgaacggccaaacgcttcgggaaagggcgtttcgcccaagtcacagcccgccatgtggctttggctgggtcagtgccggagtacatcgttgatgcgattaattggttgagggagcaatga

SEQ ID NO: 79595 - DNA, 1557 bp, Pseudomonas aeruginosa
atgcaggaaggtgacgagttgcacctgtcagtttctacgatccatgccttctgtctgcaggaggttctgaggccttatgggtggctgctgccagactaccggggggcatcacgagttttgactcgtgataacccagacttcgagacaatcgctaactacgcggcgcagcgtgtaacagatgatccgcttcggactcaggactatgacgctttcgagtctctaaatctaaatgctgcaggcgaactgattggccctgcggtggagaatcccacagttgcaggagctgcatcgtttttctggcagcgctgcgtggagctggggtatctcgatttcagcttgataatctacaggtcgtatctgatccttcgagatcaccctcgcgtagctagaacattgtgttcaaagttcgcgtggttcctagtggacgaattccaagacaccacggagctacagatagagatccttcgtaggctccacgatgtgggcaattcaaggttcttcctggttggggatctttctcaatctatctatgcattcaccggtgctcggccagagttagtggcgccttttgggcagtacatccaagcacgagctgatttgtcgttaagtcaaaactttcgatcaagcgcccatatcgttcagcacggtgagcggctttttcctcggcagccagccatgacggcagtgggtggcaatcgtaccttcgcgcttgagcctgtactcgttcgcggtatgacagcctttcaggcgattacggagcattttctgcccatgctcgaagagcaaggaatcgaacttggcaatgcaacgatattggggcgcgaatggcgtggattgatcgagcttgcccgtcagcttagggattttggtactccggtagttggtcctggagctcgcccctatcgcaggtcccgattgttcgtgactttggctgagcagctatgtggtgcggttgtagagacccagccgggtacgatgcgacagcttgagcgtgccgtcttcaacacgattttggacattacggggcagcctcgactcgatatcttcacctatgaagggcgcatcttgatcatgcgaatgctccacgcagcaatccgccatgcacagcacggcggtgcgttggcgtggctggatcgcatgtctcgcgaggtaggcaggttactgttcgagaccggttacatcgatcaggcccaatcggcactttttcttgcctcagtccatgagatgaatgcagatatggttagacagggtatcgatgcagagaacctccaaattgaggatctcgggctatttgcgagtcctacgagagccttgagactgtcgaccattcactacgccaaaggtcgagagtacggcgctgtggcgatgatcgggctgaagcgaggtagctttcctcattttcgagctgatacccctgaggcaattgctggcgacagacggctgttctatgtgggggtaaccagggcagaaagggttctgatgtacattgccgaaagagacagatggaataatccacccagcatcttcttaggggcagatggcgtgggaatgctctga

SEQ ID NO: 79596 - DNA, 1905 bp, Pseudomonas aeruginosa; identical to SEQ ID NO: 72778

SEQ ID NO: 79597 - DNA, 1677 bp, Pseudomonas aeruginosa; identical to SEQ ID NO: 71997

SEQ ID NO: 79598 - DNA, 1785 bp, Pseudomonas aeruginosa
atgagggtttctcgggtcaggttgatcaatttcgccaatttctcggatgttgatgtcgagacgggggaaagcatcgtcatcgtgggagagaacaaggttggcaagagcaatttcattcgcggcctgcagttgatccttgatccgggcttgtctgaacgcgatcgacaactggggcttgaacatttctgggacggacttggcgaagacaaggttggtgcgaccattgaggtctctgtggatctaacggacttcacaaacgatccccggctgatggctcacctcaacgattgcgtgattgatcctggcccacccatggtggcccgactcacctaccgcttccagcctaaggcgggcctggggcgcgccccggaatcgttgaaggactatgagtatgtgatcttcggtggcaacgatcccgaaatgcgtatcggcggcggacttcgccggatgttgccaatagatgttcaggtagccctgcgtgacgctgagaaggaccttgcgagctggcgcaattcgccattgaggccgctcattgaggatcttgccgcgtcgttggatgatgacgcccgtgaggagattcagaatcaggtcgaccaagcacagcgagagctggctggacacgaggaagtggtagcgacagcagaacggatcagcgaacggctgatcgcaatcgccggggggcaacatgctgtcccggtatcgctcggacttgcacctacacgagtggatgcattgctgcgtagccttcggctgctcatcgacaacggtgttcgcggtgtcggcgatgccagcctaggaacggcgaatctgatcttcctggccttgaagagcctcgaactcgaccgtctcgtctccgagggggagcgcgaccacacattcttcgtcgtcgaggagcccgaagcgcacctgcatccgcatgtccagcgtcttgtctatcgctactttctcggcacaagtgcggaagatgaggacgaagcccctccgctgacgacaattctcactactcactcgccgcaaatcgcaagcgttacaccgattaggtccatcgttctcctgcgtcataacgcaacggacgggaaaaccgtcgcggtttcgaccgcgaacgcacctttcacacagagggatgaagacgacctccagcgctacatcgacgtcactcgcggagaaatattattttcccggggagtgattctggttgaaggggacgccgagcgcttcatcatccccgcgttcgccgacgccctcgggattcctttcgacatacttggaatcactgtgtgctcggtcggggggacgaacttcactccttatgtgaagcttttgggccctaaagggctaaatattccacatgtaattttgacagatcgcgacccggtcaatggcaaacctccactagcccacaggcggttaattaatctcttaaacgaggtcgatgacgaatatggttacgatgacctggatatagatgatgtgctcaaatacgccgcagagtttggatacttcgtcaacgagagcacgctggaatccgacctatttgccgccggaatgaccgaggcgatgaagtcggtaatcgagcaggagttgccgctgaggcaagtcacccgggacgcactgcaagagtgggtggatgatccggatcaggtcgatgaagaccggctgctgaagttgattgaacggattggcaaggggagatttgcacaggcacttgcgccgtcggtgtctgaggacgtttgcccggcctacattcgctctgcgctggagcatatccgcgatgccgtcgcgtaa

SEQ ID NO: 79599 - DNA, 1338 bp, Pseudomonas aeruginosa
gtgctcaatcgaaatagcgtcgcttggcgtagcgaggaggaactcgctgcctgggccgaggcctacgaggccgctctgcgcgacgatgggctgattgactacgatgacatggttgtcttcggccaacgtttgatcgccgagcacgactgggtactacctctggttcaggcaaaattccccgtgctcgcggtggatgagtaccaggatttaggcgtggcactgcatcgcatcgtcaaacgccttgccttcgacgggggtgtccgacttttcgctgtcggggatgcggatcagtcgatatatggatttacgggagctgatggcgcgttgctcatggaattggcggctcgcagagacattgagcctgtccagcttcagttaaattaccgttctggtgcagggatcgtgactgcgtcagagatggcgcttggagaagcccgaggctatcaagcgagcgatcctgcgcgacaaacgaccatcgaatttgtcctgcgcccgggtggtatggcggaccaggctgcgcacgccgtcgcgcagatcattccggcggccttagcctccaagccgggacgaacactgggcgatatcgcgatcctatacaaagactatcgcgcaggcgatatcgtggctgaagctgtggcaaccggtggtctcgattacatccgtgtggataccgcagcaccttaccgcaaggttgccctaacaagttgggtagaagattgtgcggcgtggtgcgcgggtggctggcgtgttggacgcccacaattgcgcggactactcgaccgctatcgcgcatttcatcgggcgagcttggacgattcacaggccaagcgcgaagagcaagagctaaccgccttgctatgggagctgcgtgctgaccagcaacctgcgcgagaatttgttgcttcgctgcgcaacggtgtagtggatcatctgctggcggctgaattggcgctcgctgatcagaaggagcaactggatcgcatgacggcagcgctcgctgaaggaggtgcactggcttcgctagacatcacgagtttgggcggccgggacggttcgcccgatcacctgaatctgctgacactgcattccgcaaagggctgtgagtacgacgtcgtcatcatggttggactcgacctcggaaatctgccgtggcgcaatgaaactccagagaagttgcgcgaaagtcgccggctcttctatgtgggactcacacgtgctcgcgacgaggtccacatgctgtattcgggcttcgttgatggccgctatggccctatgcgctttgggcgctcgccattccttgatgagctggaggcgcgaatgcgtgccgctggcatttga

SEQ ID NO: 79600 - DNA, 1953 bp, Pseudomonas aeruginosa; identical to SEQ ID NO: 74520

SEQ ID NO: 79601 - DNA, 1668 bp, Pseudomonas aeruginosa; identical to SEQ ID NO: 74521

SEQ ID NO: 79602 - DNA, 1851 bp, Pseudomonas aeruginosa; identical to SEQ ID NO: 75378

SEQ ID NO: 79603 - DNA, 1650 bp, Pseudomonas aeruginosa; identical to SEQ ID NO: 75379

SEQ ID NO: 79604 - DNA, 1905 bp, Pseudomonas aeruginosa; identical to SEQ ID NO: 72778

SEQ ID NO: 79605 - DNA, 1677 bp, Pseudomonas aeruginosa; identical to SEQ ID NO: 71997

SEQ ID NO: 79606 - DNA, 1953 bp, Pseudomonas aeruginosa; identical to SEQ ID NO: 74520

SEQ ID NO: 79607 - DNA, 1668 bp, Pseudomonas aeruginosa; identical to SEQ ID NO: 74521

SEQ ID NO: 79608 - DNA, 1797 bp, Pseudomonas aeruginosa
atgcagattgcaaaagtcaaggtcgaaaagtttcgtgggattgaatccggcatcgtgacgctgtcaggccacagcgtatttctcggtgacaacaacgtcgggaagtcaacgctgctggaggccatcgatctcgtcctcggaccggaacggctctcccgaagacccgtcatcgacgagcacgacttccacgccgggcgctacctggatgaagagggaaatccggttctcattcggattgaagtcatcgtcagtgacctgtccgccgagcagcagcgacactttcgtgaccacatcgagtggtggtccgccacggaaaagacgctactcgtaggcccgcccccggaagacacggatgcgccagacgtgtcggctgcgctgcgggtgtttttcgagggtcgctacgacaaggaagaagacgacttcacgggcaatactttcttcgcgaccccagtgctagctgaaggtactcacccaactttcaaaacgaccgacaagcgcaagtgcggcttcctgtacctccggacgctgaggacaggggcgcgggcattgagcctggagcgcgggtcgttgcttgatgtcatcctcaggcttcaagacaagcgcgtgacgatgtgggaagacctgctgaacgagttgcgcaaactccccgtggccgataagccggaactcggcatcgccccgctcttgaaggacgtccaggacgctgttcgccgattcgttccttctgactgggcagaggaacctcacatgcgcgtgtcggatctcactagagaggccctgcgcaaggatttgaccgttttcatgggcaccggcgcgaagcgtccggacggcagcacctattgcgcgccatatcaccatcagggcaccggcacgatcaatacattggtgctggcgctgctatccatcatcgcgggcctgaagcagaacgtcatcttcgcgatggaggagcccgagatcgcccttccgccgcatacccagaagcgcatcgttaacagcgtgcgcgagacgtcggcacaggcgcttttcacgtcgcactcgccctatgtgctcgaagaattcgcgccgtccgagatgcatgtgctgcggcgtgacgggggcaagctttctgcgatgctggcgacatacccaccagcggtcaagcccaaggcatacaaggcagagttcagggcccgcttctgtgaagcgctgcttgcccgatatgtacttgttgtcgaaggtcgaacggagttcgatgcgatacctgcagcggcgcgccggctcaacgaattgaaccccacagaatacaagacgcttgaggccctgggggtggccgtcatcgatgcgcaaaccgatgcgcaggttgcccctctcggcaagttcttcagcgacttgggcaaaacggtcttcgctgtgttcgacaagcaggaaccagcagcttccgccaccatcaaggctgcagtgcatcattcgtttgaatccgccgagaaaggattcgagaacgtcgtgctgcgtcacactgcggaggcggcccttcgccgatatgcactcagtctcgtcgcggagaacacatggccaaaccatctgatcgccaaggctccgaacgaaacccataccttggagcagattcgcgacgcactgcgacagttctttagctgggcgaaaggaagcggcgacgccggggacttgctgggatgctgcaccgaggcggaaataccacagtatgttcgagacacgctgcgggcgattcacgttacggtcgaacccccacctctgccgcaattgcctccagtgttcgcaccgttcgaagacgagttatga

SEQ ID NO: 79609 - DNA, 1653 bp, Pseudomonas aeruginosa
ctgggcggtccgggttctggaaaaacgcatgttgctctgatcaaagccagggacgagattcgatcagcaaggctcctgccaggccagcgcatcctttttctcagtttcgcgagaccgacagtggcgcgcgttcttgagaaagccaaggaactcatcacccctgatgatctgaatctcttggaggtcaatacctatcacggcttcgcgtggagcattctgcgaagtcatggctacctgctcaacaacgggaagccgctccaactgctgccacctcccgagggtgccgcgcgattggctcactatgccaaggagcagcatcatcaggagaagctgcgcctttttcacgaagaggggctgctccacttcgaccttttcgcactgctaacctctgaacttctgggccgcagccagcggctggccggcatctacattgcaacttacccaatactcgtcgtggacgagttccaggatacgaacgccgacgagtgggcaatgatccgcgagcttggaaacggctgcaggattattgccttggccgaccccgaccagcgcatctacgaatttcgcggcgccgatcctcttcggctcaaggagttcgttgaccagttcgacccactacccgtcgaatttgaaggggaaaaccatcgcagtgcgggaacagacatcgcaacgtacggttcagacttactcacagggaaaaacaaaggggccgtctacaccaatgtgtcggtggtcgaatatggcgtgtactacggaagggggcctcatttccatgtgaaggcccaactcatccaggcgatcaagaggcttcgcaaggagtcggcctggtccatcgcagtgctggttccatcgaaggctttcatgcttcaggtgtccgactatctctctgcggagtccgatggacttcctaacctacgtcatgaggtggcgatggacgcggaatccccggcgcttgcggcaaacgtcatcgccacgctaatggaaggaggcccttcggagcttctggctgcgcggctactctccgccttacatacccacatccggggccgcagtggcaccaaacgccctgcgcaggcggaactcgacatggccgacgccatcgaccaatacttggtctccggaaagatccgcggcaagaatcgccaagcgttgatcagcgagtgcgcgcgcctagcggcgcttcgccaggacgtcgtattcaccggccatcctgaagaagactggttgactgcgcgggggcttctcgcgatgtctgccgttggccagttgtcgcgcgttgccgctgatgccaagtatctccgcctgcttcacaagggctcaaacctgcgggcgtctttgtcagagctttggagatcccaaggacagtatgtcggcgctatcgaagctgtccggggcgctttgctgcaggagcatttcacagcagccgccaaggaatggcgtggagttcatctcatgacaattcacaaagcaaagggtaaggagtttgacgaggtactgatttacgaggggcgatatgctggacgaattgtgcctgcgaatgcagatacttctcgtcaaagccaagcccttttggcactgcgggtcgcagtcacaagagctatgaagagagcaacaatcctgacgccatcgggagaccgcagcatttttttgtaa

SEQ ID NO: 79610 - DNA, 1953 bp, Pseudomonas aeruginosa; identical to SEQ ID NO: 74520

SEQ ID NO: 79611 - DNA, 1668 bp, Pseudomonas aeruginosa; identical to SEQ ID NO: 74521

SEQ ID NO: 79612 - DNA, 1953 bp, Pseudomonas aeruginosa; identical to SEQ ID NO: 74520

SEQ ID NO: 79613 - DNA, 1668 bp, Pseudomonas aeruginosa; identical to SEQ ID NO: 74521

SEQ ID NO: 79614 - DNA, 1953 bp, Pseudomonas aeruginosa; identical to SEQ ID NO: 74520

SEQ ID NO: 79615 - DNA, 1668 bp, Pseudomonas aeruginosa; identical to SEQ ID NO: 74521

SEQ ID NO: 79616 - DNA, 1953 bp, Pseudomonas aeruginosa; identical to SEQ ID NO: 74520

SEQ ID NO: 79617 - DNA, 1668 bp, Pseudomonas aeruginosa; identical to SEQ ID NO: 74521

SEQ ID NO: 79618 - DNA, 1953 bp, Pseudomonas aeruginosa; identical to SEQ ID NO: 74520

SEQ ID NO: 79619 - DNA, 1668 bp, Pseudomonas aeruginosa; identical to SEQ ID NO: 74521

SEQ ID NO: 79620 - DNA, 1905 bp, Pseudomonas aeruginosa; identical to SEQ ID NO: 72778

SEQ ID NO: 79621 - DNA, 1677 bp, Pseudomonas aeruginosa; identical to SEQ ID NO: 71997

SEQ ID NO: 79622 - DNA, 1782 bp, Pseudomonas aeruginosa; identical to SEQ ID NO: 79594

SEQ ID NO: 79623 - DNA, 1557 bp, Pseudomonas aeruginosa; identical to SEQ ID NO: 79595

SEQ ID NO: 79624 - DNA, 1872 bp, Pseudomonas aeruginosa; identical to SEQ ID NO: 74584

SEQ ID NO: 79625 - DNA, 1656 bp, Pseudomonas aeruginosa
ttggcgctaggtggtcctggtgcaggcaaaacacacgtcgcgctggtcaaagctcgtgatgagattcgctcaggggtactcaagccaggccagaagatcctcttcttgagcttcgccaggcctaccgtagcgcgcatcatcgaaaaggcttctgagctgatttctcgcgaggacctgaagcaacttgaggtcagcacgtaccacggttttgcttggagcattctccgaagccacgcctatctgttgaatggcaggccgagcttgcagcttctgccaccacccgaggcagcagcgcatttggcagatatcgataaggcccagcacgaaaatgagaagcgacgcctattcgagcacgagggccgcctgcatttcgacttgttcgcaagcttggtcagcgaacttctgagccgtagtgaccggctaagcgccatcttctccgacgcctatcccattatcatcctcgacgagtttcaggacacaaactgtgatgaatgggcgctgatccagcagcttggaaagcgtagtcgcctcattgctctggccgaccctgaacagcggatctatgagtttcgaggcgctgatcctaggcgggttggcgactttctggagatcttcggcgccgtccacttcgatttcgcaggtgaaaaccaccgcagcagcggtaccgatatcacgacctatgggaatgacctgctcactggcgcaaacaagggcaaggtctatcagcaggtaaaaatcacgcgttacggcttcatgtatggaaagagcctgcacttcaatgccaaggccgcagtgctctcggcgttggatcgcctcaaggcaataccggacaaatcgatcgcgatcctggtgccatccaagcggctgatgctcgagctttctgattacctttcttctgcagctgatggtctgccagagctacatcacgatgttgcaatggatgctgaaccgccggctctcgccgctggcgttatcgccacgttactggagggggggacggctggcgatttggcgagccgcatgcttggtgcacttcactcgcacattcgtggacgccgcggaggcaagcctaccccccagtccgagctggacctggcaggtgctcttagcggattcctctcctcgggaaagatccgcggtgccaaacgccagctgattgtcagcgaagttcagcgtatcgcagagttgcggcagcaactgcaattaacgggcgaccctgcggaggactggttgcagctgcgcggcctgttgcaatcgtccgctgcggtagccttgaagcaagtagcaacagatgctcgctaccttcgacttcttcatcgtggctcggtactgcgggctaacttgggtgcgctgtggcgtgcccagggagagtacaagggggctgaggaagcagtccgcagtgccttgatgcaggagcatttcgctgcagctcaaaaggactggcgcggcatccacctaatgacgatacataagtccaaagggaaggagttcgacgaggtcatcatctacgacggcctatttcagcgcattgccaaagccccgcaggatccaaaaatctgcgctcaggatcttttagtgctacgggtgggagtgactcgggcgatacgtcgaaccaccattctgactccgaagcgcgatacctgccctttcctgtga

SEQ ID NO: 79626 - DNA, 1905 bp, Pseudomonas aeruginosa; identical to SEQ ID NO: 74222

SEQ ID NO: 79627 - DNA, 1674 bp, Pseudomonas aeruginosa; identical to SEQ ID NO: 74223

SEQ ID NO: 79628 - DNA, 2337 bp, Pseudomonas aeruginosa; identical to SEQ ID NO: 73776

SEQ ID NO: 79629 - DNA, 1878 bp, Pseudomonas aeruginosa; identical to SEQ ID NO: 73777

SEQ ID NO: 79630 - DNA, 1872 bp, Pseudomonas aeruginosa; identical to SEQ ID NO: 74442

SEQ ID NO: 79631 - DNA, 1656 bp, Pseudomonas aeruginosa; identical to SEQ ID NO: 79449

SEQ ID NO: 79632 - DNA, 1953 bp, Pseudomonas aeruginosa; identical to SEQ ID NO: 79360

SEQ ID NO: 79633 - DNA, 1668 bp, Pseudomonas aeruginosa; identical to SEQ ID NO: 79361

SEQ ID NO: 79634 - DNA, 1953 bp, Pseudomonas aeruginosa; identical to SEQ ID NO: 74520

SEQ ID NO: 79635 - DNA, 1668 bp, Pseudomonas aeruginosa; identical to SEQ ID NO: 74521

SEQ ID NO: 79636 - DNA, 1797 bp, Pseudomonas aeruginosa; identical to SEQ ID NO: 79608

SEQ ID NO: 79637 - DNA, 1653 bp, Pseudomonas aeruginosa; identical to SEQ ID NO: 79609

SEQ ID NO: 79638 - DNA, 1953 bp, Pseudomonas aeruginosa; identical to SEQ ID NO: 74520

SEQ ID NO: 79639 - DNA, 1668 bp, Pseudomonas aeruginosa; identical to SEQ ID NO: 74521

SEQ ID NO: 79640 - DNA, 1953 bp, Pseudomonas aeruginosa; identical to SEQ ID NO: 74520

SEQ ID NO: 79641 - DNA, 1668 bp, Pseudomonas aeruginosa; identical to SEQ ID NO: 74521

SEQ ID NO: 79642 - DNA, 1767 bp, Clostridium butyricum
atgtatatttcagaagtaaagataaagggatttagaaattttaaagaagatactataaattttaaattaaatagtttaattattggagaaaatgatattggaaaatctaatttgatttatgcactaagaatattgcttgataagagcatatcagaagcagatttagagcctaaagataaagatttttatgccttcgaagaaactaatgaattccatatacaaataaaatttgataatattactgaagaatgtattcaatcaaaatttaaaggtagtattagtgaagatggaattatgtatatttcttttaatgcacaaaaaaatagtgatgataattctattatatattatttttctcaaggaaaagatgaaggaagcttattaagagagtctaatagatttgaaagtaggtattatttaaagatattaaatatcgagtacgtaaaaagtaatagggatttaaaaagatttattaataaagaaaagaaaaatttattatcagatatgatgaaaaaaagagaagaaaagcaaaaagaagaggataataaaaaaatagaattagttaaagaaaatttaataaatgttaataataatatgagagaattatcctatataaaaaatgcaacaaatgtaattaataaagatttagataatttatcaatacataataaaaatcaagtttttcaatttagtactattgctgaatctattgacgatatacaaaataatgtagaactagtatcaaaatttgatgaaaaagaactaagtattgggggagatggacgtaataatcaaatatttatgtctttgtggtgtaataaatacaataatataaaagaaaattgcttaagcgttactatatactgtatagaagagccagaagcacatctacatccacatcaacaacgccagttgtcaaagtatttacttaatttattgaatggacagataataatatcatcacattctcctcaaatagcatcagagtttagaccagattcaataataagactgcataaatcaaaatatacaacaatttctgcaaataatggttgttcaacagtagttgaagatgctatcaatgattttggatatagaatgaatataatagcgtctgaagctttcttttcaagagtagtgttattagttgagggaccatcagaagaaattttttataaaacactagcacatgaattaaatatacaattagataaaaatgggataagtattattgatgttaatggtgttggatttaatgaatatatgaaattgctaaaatcattaaacataaaatttgtatttagaacagataatgacatatttaaaatacccaataagaataaatatagatgtgcggggattcaaagggctattgatttttataaaaatcattatgaacacaatgaaaaaatagatgaaattctgaaaagagaagatgaatttaataatttacctgataaagttttaagcaatgatgttaaagaattaatgaatcaattgataacagagttaaataaaattgggatatttatatcagatgttgatttagaaaatgacatatatgattcaggaatttctgatgaattaaaaacttattatggaactactacaaaacaagacacagtttctaaaatgcaagagaaaaaagcaataaatctttattattttcttaaaaataatcaaggtgcattaaaaaagatagaggagtcttctatagttgaacctttaaaaaaatgtgtagttatgagtgatgaagaagatgaatga

SEQ ID NO: 79643 - DNA, 1599 bp, Clostridium butyricum
atgaatgagatagatttatcagaagagcaaaaaaaagtatttaattatgatgggaatgtagtagtaatagctaatccagggagtggaaaaacattcattgtatgtgaaaaaataaaatttattataaataagttattagattatcaaggtgttattgcaatatcatatacaaataaagcaagtaaagaattaaaagataggttgaaaaatgttaatttaaaatcttcattttttaatacattagatacattcttattaatggaaataatatatccatttggacagcatgtttttggtaatgcaaaagaagagtttcagatatatgataataaagataaaagcagtaatgaagtaaatgaattcagaagcaaatcaactatatattcttatgaggaaaagtatataaaattaggtgaattatatttaaatggtaaaataatgttagaatatataagtgagttagcagtatatattattaataggtcgaaagcttgtaaaaattacttgaaggcaagatataaatacatatttattgatgaatatcaagattgtggtgaaggtcaacataatattttcttaaaaatagtatcgttaggaataataggtgtagcagtaggagatcctaatcaatcgatatatgggttttcaggaaaaagttctaaatatttattacaattgaaagagaatagtaattttgagatattctatcttacgcggaattacagatgtcataaatccataattgaatattcatcaagactattggataaagatactttgatggaatgtgatgataagagaattttttataagaaagtaaatggtaatcaaattgatatttgcaaatatatagatagtgaaatagataaaataaagtcattattttctataaaaaattataatgatattgcaatattagttagaggtgatgtgacaggaaaaatagtaaataataatttaaatactgaacatagatattttcagacaactgaattagataaggattcaagtttatggagcggattatttaaaagacttcttagatataaaatgaatagtggaaataaatatgcatttgttgaagagtttttttacgaagatgatgataaatttaaaatattatataatgagttaagagaatttgatgaaatagatattaagaaagaagattgtaagacaaattttataagaattgctgagttaatatatcctcatggaaaaaatgataaagctataagattattagaagaaatattaaaggatgataatttgtataatagttataaagaagcagataaaaatcaagtgcaaataatgacattgcataaatctaaaggattagagttcagaattgtaattcatttagatatgtatagatttatattacctaatgaaaagaaggaaaatggtatatggaaaataattggatttaatcaagctttgaatttacattatgttggaataacaagagcaatagatgcttgttttataataacgagtacaaaacgtattaatggaagtaattcagaattatcagcagaggattcaatattactttcttaccataatgtaaaagaacttagaaaattatattcttaa

SEQ ID NO: 79644 - DNA, 2019 bp, Clostridium butyricum
gtgtatttaaggagttttgaaataaataatttcagaaagtttggaagaacaaataatattgtagaattttcaaatgaaattaaacaatattcacaaagaaaaagtgaaaaagttaatattgcacaaacaactacattgatagtgggaaaaaacaattctggaaagacaagcattatacaggcattagataaattaataagagaaaatagttttaattctaatgattttaatttcttttatcttaaagaattattaagtaaatataattcttctagtgacacattagaagctccatatatggagtttgtacttactgttggaatagacaatgaaaatacagatttaattactaatattatttcttttatgacattggaagatgttgataatgcacaaatagatattattataaaatatgaaattgaagattatgaaacatttacggttgaagtaaaaaaaatattgagagaaaaatataatgaaaatattctatttgctaagtttttagagttaatagataatttgaaatttaaaataaattattataataaaagtagagaaaacatagaaaaattcaggttaattgatttaatggacttaacatctataaaagcaaataatatcagtagtgagcactgtttatctaaagcgtttagtaaaattgttaaatatagatataataatctattaggaaatgataaaaaagatttagaggaaagtataaattcaattaatagcacattaacaaaaaaaattagtaataaccataccacatatataaataattcattaggagaaattatttcaaaggataaattaaaagtattattgagtgcagatttatcctttcaaaaacttatgaatgatttagtaaaatatgaatatgttgaaggtaagatcaatgttccagagaatcaatttggattgggttatactaatttaatggagataatatctgagattattgattatatggaaaaataccctgaaaattcgtttaatagcaaaattaatttgatatcgatagaagaacccgaaacatttatgcatcctcaaatgcaagaattatttattaaaaatataaataatgcgataaatacacttttaaaagataaaaataaaaatgtaaatagtcaattaataatgacaacacattcttctcatatattaaatagtaagatacatagtggtaatacgtttaataatattaattgtattaatacccaaaataattgtgctagggttgtagcattaaatgatgaaaaaataacgccagaaggtgatgattctgaagatgatttaaaatttattaagaatcatataaaatataaagtctctgaattattttttgcggatgcaattattttagttgaaggtgcaacggaagatacaatattaccatactatattgataaaaatgaaaaattaaataaatattatgtatctatttttaatattaatggtgctcatggactggtttacagaaaattgctgaagttgttgaaagtaccaacattaataattactgatttggatataaagagagatgatgatgaaaaagaaaagtataaacagattaataatctaaaagatagagttactacaaatcaaactattattaaatataataatggtagtgataagctagatcatataccagaatatataaaagatgaaaatataattattacatatcaaggaagtataaaaagaagttttgcaacaagttttgaagaagcatttatattaacaaattttgataatgatatattaaataaagttttaaataaaattaaacctaatatttataaagaaatagtaggaaataaaaatactaaaaataatattaaagaatcatataaatggcaaaggaaactatcaaaaagtaaaagtgaatttgctaatgaactactatataacttaattattgaagatgataaaaagaagattcctttattgcctaaatatatagaaaacggtataaaacaattagttaatcaattaaaggagaagaattaa

SEQ ID NO: 79645 - DNA, 2061 bp, Clostridium butyricum
atggtcttaaaaaatatatctccattaaaaaaaacaaaagaagatgacatattaaagtcaatttataaagccattgatgtaaaaatgaatacaatttttaattctggtgctggttcaggtaaaacatatgcacttattgaatgcttaagatatattgttaaccaatataatgataatttaaaatatcataatcaaaaaattatatgtataacatatacaaatattgcagcttatgaagtgaaaagaagattgggaaattcaagtactgtaataatttcaactatacatgaaagaatatgggattttataaagaattataaaaaagaattagttgaaatacataaagaaaatttgttaaatcaaattgaaatattaaaagaacaaatatgtaaagctaatgaatataagaaatataatgaattgaatgacgaacaaagagataattttaataagctaattaatgagaacagagaattatattataaatattatagttgtagtgcaaaacagtttaaagaaaaattaaattgctttgaaagtaagtttcctggaatattaagtaatgttgctaactttaaaaaaattgtaaatactatttttaaaataaataaatattcaatatgtatagataatattaaatctaaaagaactaattttacttcaataaaatacgatcctatgtataataatgatcaattgaataaaatgcgaataagtcatgatacattattagaatatggccttaagattattgaaaaatatgatttacttaagcaaataattgttgacaaatacccatatatactaattgatgaatatcaggatactgatgaaaaagtaataaagattataaattgtttgcatcagtattctataaagataggacatgaaatttttgttgggtattttggtgattctgcacaaaatatttataaaaaaggtgtaggtaaaagaatttttaacatccataaaaatttattgaagattaataaaatatataatagaaggtcaacaaaagaaataattgatattgccaacaatgtaagaagtgatgaaattattcaagaatctatatatgaagatagctctggtggcagtatgaaatttttttatggagataaaaacgatattagcagatttatagaaaaatatttagttgaatggaatataacgaaagaaaatccattacattgtcttgcgttaactaataagagtgttgctaaatatagcggatttgaaaatttatatgatacattaagtaacacgcaaatatatagtggtattggtagagaacaacttaatacagaactattaagtaatgatttatcaaaactaggcgaaattcccagtgtgctttatagaataattaaatttattgtagatatagaaaatagtaaaactcagttaaaggaaattttaccattagaaatatatgggataagcattgaggaattaaaagaattaattgagttattaaaaacaattaatggaaataccttagaagaatatataaaagttatatataaaatttatagtgaagatagaattggtaattatagaatattagttaagaaaatttttgatttgaatgatattacaatggataatttctataattatttgcttgaaaaattatatcctaatttaattgatggagaagaagatgatgctaaaaatatgataaaatcaattttagaaattaatatagatgaatacaagcgatggtataagtatattttaaatgaatttgatgatagaataatttatcatacatatcatggaacaaaaggattagaatttaataatgttataatagtaatggaaaattcatttggaaagacatcgcattattttgattttttctttaaagtatgtaaaggaaccaatacattaagtgataatgaaaggctaaaatttgaagaaataaaaaatttattatatgtttcagtttcaagagcaattataaacctaagagtattatatgtagatgatatatcagaatttaaagacggaattaaatatatttttaatgaaatatatccatataataatgcaaattaa

SEQ ID NO: 79646 - DNA, 2067 bp, Sphingobium baderi; identical to SEQ ID NO: 72652

SEQ ID NO: 79647 - DNA, 1773 bp, Sphingobium baderi; identical to SEQ ID NO: 72765

SEQ ID NO: 79648 - DNA, 2064 bp, Staphylococcus aureus; identical to SEQ ID NO: 72502

SEQ ID NO: 79649 - DNA, 1749 bp, Staphylococcus aureus; identical to SEQ ID NO: 72503

SEQ ID NO: 79650 - DNA, 1719 bp, Lactococcus lactis subsp. lactis; identical to SEQ ID NO: 75324

SEQ ID NO: 79651 - DNA, 1506 bp, Lactococcus lactis subsp. lactis
atggaattaacagatactcagaaaaaaattgttgacacagcaggcaacttgattgttagagcaagtgcaggcactgggaaaacgcatacaatggtcgcaaaaattgcgaaagaaatagacgagaataaggatcatcgtgttattgcagcaatcacttttacaattaaagccgcgcgagaaataaaagaaagactatctgtagatattacaggatattttattggtactaataatagttttgcaatcgaagaagttatcaaaccgtttatgaaagatgcctacggtgtacaatttgattgtgagatgacgactgactatagtctaaaatttgataattacgaagaagggttgaatttcatttctgaaaactgcactttaggaagctatgaggataataataagaattttattttcgaactagctctaaaaatacttagaaagtcagaagtagcacgactgtacctgcaagctaaatatttcaaaatttatgttgacgaatatcaggattgtgatacagcaatgaatgaattttttatgtatttgacagattcattgaccattgacttatttattgttggtgatgacaagcaatccttatatacatggagaggtgctaatcctgaagcattcaagagtattattggcaaaagaaatttcgaaaaattttttatggttgataacttccgttcaaataaacagattcaaaactactcaaatctgctttttgaagagacttccagtctctatgatcaacaaaccagcatagagaatattattttgttaaattgtacggaacaagattggattgaaaaaatcaaatgtttttgggatgcagacaaatcttctgctttgttgagattttctaattcaaatgcgaaaagtgctgctgatattttgtgtgcgaatgatatggatttcaaatttattcccaaagctccaattgaagatatttcaaatgatgcaggatggctctattatgcaatagcacaatatttactagttgatacctattcggtttttgattttatctatgatatcccttcagggacggaggaagactcgaagattaaaagcaagttggagagattcctacaggggttaaagacaaacgttgttgatgaaaatcaatttaaggaaaaagtttcagagcttgctacatttctaggatatgaagctcagcctaaagatttatcagctctttatgaaactatttctacagacagatatattgaagcgttcaaatcagataacatcaaccatagggcgatgacatttcattcttcaaaagggttgcaatttgatcaagttatcctgtttgttgaggattataatttgcgagatgaggtaagtttctataaccattatgtggcaactacaagggcaaaaagcaaactaatttttattagtatcaaagaaaactatggaacaaggctgttctatcaaaatattgctaaaaggttaggagcaagtggattgacattggataaattggttactatctattag

SEQ ID NO: 79652 - DNA, 2082 bp, Lactococcus lactis subsp. lactis
atgaagattaaaactatcgaaatttcaggttttagacaaatttcaaatgccaagtttaatttggaagataggcttacatttcttgctggaggtaataatagtggtaagacttcactagtcgaacttttgaactgtgtttttaattttggtgccgaaaaattgtctggtgaagatttttcagtagttaatactcaacagtgggtaaatgatgtttatccacaaatattaaattattttcaaaatgatactcaaaaagaaaatataatctccaatatttgtaatttaatttttcttggtacagatgaaaagaatagaacgattattgagcctattaaattaaaaattcaagttgattatgatgttgaaaatgatgatataagaaatttcgctgactatataatggaccttgatccatcttcttctagcttctattttatttatgaatataatgtagataattctctttttagaaagaatctaataaataattacgataaactagaacatcggatcagaaaaataatttcaacttctgaaaataatattgataaaaatataaaaaaaataattttgaaagtatattttgaatctctatcagaaaccattagatttacggatagtaaattcgaaaatggtggaaagattaatcgtaaagattttgcaagtcttttcaattttcaaaaaatcatggctgcaaggaccttagacgatactagtacggacagaaataaaattttaagtaaaaatattgttgatattgctagtgaagatgaaaattgggaaaaaacgattgaaagtttgcctgatacaatattggaggctattgaaaataaaaatatcgaacaaattataaaagacacttctattgattctcttaaagaaatgatgtcttcaattttgatgacgaacggtggtcagacaaatgaaatcattattaatatggatattactgaggattctctcaagtcattacttaaaaacatcacatgtgcccaatatatgctagatgaccactatttaaatgaatcgtcgcaaggattaggatatagtaacctagtctatatgcatttgcaactagaaaaatttaataagacaattgatccattgttggttaatctttttgtaatagaagaaccagaatcacatatgcatccacaaatgcaatatgttttttcacaatatttacaaacttattttgattctaggccaaaattgcaggggttcatcacaacacactcgcacgaagtcgttagaggtgctaagttatcacaattaagaatatttagaaaagttaatagcttcaagtgttcgttatatgatttaagaagttttcataataatttagaagataaacctgaattgttggatttttacagttatttttatgcaattagttttcccgatattatttttgccgataaagttattttgtatgaaggtgatacagagcggatgcttattaatagtcttttgaaacttgatcaaacgccatttcccaaactaaaaagtcaatacatttcatttgttcaagtcggaggggcgtatgcagttaactatgtgcctattttgaaatatttggatataaagtctctaataataacagatatagattatggaaaagaatgtaatactaaagatgaaatagaagtttccgaatctacaaacgattccataaataaattattaaacagtaaagtagaaaccgaaagcacaaaaaatattaaagaaatttactcctatagagaatctaatgaaccgtttgttttaataaaagataatatatgcctaactttccaaggtgataaggatggctatacaagaacactagaagaagcaatgctatgtaaattgtatagtatcaagtcgttcgatatgaagacaaaagattggtggaaaaaaaagagaaagagcgacaatttaaaatattcgatacccaacaacacatctattggggtaaggaaaattattaatagtactgcaaaaaataaaacagattttatgtattcagttgtactgaataataagttaatggatacattaccttactatattgaggagggattgaagtggttagaaaaatag

SEQ ID NO: 79653 - DNA, 1953 bp, Lactococcus lactis subsp. lactis
gtggttagaaaaatagaaaattttttcatagttaatgctcccgcaggcagtggtaaaacgaccactattcgagaaatgattaacaagattatttcaattaattccaaagacaatgtattatgtataacgtataccaatagagctgcagaagaactttctaagagtttttcttctcctaatatttctatttcaacaattcactcatttttaaataattttatgaaacaatattttggtagcccagaaattattgacttatattttgacacttaccaagatagtttacaacaaagaattgataataaagaggctaaagaaaatcagaatgaaagcaatcaaaagtacatcgaaaaatacggagacctgagtatcgatgttcttcgaaaaaatattaaaaatatatattacaatgaaaatagctttaactccttatattatggcggtttaagccatgatgacctgatttcattttcaagtaaaatatttttaaagtataaaatgatacaaaatagattatcatacaagttccaatacattttcattgatgaatatcaggatacaaccgcagatgttctaaatattttttatgaaagcttaagagaaaaaagaacgatcttatatctattcggtgataagatgcagcaaatttataaaaattatgatggtagctttgaattacagtttttaaaatttgattctagtaaagctttaactactaactaccgttcggttccccaaataataactctactaaataatatatacaatgattccagttttgttcaaaatgtttctgagcacatggtcaagatttctcctaattttgatcctagagtaattatcagtagtgatgttgatgaaaggctatctcaaattttggataagtatccgaattcattaactttattcttatctaatcaatcaagatttcagaaaataggttgcccttccttatacaggacctttagtaagatggatctctattcttttagtaaaaagtatggtgtagtagatgtattaacagataatactaaagataatcctgattctttgatgagacttatttttttagtagcttatattaataataactacacgtccaataactatggtgtaattgttcaaaaaattaaggatgaacagtcaatgattggattaaaaaactggaaactgtcaagccatcaagataaagttactttaaatgcaattctagaggaattgtcattgataatatcttctcctaaaaaatcaatcaaagatgttttgatttttctaaaaggaaaaattgcacaaaccacagttacatttagcgagattatggaagatgaaagttattctgatgcattggatgtgcctattgaagaagtaataaaactttataactatttggagtccccaaaagtatccacacaacatggcgtaaaaggagaaagccacgatgaagttatttttgttgccgatgatagttataatccacatgtgagtatgtataatttttttgatatttggtcagataccgaactctcactctcaacattagaagaattttattatcaatattctgtagaactaaataaaattattgaagcagtaggaatgaaaattaacgacttaaagaaggaggggttcatcactcatgaagattacttaatagaggctgcctcaagtataatcacaagatttcagggagatgatttatttagtaacttgtgtctgcaagactatcaaaaatttatatcaaaaccaaatgtgactaatgcaaaaaaatgttttagagagtcacaaatatatgggattttgagcgcttataaacttttttatgtggggtgctcgagagcacgtaaagacataactgtcttattagatagcaataaaataaagggcaatatcgacctacaaatacaaaaatttgaacaacttggatttaaagttcataatgaatctttgatttaa

SEQ ID NO: 79654 - DNA, 1719 bp, Lactococcus lactis subsp. lactis; identical to SEQ ID NO: 75324

SEQ ID NO: 79655 - DNA, 1506 bp, Lactococcus lactis subsp. lactis; identical to SEQ ID NO: 79651

SEQ ID NO: 79656 - DNA, 2133 bp, Staphylococcus epidermidis; identical to SEQ ID NO: 72706

SEQ ID NO: 79657 - DNA, 1773 bp, Staphylococcus epidermidis; identical to SEQ ID NO: 72707

SEQ ID NO: 79658 - DNA, 2097 bp, Leisingera aquaemixtae
atgcgcttacacagtatttctgtaagaaattttcgccgactaaagagcattgatctagattttgaagaaaaggagaccgtgtttgttggcccaaacaacagcgggaaaacttcggcaaccgccgtcatgcgaagtttcctaggaaatcgggattttaaggtacacgatttctcggtcagcagcatttcagcaattgatgcttacgtgaatggcgaagagcaaagtctgccgtcgattgatctcgatttgtggttcaaagttgatccagacgctgtttcattcgggcgcgtttttgctcttgcaacaactctatcgactgatttttctgaaatcggaattcgatgcgccttaacagttgacgacgtcaacgagctctggaggcaatacgatcttgcttttccagtagatcagaacggtgaacgcaagcgctcgctaagccattttctggatttagaagggaatttgaagaagcactttagtgtgcagttttcgtcgttggagcgcacggacaacgatctcctgccaacgccactggacccgaaggatgggaagaaaattctcagttcactggtgcgtgtcgattttgtggatgcacagcgaaacattgatgacgagaatgctgcaaggagcaacaggctctccgaagcgtttgcgacctactacagacgcaatcttgagaaagcggaactggccgaggaagcgatagctatcatcgaacagaacaacgaaaacctgaacagccattacagtcaacgctttgcacccttgatgacgatgattggtgggcttgggcttccttccgacaatgatcgcgcgatgaaagttgtttcaacgctgagttcggaagacgcattacgcgggaacacagagctcttctacgtagacgccaacacgagccatgagcttcccgaagcctataacgggttggggttcaagaacctcgttttcatggcaattcaaattgatcatttctacagacaatggcttgcaaccgaggaagaccgccccctatgtcaggtgatttttgtcgaagaacctgaagttcacctccacgctcaagttcagcagacgtttattcggcaaatgtgggacgtattgactgaaggcaggccggacggcgaaagcaccccacagctcgctgtcactacacactcttcacacattctggatacggttgatttttccaaaattcggtacttccgccgcaagtccatcaatgatgttcaaaacggtgaatcattccatggaaccacagtgcacagcctcgctcagtttcaaccggagccaatcgatttggatggcgaagttatctcaccggaagcggctctttccttcttgaagaagtatctacgccttacccattgcgaccttttcttttcagatgcggccattcttgttgaggggtcagttgagaaactcctgttgcctcgcatgatcgattttgcagccaatagcctgaacaaaaaatatttgaccgttctcgaagtaggtggcgcgtacggaatgcgttttgccggattgctggaattcctggagattccctaccttatcatcacagatatcgattctgttgaccccgcaaatagtcgcaaaaactgcattgcaacagcagacaatgcggtgtcctcgaatgcgacgcttggttatttcttcgacgatagcagcgtaaaagcactcgccgccaaaacgaaagctgatcgtgagcaagccgacggaatgcgcttcatcagctatcaaacgcccgtctcgatagatgtggaaggacaagcgcaaattttccacggaaggacacttgaagagactttcgtctatgagaaccttgtcctatttcgaaacgatgcattgagcattggcattgatctacccgacgaccttgccgccctgcatcaagatgtctggaaacgtatcaaaagctccacattcaaaaaaaccgaatttgcgatgaatgtgctggcttacgagccgcctcagcaacaggatgaagaagaaggtgccaacaatggcgtcgcgcagcttcattggaacgttccgcaatacatcttcgaaggtctggtctggctggatggacaactctcccagaacgcagaggaggcgtga

SEQ ID NO: 79659 - DNA, 1842 bp, Leisingera aquaemixtae
atggaagccgttctgaagccaactgaggcagacaaaagaattatcaagtgcatctctgaagaaaaatcattctcggtaattgctggcgcagggtccggaaaaaccacatcgcttgtcgaagcactcaaaagcattcgtgacgaacatggaaaagaactccgaaaaaacgggcaacgcgtcgtgtgcatcacctatacgaaccgtgctgtcgatgtgatttcttccaaactcggatttgatgatctttttctggtgaccacccttcatgggtttttgtggagcgagatttttcgatttcaaaatgcaatgcgggaagcactttgcgaggatgtaatcccgaggcacatcgcaaaagcgcaaaaggatgataacggcggaacctcccaaagagcgagaaacgcacgggaaaagattcaaaggctgtcgcaagagttggaagcgctcaaagaagagcccccggtcagatatgaggaaacgacaataagtgactacgccaagtgcatcctgaaccatgacgacgtcatcgatgttgcttccttcctgatctccaacaggccgatcctgcgaaaaggtcttgggttcaaatacccatttttctttgtcgatgaagcgcaggacacgttccctcaagtaatggccgcattgaacgcaatatgcgcaaaagaaggcctcccgataattggatactttggcgacccgatgcagcaaatctacgacaaacgagcgggaggtttctcgggaccggagggtgctgaggtcatacccaaggaagagaactttcggtgttcgacgtcggtaatcgatcttctcaacaacttcagatcggacttgcggcaagtaccaggcggtaagaacacagacatcgaaggaagcgttgaaatcacagttgttcaggcacctgatccttcaggaccaagaaacacatatactgctgaacagcttgatgatgttacttcgaagtactcaaacgccgttgtgcaatgggggtgggaaaacctgccgtccgtgaagaacctgtttttagccaggcgtatgattgcgcgaagattgggttttacaaaaatccactctctgttcaccggaacttattcatcctcgcgttcacaatcagactacgaagatggcacccactatcttttcaagcctttcgtggatggtgtttttgaactcgttgaggcctcgcgaacgggcgatgcgaagaggatcgtagaaacgctgcgtcggattagccccgccttttccgataatggaaagaacaagagcaaatcgctgaaggcgatgctcgatcacgctgtgcagcacaccgaaaaactcagtgagctgtgggacactcggactgtgaaggaggttcttgaatactgccgcgacaatgatctgtgtacaatatccgaacggcttgcgtatcaaatggaccgtaatcctcgggaagaatttgatcgggataacgaggatcatcaacgcgagaaaggcgactggctggctgatgagttttttgcgctggggaccgaagagctagaacgctacttcagttttcttgacgagagttctccgtttagtacgcagcacggcgcaaaaggagaagagtacgaaaacgtccttgttatgatcgatgatatcgaagcgaactggaacacatatagcttctcgaaattcctcacaccgaatgttgcaggtcaaccgaccgaccggcaacgagagctaacagaaaaactcgcctacgtttgcttctctcgggctgaagtgaatttgcgagttttgtttttctccaaagatgccaaggcggcaggagcagaattgattgacgcaggactgttcaggaaagatcaagtttcctacctatga

SEQ ID NO: 79660 - DNA, 2130 bp, Bacillus sp. KACC 18228
ttgtttatctcagatgtgacagtgcgaaactttcggaatttcagcaatgcaactttttcttttgcaagaggtgtgaactctttaattggtgaaaacggttctggaaaaagtaatatcttatatgctatgagacttcttcttgatggtaatctgccacaaagagcatcagtacttacagaagacgatttcaatagagatttaatagattggagaggtcactggattatcattcaccttacatttaaagatatttcaaaaaatgaattaggttcctttatggcccataatatatcatcagttgattcaaaagatgataaaggaacgtacactttctattttagaccaaactttaaaatcagaaattcattatatgagctttcaaaagatcctgaaaaaaatgaagataagtttgaagaactaaaaacaaaaataaccattgatgattatgaatccatatttacatttcgaggcgaagcaaattttgcagatgaaaaggtttatgagaacattatagggaatttcagcaaaattgaatttccagatcctaaaaatgatgataagcgactgattggagaaaccacgtcttttattacttcaatgcgcaaagagatggtatgtacatatattaaagctttgcgaaatgtagtgaacgatttgaaaggccgaaaaagcccccttctaactcttttacgcggcgaagcgaaagagttagaactcagtgaaataaatgagatgaaaacaaagatacaagaattaaataatttaatcggtacaatggatgagattacagatttaagcacaagagttagtaaaactcttgaaaatacagtgggttttacatatgcaccatcagtggcaataaaatcagaattccctgaagatataaataagatcatgcaatctttaactctttggattggggatggatttaataataaatttgatggaaggatagaagacttaagccttggtggtgctaatttaatctatatgactttaaagttattagaatatgaacttaagcaacccagagaagagaaaatcgctcattttttacttattgaagaacctgaagcgcatgtgcataatcatattcaaaaaactttatttgataattatcattttgaaaatacacaggttttcgtcacaacacattctactcaaatatcatctgtcagcagaataagctctatgaacattcttttaaaaaatgatttaaaaaccctagtttgtcagccaagtaagggcttattaaaagatgaatgtaaaaaaattgagagatacttagatgccaccagaagtaatctactctttgctaaaggtgtgattcttgtagaaggggatgctgagttgattttgatacctacaatgtttcaaaaagtatttggcttaagtttagatgaaattggtatcagtattattaacatgagtagtgcttttttcaaacatatagccaacttatttcatgatgacagaattcaccgtaaatgtgcaattatcacagatttagaccgttcaataaaaaagcttcctaatgatcctaaaatggatacacctcttcaaaagaagtatcgttcttcacaaaaaaagggatttcaaagaagggaatttttaaacgaattttgttcgaataactgttggttaaagccattttatgctgagcatacttttgaaatagatacgttcaaagataatctaaatttgatcattgaaacattaacagaggtttatagtcagaaaatgaaaattgcagaaaaagaaaataaattgaaatcgagtaacttagaggaggtttatgaaacaattttacaagttgcagagaaagaagggaaaggttggtattcattgatgttatcggaaaaagtagaattcgatttctattttccacaatatattcttgctgccatttcatttgcttcttctcatcttgatgaaagacacttacaaaaaatgatgtattatcgtttaagtgaagggaaaaagttctctcaacaagaattactagacctagataaaaaatttcaatctgaaaaggaacggctctctaaactatacgatatatattccactcatttttcagatccaaacgactcttttaatcgtttgaagggtttgttagatgatgaatga

SEQ ID NO: 79661 - DNA, 1758 bp, Bacillus sp. KACC 18228
atgaatgatatccttaaaggtctaaataatgaacaaaaaaaagcagtacttgcaacagataatgctctggtaattgcttgcccaggaagtgggaaaactagggttttgaccagaaaaattgcttatgaactcaatcaaataacatcctctaaacaaatgattgtagcatttactttcacaactaatgcggctgaagagatatactcccgagttgaagaaatggatttgtctactgaaaatctttggatcggtactttccattctttttgttctcaatggattattaaaccttatggaatgtaccataatgaattaaacttgggtttctcttatgctacagattactatcaaaataaagttctaaaagaaatcaaagcagaaagtggattgaagttttttgataacgtgaatacaaaatttaatcgtgcaggagaatacacaaataaaattcataaatttaacgaagtagccaagttatatcatcaaagattaaaagaagaaaaattaattgactataaccaaatcatctacttttcttatcaattaataaagacacaccctaagatttcaattaatttatccaatttgtttaagtatatccttgtagatgaataccaagatactcaggatttacaatacggaataattggtgagattattaaaaattcacatggaaaaagcaagctctttatggtcggtgatcctgaacaaaatatatactccagcataggaggaatagcaaaaactaaagatgaaattcaaaaagatcttggtgataacaaattagtggaagtaaaactcaatggaaattatcgatctacacagagaatagtggacttttgcaaatcatttcagttagaacaaagagaagttgtctcattagcagtattaaaaaattcacgtggaataataacttttgatgataagatacattctaatgaggttacagatgaaattgctaatcttgtaaggtcttatattactaagggacatgcccctaacgaaatttgtatcgcagcacctcagtggtttatgttaaatcaaggtgtaagaaaattaaaacaagctttacctgatatagcttttgctgcacctgatttaacaccacttcctaaacaaacggataatttttattcgaagctctctaggatcttatgtacaccatcgtcacctaaaatgtacctgcatagactaagatggtcaaaagaaattgttgaacaattaaatgaaacttgtaactcttcttggccaaataacaaatcgtcttgcattaaacttttaaacttaatgaagagatgtaagtcacaccagtcaaacataagagaatacttagagcaatcttttgaaatgatcatggtggaattaaatctagatttctatacatatcctgatttagcattaatgtatcaactcttttttgaacaattagatgagaaactgaaaatcccagaatatccacaagatataaattcaatattgaatttgcatgagccaaaaacaggaatcgcgattaaatcttttcatggtgtaaaaggtgaggagtatgagacagtaatagcatttggtttacttgaaggatatattccacattggaatgagataagtgatagaaccgtatcaaaaagacttctatacgttttatgctcaagagcaaaaaaaaatttacaccttttttcagaaacaaacagatgtactggtaagggttatccttataaaacgaatagggaattaaaaaatgtagaatttgaatatgattaa

SEQ ID NO: 79662 - DNA, 1926 bp, Klebsiella pneumoniae
atgaagcttgaaaccattcgcctatcgggtttccagtcctttggacaggaaccgaccgagttaaatctggaagagattacttatctcattggccctaacggatcgggtaagactgcagcacttcaggcactgtgtcggctttttgcttttaatcctgctttgcggcgtattctgcgttcggattttcacgttcctttcaacgaagagaatgcgcctggtgagcgcctgttatggatagaagctgacttttcctttccggaattagctgaagatgtagataacagtaccgttgctccccattttgggcatatgcggcttgatgaagttgatggtattccacgtgtgcgcttccggcttacggcgaccatgggaccggatggggacattgaagaaaatctggtatatgtcctggatgttgatgcagacggtaatcctcaaaacacgccacaagttacacgagcagatcgtaaccatattcaggttcactatttgcctgccagacgcgatccggcggaccatataacttatggagcgaacgcattgcttggacgtttgttccgggcagtgcgctgggacaatgaacgcagtgcgattagggcgctaacagatcagattagcgatagcctggctactaatccttccgttaatgcatttagtgagagcctgaaagcgatctgggcttccctgcacaaaggttcatttttcaccgatcctaaaatcacgtttgcagcttccgagattgaagcattgctacggcatatgtcagtctcatttgctcctgaccatgagggttcgctggtggacttctctcggttgagcgatggccaaaagtcgatgctctacctttcccttgtattgtcgtctcaggcgataggtagcgcagtacttgccgggcgagatacttcttttgatcctgataaattgcgtccgccggtctttactttggttgctgttgaggagcctgagaatagcctttctcctcattacttaggacgcattgtcagcaccttgaataacatggcgaaaaatgcggatgcgcaagcgcttattgccacccacgcgccatcaatgctacggcgtgttgcccctgagtttattcgttacctacggcttactgaggagaggaatactcggattacccatatcaagttgccagctaaaactgatgatgctcataagtttgtacgagaggctgttcaggcatttccggaagtctatttctcgcgcctggttgtgctgggtgagggggatagcgaagagatcgtgttgccacgcctgctacaggctaaaggtgcgcccgttgacgagtcggccataacgatagccccattgggtggaaggcatgttaatcacttctggcgtttactttcagcgctgcaaattccttatttaacactgcttgatcttgatatagctcgccatgcagcaggttgggggcgcatcaaatatgttaatgatcaattcgcaatatttgagccagacagagttcttcctgtcaactgtccgattccaagatgggatgatagtggcacacctgtacgaacccatcatttttttaataatggcacccaggatacttttgctgaattggagaataggtcagtatttttttccttcccaatggatttggatttctccatgctcctggcatatcccgaagcctatagtgttattagggaggaaccagacgagtcaacaatcaaagctgtcctcggaaaaagccaccatgattcatctcaatacagccaagacgaattgaggttatttagtacttatcaccgtcgctttaaacttggcagcaaaccagcagcacacattgaagcgttagctcagctaacagatgcgcaattacttggaaatatgcctgcgtcattaagcaggttagccgatactgttattgcaagactcgcggagctgcccgaatga

SEQ ID NO: 79663 - DNA, 1671 bp, Klebsiella pneumoniae
atgattgctgttgaagcctggctacccgctgatggtttgacgcttgaacccaatgcattacgtgcggtaaaggagtgtgagcattgtcttgcgctcactgcagggcctggagcaggtaaaacagaaatgcttgcccaacgagctgactttcttttgcgtactggtacatgccgttatccgaagcgaattctggcgatctccttcaaagttgacgccagtagaaacctgaaagaacgtatccagcggcgatgtggccctgttttggcttcgcgtttcgacagctacactttccatgcttttgccaaacgtattatcgatcgcttcagaccagtactggtaggtcaagatgcgttagatgcggactacaccatcgttgaccgtaaatcaggggcttcccgcacccagatagaatttggcgatctggtcccactagcgattaaaatattgcaatgttccagaatggctcagaacgctattcggcagacctatagcgatgttttcctagatgaattccaggattgtacgaatttacagtacgacctggtcaagcttgcgttccagggaactcgtcttcgtctcaccgcagtgggtgacaccaagcaaaaaattatgggttgggcaggcgcattggatggtatttttggaacctttgttagcgactttaatgctgagccgcttaacatgtatcgcaactttcgttcaaagccaagacttttgcaggtacagaacgatatcattcgtcaactcgatccagcatctgttatgccagatgagctgttagaaggtgacgaaggcgaagtttacacccaccattttactgacagtcgggaagaagcggtttgtttagcgaatgttatacatgattggatcgaaactgaacgattaccgccagctgaaatcgcgattcttgtctccaagcagttggatctctacgctgaccatcttatggctgagctggaaattcgcggtattccataccgtaacgaacagcaaatgcaggatattacggttgaaccggctgcacgcttaattgtcgattatttatcctgtctttacggccagcgggaacctaaagcctggattcggttgatgaaccagctaattccctttgccgatgaagaaatccagtccagcgcgcgaaaagagcttgatcgtttaattaaaaatcagcgcaaagaagcagatattgcggagctgattgactcacgcttctctgattggcgggaatgtgttagcgccttcttagcacatatcagttccgaaacgttgatggcgctatcgcctgactacgaatcacaaacgcgcctacgagaagtgattcgtgatactaaagtacggattgaagagctgctccaaatagaaccagatttgcctaaggctctggagcggtttgtggatgatcaggccgttcgcattctgaccatccataaaagcaaaggactggaatttgactctgtcattatcatggcagttgaaaatgagactttctttggtaaccaggatgaaaatcgctgtgcgttttttgttggcgtttcgcgagcaaagaggcgattggttttgacgcatgctgatcggcgagagcggcctgctaactataccaaacgctgggatgttgttcgttctgttcaatttgagtaccttggctatatcacgccatttgtaaggcaataa

SEQ ID NO: 79664 - DNA, 1785 bp, Klebsiella pneumoniae; identical to SEQ ID NO: 73688

SEQ ID NO: 79665 - DNA, 1818 bp, Klebsiella pneumoniae; identical to SEQ ID NO: 73689

SEQ ID NO: 79666 - DNA, 1980 bp, Klebsiella pneumoniae
atgaaaattactgaaatggagatcaaaggctttaagagctttgataatgtagggcaaactataaatataaattcattcaccagcttaattggagggaatggaacaggtaaaacggcagttctactcgcattaacgagaatgtttggtgttaaaagctctgatagaattgttcaagttgatgatttttatgtccctcctggagatgaaatcgaagatcaaaatgaacgagaaatatctattcgtgtaagattcgaattcgcaggtcttaaagatggtgaggacgattcagttgcagatttctttaagcatttagtttcaagtgaagcagaagaaatcccatactgtatagcaaaattaaaagcaaaatggacaaagactaaccttgctgaaggggatatagaaagcgatcttgtatgggaaataggggattatgaaaaaaatataacagcatatgaaagatcaaaaattcatgttcattatgttcctgcttaccgagatcctgcccaacaactgaagcaaacagccggaactatcatgcaccgtttgataaatgcagtcgaatggtctgaacatatgggggcaactgttgatgaggttgctgtatcaatcggaaaccagttccaagaagaagtgggggtaaagacaataaccacttctttaggcaggaattggaaatcccttttcactggtggttacttcgaagagcttcaaatcaagccagtagtgaatggaattgaagatgttttaaaacatatcgatactgtctttttacccagcccagatactcaacctttaccaactgaaagattgagtgatggtatgaaatcattattttatttatctttagttaaatctgcatttgatattgaagatgagataatcaattcggaaggaaaagaattatcaatatcagtagaggcattagatcctccaaacttaacgataatattaattgaggagccagaaaatcatctctcactacaatatttgggacgaatagttaagctatgtgaagagatatctgagaatgatcgagcacaggtttttttaacaacacatgcaccatccttacttaatagggtagagcctgaaaatataaggtatttccgtcttaatgataataaaaatacaattgtcaaggaaatattattaccaagcgaagatgaagatgatgcagacagtgtcgataccttcacatatgttaaggaagctgtaaaagcatatccggaaatttattttgcaaaagttgtcattcttggtgaaggtgatagcgaagagattgttatacctaaaatagcacaagtaaatggaattgaacttgacacttcattgataacatttgctccattaggtggccgatatgttaatcatttctggaaacttctaaatgagctttcaattcctcatgtaactcttcttgattatgattttagaagaggcggaggtggatggggaagaataaaatacgttatcaaacaattaatcgcaattggatatgataaagataaaattcttaaaacctctaaaggaatgttatccgatgctgaactccaagaaatgcatgaatgggacgaaaatgaagcttttgaaaaatcttggataaaatttttcgaaagctacaatgtttatttttcctatccttatgatttggactggataatgttaaatgcttttccggcaagctatcattcttttatccctgataatggcggtccaaaaatactcaaaaaaacagatgctcgatatattgataaaaccaaaaatgctatagcctcggttttaaagaaagatgcagaagatattgatgtcaaatcttttgaagaccatgaccaatattattggtatcgatatttattccttggtagaggcaaacctttgtctcataactatgttctaaataagctcgataatgattcattaaaaaataatgcacctcttgtattgaaagatctaataaaaaaagtgagaggattactttaa

SEQ ID NO: 79667 - DNA, 1848 bp, Klebsiella pneumoniae
atgctgactattgaagatgcagattgggtattaaaggatatccaagaagtcgaagacgaggctatgaaagtaatacggaatagtacagagcataatcttgttcttgcaggtcctggttcaggtaaaactgaattattggctcagaaagcatgttttttaatagaaacgggaaaatgtggtaacaaaaaaatcatcgcactatctttcaaaaaagatgcggcaaaaaacctacaagatcgagtcaactcacggcttgatataaaaaataggaataagtttgaatccacaacatttgatgctttctgtaaaagtattgtagatagatttaaaggtactcttccgaagttttatcgtccttcagacgattatgaaattatttctcttaataaaaaagaatttatagcagaaataaaaagagaggcattaggttttgaggggttgacatcatttgaattgaataaaataaaacattcaaattttgaagaaaaatacattgtagtcccttatacaaaagaagcacggcatacagttaatggaagaataagatattttgtatgggctcatttattgaaaggtaagtcaagaatttcattcaaaatgataaattatcttgctaatagaattataaagaaaaatagttttctatcaaacgccattaattcaacatataaatatgccttcattgatgagtttcaagacacaacatctaagcaatatgaggtatttaaaagtattttctttgatcgagctataaaaatcacagtggttggtgatacaaaacaaagaataatggggtgggcaggagcattacccaatgcttttgatctttttagaaaagactttgccgttgaaaaacataatgaattagtaagaaatagaaggtcattaaaaaatttgataagttatcaaagactaatggaggccttcatgaatgaagctgaagaaaaagcagagttaattttaaataaggatgagggtttagcaaggttaatgcagtttgatgaagttgaccaagaggcatgttacatttctttacttattaaaaaatggattgatgaaggcatcggcccaagggatatatgtattttatcaaaaagcgtggccgaacagtactctcaaaaaataatctcaaagttagatgattcaggtgtgaaatgccgtattgaaaatgattatcaagaattattgaacgaagcaatagtacaattggttctacagcttctaatgtttgtttgtaatagaagatctattgagtgctggggagctacaatggaacttttatgcaacattagaggagtaagtaaaagaggtgatgttactcgtttagaaaaagagttaagtaatttcatcaaggctaataaggaagttaaaagtgatgttgttgattatttaaagggcttactaacaatatttggtatccctgagttaaaatcttattttccgcaatatatgaatggtaatggcttagagcataatattaatactctatctaaatatctcgaagcattagatataaaaaataacatgtcaaatgctatagatatgttgagtggaaataaaactgtaccatttatgactatccataaaagtaaaggtttagaatttaaaaaggtcgttatagtaggacttgaaccggatgcttactttggtgatgaagaaggacagatagaaaatcaaaaaacagtttttgtagggttttcaagagctattgatgaagtgttcatgactcgttgtaaactaaggagggataattttggtaatgtctccagacaagactttaatagaataccgctgataaccgatatgctaacttattgtggtatcgaggctgagagctatccaggttga

SEQ ID NO: 79668 - DNA, 2085 bp, Klebsiella pneumoniae; identical to SEQ ID NO: 73834

SEQ ID NO: 79669 - DNA, 1734 bp, Klebsiella pneumoniae; identical to SEQ ID NO: 73835

SEQ ID NO: 79670 - DNA, 1905 bp, Providencia stuartii
atgaagcttgaagcgattcgtttatctggttttcagtcatttggacatgaatcaaccgaactgagccttgaagatataacatatatcattggtcctaatggttcaggtaaaactgcagttctccaggcgttgtgtcgactctttgcattcgatcctgcattaaggcggatccagcgttcagatttccacgtcccctttgatgaggaggaggttccacttgagcgccagctgtggatagaggctgattttctgtttcccgaactggaagaggacgaggacaacagtaccgtagctccccattttagtcatatgcgactggacgagccggatggggttccgcgtgtgcgttttcgccttaatgcgactatgggcctggatggcgatattgaagacactctggtatatgtcctggaagttgatggagatgacttgcctctgaatgttgctcaggttccacgcgctgaacgtaatcatatccaagtacactatctgcctgccagacgcgatcccgccgaccatattacttacggtgcgaatgcattactcgggcgtttacttcgcgctgttcgttgggacgctgagcgcgaaacgattaaagggctgacagatcaaataagcgacagccttgcggcaaacccttcggtgaatgctttcagtgagagtttaaaggcaacatgggcaacgctgcataaaggtaaattttttgctgatcctaaaattacttttgtcgcatcagaaattgaatcgctgttaaggcatctgtctgtttcatttacccctggtcacgatggctcatttgtcgatttttcaaggctgagcgatggtcaaaagtccatgctttacctttctcttgtcttatcgtctcaggctattggtagggctgttcttgcagaagaagatgtatcgtttgatcccgataaattacgtccaccagtcttcactctggtagcccttgaggagccagaaaacagcctttcaccacattacttgggccgcattgttagctccctgaatgtcatgacaaaaaacctagatgcacaagctctcattgcgacgcatgcgcccacaatgctgcgccgagtgggtcctgaactaatacgttatcttcgtctgaatgagtcacgagagacgtgtgtcacttgtatcaaattgcctgatgaaactgatgaagcacataagtttgtgcgagaagccgtccaggcatttccggaagtctatttttcacggctggtagtgcttggcgaaggtgatagcgaagaaattgtgttgccacgcttgcttcaggccaagggggtaccagttgatgagtctgccatcacgatagctccattagggggacggcatgttaaccatttctggcgtctgcttgcagcattaaagattccctattttacactgcttgatcttgatattgcccgctatgcagcagggtggggaagaattaagtacgtaaacgatcagtttgcaatacatcaaccgcgtaaaaaactccctaaagattacggaattccaaaatggaatgatggagaggaaaaaattcgggacttcgaaaattatctcgatatgcttgaagagcgcggcgtatttttctcctacccgatggatttagactttgcaatgttacttgcgtacccagaagcctataacgttgaggaagagaagcccgacaatgcaactataaaagctgttcttggaaagagtcattacgattcatctcagtacagggatgatgaattagtgctttttaatacctatcaccaacgttttaagctcggcagtaaacccgcagctcacattgaggcgttaactcacctaaatgatgatgagctgcttgatagcatgccggattcattaaacaggctggctgatgccgttattgccaaactcacggaactgccagaatga

SEQ ID NO: 79671 - DNA, 1665 bp, Providencia stuartii
atgattactgtggaagaatggcagcccgcagatggattgacgctggaacctaatgctaaacgtgcagcgaaagcgcgtaaacgttgtctggcactaactgctggacctggtgcgggtaagacagaaatgctcgcacagcgtgctgacttccttttgcgaacaggaacgtgtcgataccccaaaaggattctggcgatctcatttaaggttgatgccagcagaaaccttacagagcgcgttgaacgcaggtgtggaagggagctcgcttctcgctttgacagttttacctttcacgcatttgccaagcgcatcatagatcgattcaggccggtactcacgggagaatatgccttagatgctggttacgctattgtggacaagaaaagcgaggcgtctcgtcacgaaattgcattcgtcgaactggtcccctatgcaattaagatattgcaaacatcaaaaatagcccgaaatgcaatccgtcaaacttatagtgacattttccttgatgaatttcaggactgcacaaatttacaatatgacttggtaaagctcgcttttcagggaaccaaaattcgactgactgctgtcggtgacacaaaacagaaaattatggcctgggcaggtgctctggacggcattttccagtccttcacaaaggactttaatgcggtaccgctcaacatgtatcgcaatttccgctcaaaaccaacattgctgcgtgttcagaacgaaattattcgtaggttagatcctgactccgtaatgcctgatgaccaactggaaggagaggaaggggaggtttttgccttgaaatttgaagatagccaaactgaagctatctatctggctgacctaattgatggatggataaataaagagcagctacctccagctgaaattgcagtcctggtttcaaaacaaccacatttatatgcagatcacctcttcaaagagttggagcagcgcggaattccctaccgcaatgagcagcaaatgcaggacatcacggttgagcccgtggctcgtttaatcgttgattacttgtcctgtctttatggacagcgggaacctaaagcctggattcgcctgatgaaccagctggttccctttgctgatgaagaaattcagaccagcgtgcgaaaaggtcttgatcaacttataaggaagcatcgtaaggaagtgtctggtgcgaaaaaaacagacaccccctttgctgaatggtggaaatttggtcgagctctcttaaagcacataggtttgcagacgcttgttgcattatctcctgattatgagtcccatgaacgtctgaaacaggttattcacgataccagggcacgtatcaaatatttactggaaatcgaatctgatttacccctcgcattaacacgatttgctgatgatcaggctgtacgaattttaaccattcacaaaagcaaaggattagagtttgattcggttattatcatggcagtagaaaatgaggctttctttggtaaagaagaagaaaatcgctgcgcgttttttgtcggtgtttcgcgagcaaagagacgccttattttaactcatactaacaagcgtgatgaacctgcaaatgctatgtactggaaattttttcggactgctcaattagagtatttggattatattcttccatttgtgaggtaa

SEQ ID NO: 79672 - DNA, 1785 bp, Klebsiella pneumoniae; identical to SEQ ID NO: 73160

SEQ ID NO: 79673 - DNA, 1818 bp, Klebsiella pneumoniae; identical to SEQ ID NO: 73161

SEQ ID NO: 79674 - DNA, 975 bp, Clostridium butyricum
atgcatcctcaaatgcaagaattatttattaaaaatataaataatgcgataaatacacttttaaaagataaaaataaaaatgtaaatagtcaattaataatgacaacacattcttctcatatattaaatagtaagatacatagtggtaatacgtttaataatattaattgtattaatacccaaaataattgtgctagggttgtagcattaaatgatgaaaaaataacgccagaaggtgatgattctgaagatgatttaaaatttattaagaatcatataaaatataaagtctctgaattattttttgcggatgcaattattttagttgaaggtgcaacggaagatacaatattaccatactatattgataaaaatgaaaaattaaataaatattatgtatctatttttaatattaatggtgctcatggactggtttacagaaaattgctgaagttgttgaaagtaccaacattaataattactgatttggatataaagagagatgatgatgaaaaagaaaagtataaacagattaataatctaaaagatagagttactacaaatcaaactattattaaatataataatggtagtgataagctagatcatataccagaatatataaaagatgaaaatataattattacatatcaaggaagtataaaaagaagttttgcaacaagttttgaagaagcatttatattaacaaattttgataatgatatattaaataaagttttaaataaaattaaacctaatatttataaagaaatagtaggaaataaaaatactaaaaataatattaaagaatcatataaatggcaaaggaaactatcaaaaagtaaaagtgaatttgctaatgaactactatataacttaattattgaagatgataaaaagaagattcctttattgcctaaatatatagaaaacggtataaaacaattagttaatcaattaaaggagaagaattaa

SEQ ID NO: 79675 - DNA, 2061 bp, Clostridium butyricum; identical to SEQ ID NO: 79645

SEQ ID NO: 79676 - DNA, 1584 bp, Listeria monocytogenes; identical to SEQ ID NO: 73566

SEQ ID NO: 79677 - DNA, 2142 bp, Listeria monocytogenes; identical to SEQ ID NO: 74665

SEQ ID NO: 79678 - DNA, 2073 bp, Listeria monocytogenes; identical to SEQ ID NO: 72152

SEQ ID NO: 79679 - DNA, 1734 bp, Listeria monocytogenes; identical to SEQ ID NO: 72165

SEQ ID NO: 79680 - DNA, 2073 bp, Listeria monocytogenes; identical to SEQ ID NO: 72152

SEQ ID NO: 79681 - DNA, 1734 bp, Listeria monocytogenes; identical to SEQ ID NO: 72165

SEQ ID NO: 79682 - DNA, 2073 bp, Listeria monocytogenes; identical to SEQ ID NO: 72152

SEQ ID NO: 79683 - DNA, 1734 bp, Listeria monocytogenes; identical to SEQ ID NO: 72165

SEQ ID NO: 79684 - DNA, 2073 bp, Listeria monocytogenes; identical to SEQ ID NO: 72152

SEQ ID NO: 79685 - DNA, 1734 bp, Listeria monocytogenes; identical to SEQ ID NO: 72165

SEQ ID NO: 79686 - DNA, 1584 bp, Listeria monocytogenes; identical to SEQ ID NO: 73566

SEQ ID NO: 79687 - DNA, 2142 bp, Listeria monocytogenes; identical to SEQ ID NO: 74665

SEQ ID NO: 79688 - DNA, 1920 bp, Pseudomonas fluorescens ICMP 11288
atgaagctgcagagtattcggctatgtaattttcaatccttcggcaatgagcctacggtaatcacattcgaggatgtcacctaccttatcggccctaatggctctggaaagacagcagtcctgcaagcgctctgcaggttgtttgcctttgatccaagcctccgtcgaatcaagcgatccgacttccatgtgcctgctgatgaggatttggtacctgaggagcgcagtctgtggctggaagcggatttcgaattcccagagcttctagaggacgaggacaactctaccgtggccccgcacttcgctcatatgcgattggacacagccgaaggtatcccgcgcgctagatatcgattgagcgcaacgatggggattgatggggacattgaagagaacctagtttatgtcctcgatgttgataaagacgccaacccattgtcgaccgcagtagtaactcgagtgcatcgcaatacaattcaaatgcattacctccccgccagacgagaccctgccgaccacataacctatggcgctaatgccctgctcggacgcttgctacgagccgtaaattgggaagacgaccgagaacggatcaaaggactcactgacgaaatcagcgaatgcttgtcaggaaaccaatcagtaagtgcattcagtgaaagcctgaatttgatgtggaagcgacttcacaggggcacctttttcaccgaccccaagctcactttcgtcacatccgaaattgagtcgcttctcagacacatgtcagtgtcgttctcaccagggcacgacgagaatctagtcgacttctctcgcctcagcgatggacagaagtcgatgctctatctatcactggtgttgtcctctcacgccatcgggcgtgcagtcctaactggtaaggacgtttctttcgacgctgacaaactgaagccaccgtcatttacgctgatcgcagtggaggaacctgaaaacagcctctcacctcattacctagggcgcatcgttaacgccctcaatagctcaattgggggggcagactcccaggcaatcatcgccacgcatgctccatccatgctccgccgcgtggatcctgagaacatccgctatctacgccttgctgcgaaccgcgccaccaaagttacctgtattgccctacccgataaggaagatgaagctcataagtttgtccgagaggctgtacaggcctttccggaagtctatttttcccggctagtggtactgggtgagggagacagcgaagaaattgttcttccgagaattcttcaggcgaaaggtgcgcctgttgatgagtcggcggtgaccatcgcgccactgggtggtcgtcacgtcaaccatttttggaggttgctatccgcgctggagacgccctatgtaaccctacttgatctcgacgttgcacgacatcaaggtgggtggggacgtgtaaccaacgtcaataatcaacttgcaaaatttgctccagagaaaaagcttcccgcttggaatatagccaagtggaatgatgatctcccggttcgaacccaccattggtttgaagaaggaaaagtgagcgtatttgtcgagctggagaagcgcggagttttcttctcagatcccatggatttggacttctcaatgttgctcgcctacccaaatgcatatgatgtatcgctaagcgatccggatgagtcgactgttaaggccgtcctaggcaagagtcatcataagtccgaccaatacaatgcagcggaacagcaactttttggcacctaccactccaagttcaaactaggtagcaaaccggcagcacacatctctgcccttgcaaagctcactgatgaagacctgctaaaggctcttcctccttcgttagatcgtttggccaatgcaatcatcgcggcgctggaggacatcccagaatga

SEQ ID NO: 79689 - DNA, 1677 bp, Pseudomonas fluorescens ICMP 11288
atgatcagcgcggatgtatggaaagtcgccgatggcttgaccttggaaacaaacgcccttctcgctgtgagggagcttggaaagtcgctcgcgctcaccgcaggcccaggcgcaggcaaaacggaggttctggcgcagcgggcagactttttgctacgcaccggaaactgccgataccccaagcgaatactggcgatctccttcaaggtcgatgcgagcataaacctcaaggaacggattcgtcgcagatgcggacttgatctggctgcacgcttcgacagctacacctttcacggcttcgccaagcgcatcattgataggtttagacccgtgctcacgggcggggactctcttgagccaaactactccataggcgacgaaccaattcaaggcaaacaaattaagttcgcgcagctcatacctctcgcaacgaagatcttgagcaattcagtggttgcaagaaatgcaatttgtcagacctacgctgatgtattccttgatgagttccaagactgcactactgagcagtacgcactgctgaagcttgtcttcatgaataagccaattcgattgaccgccgtcggtgacaccaaacagaaaattatgggctgggcgggagcactggatggcatatttatagactacgcaaaggacttcgacgcccgaccactcaatctatatcgaaacttccgatctaagcctcggcttttgcggatgcagaacgagatcattcgaacacttgatcctgctgcggtgatggcagatgacctgatcattggagacgacggcgaactcctcgctcgaaactacgacaacagtcacagcgaagcagccgcgttggccaacatcatccagaagtggatagatgtagagaaaatacccctaccagaaatagcgattctttttcccaggcagatagacctctacggcacccccctcatggagcaactggcagccagaggaattccctttcgcaacgagcatgagtctcaagatctagttaatgagcccgccgctcgcctaattattgactacctatcatgcctgtatcgggagcgagaaccgaaggcgtggatcaatttgatggagcaactggtttcatttaatgacgaggacggtgaatctgagctccagagaaacttcgagcgcctctatcttgcccagcgcaaggaagtgaaaaaattggcccgatctgacgcgccttattcaggatggtgggagctaactatgaagttcctaaagaatatcggcctacccgtgctgaccaccctttcttctgactacgaagcaaaagccagattgaacgaggttatcaagaacacgagacagcaaattgagaaactgctcgagcaagaaccggatttgctcaaagcacttgatctgttctccaacgatcaagcagtccgttttctgacgattcataaaagtaaaggattggaattccactctgtaattatgatcggtgtagaaacacagacattttggggcaaagtccaagaggagcgttgcggcttctttgtgggtgtttcacgtgccaaggagcggttgatgatcacgacatgcgacttacgttatcgaccggcctcaaaccctccaaggtggaatgagcatcgcactcctcatgctgagttcgtcacatacgtaacgccatttctttccgcccagccaaatgcctga

SEQ ID NO: 79690 - DNA, 2139 bp, Pseudomonas syringae ICMP 11293
atgaaagtagtaaggatcgaagttaataattttcgcttgctgaagaagttttctcttgaccttgagagcaatctttctctggtgttgggtaaaaataatagcggaaagacttcgctgctctctgcattagagaagtttataaattcttctgaaaagcgtcaaatagtttttgacgatttcaacgtcgatttaaaagcagccttaattaaattggtgagtggggctgacccgataggtccagagaatacctatacccccttgggtataacgttgaaattatatattgagtacgatggtatcgataatttatcaccagtaagccagttaataatgagcttggatcctgatgataatcatatagtgcttgggtttgagtatctggttagctatccgcagttaacggcgatgcggaatgattacaatgatgtaaaagaaaaatatgacaacgattcgagtttgtttcttaaggaaaatcagcatatttactttgatcaagtcaggaagaaaagtttttcctatagtgatccggaagtgttcacagacttgactaaagaaaatattagtttggctgatgttatttcattcagatctatcggtgcgaagcggagtgttacgaataaagataatgataaaacactatcttctcagactgcaatcatatacaaaaagacatctgagaaccaagagcagcaagaagctgtcgagggctttaagaagcaactgcgttcgactgataaggagctgagcgaaatatatcaggatatgttttctggattgttggggaaagttgcaaagtttggcggatctagattgtccgagacgcatattaagattgcatccaccctgcagcatcgagaactgttggatggaaatacaactgtgatgtatacccacgataaccatgatcttccagagcactttaatgggcttggctatatgaatttaatcagcatgatttttgaaatagaaatgctgatgacttcttttcggagatctagtaaagaaaatcctgctgcgattaatttactttttattgaggagccggaagcgcatacacatcctcagatgcaatatacgtttataaagaatataaagtccctgttggaagaaagcaggatgagagaagatggcgtggagattcatcttcaaacgattatcagcactcactcatctcatatcgtggcagagtgtgacttcgacgatatcaagtatttgaggaagtcacctcttgctaacagtgtggacgcaaaaaatcttaaggcgctcaagtcggagtattcgtccgatgatgtgaatgacaatgcccaagctgaactccactacaaattccttaagcaatatcttacgttgaaccgcgccgagctattttttgctgataaagcaatacttattgagggtgatactgagaaaattcttctaccagcaatgatgagaaagtttgaccaagagactcctgatgctggcgctatacctctactttcacagaatatttcaattgtggaggtaggagcacatgcccaaatttttgaaaagtttatccattttattggtattaaagctttaattttgaccgatatagatagcgggattaaagaattgctttttgaaaaggatggagttactccccagctatacaaaaaaggcactcagaaaatagagactataaaatgtcgtcctgatgacccagcggcagaccatacagctaatggagcattaatattttatcacggcaaggtcagagaggatttgggctactttacctcccttaatattgaaggtaaggctttatctaaagtcggaggcgaatggaaggtcgatgtcgatggctgtatttttctagcatatcaaactaaagacgatggctatcatggaagaagcttcgaagatgcattcttttcgctaaacaaagcactacttggaactgactctgaaaaattcccatctctaacgcctaagtggttcaacaaatatataaatggcgagtgcgatgcatttgagtttgcagagaaggcagttggcaaaaagccttcgttagcgattgaaatcttgcttaatagtatacctgataaaaaatctgacttttccaattggaagactcctcactatatccaagagggcctgggatggttgcgcaaatga

SEQ ID NO: 79691 - DNA, 1926 bp, Pseudomonas syringae ICMP 11293
atggttgcgcaaatgaagaacttagaggaggttagtgacgaggcgaaaaagattcttgatactatctgtgagggtaagagttttttactgagtggcggtgctggaagtggtaaaacctactctttggtagaagttataacgaatctggttaccctcaagcctttggcacgcgtagcgtgtattacctacaccaacgccgcagtgcgggagattgagggcagagccagccatccaaatctgcacgtttctacgattcatgactttctctggggagtaataaaacattttcaagtagaactaaaggaggttttgttagcgctgattaatgatgacaaaatattaggttttaaagttttagatggcaacggcgaaccagaaaagttagatgctattgagggggatgttaggtataaagagtacgtaaaatttagggagggggtaatttcacacgatgaagttattgtacttgctaacgagatgtttaaaagatacgacaagctatgccgaatactgaaagattgttatccatatatcatggtggatgagtatcaagatactcaagcggaagttgtagatatacttcttacgcagttgactagagttggcgttccaaatgttattggtttttttggcgatgcaatgcaggcaatttatgatgaaggcattggtgatttagatgtttacaaaggggagggggctgggcaggttagagaaataaagaaagaagaaaatcgaagaaatccaaaaaatgtaatcgatttggcaaacaaacttaggaatgatggacttttccaagttccttctaaagatttaaatgctcctaatatgaccagtgatgggtgtataaaagatggtcacatacaatttctatattcatccaatgatgacgttaatattgtaaaagaatatttgggctgggagttctccgagtcatcaggcgctaaggaactcaatctcactcataaccttatcgctgccaaagcagggtttagtgagttgatgagaatttatgatggcgataagattttagagtatgtccgtcggatcaaaagttatattaagaaaaaggagcctgcttttaactccgagggaaaatcgttcggagaagtattggccgagttgaagtatcaaaagacaggtaaagccttaaaagaagttgatcccacagacggcatggccatatatattgcagaacaccaagctatatatgatcgagcgctagatttcccatatggtgagctggcttctttatatatcgacaaagaccagcttatagacgatcagaaatctgatcgtagtgagctggggcgtggcgggggtaatagagatgacctgataaaacatttatttaaaatacaaaaaaatgtccagctttacttggatggaaattttaatgagtttcttcgcgtaactgagcatgcggtcacatctaagagtgataaagttagactgaaggagaggattgtcaatttatctaaagtcgatgataaaacagtacagcaagttatcgatgaggcaaatgtaaacggccttgttagggttgacgatcgccttcaatcatttatcgagtcgaagcgttatatttataaccaagtggctgcgctcccattctctcaatttcagaaattatttgaatatcttgaaggattcacaccattctctactcagcataaaaccaaaggtcgagaatttcctgatgttctggttgttctgaataatgggcggtggaactcctataactttgattatttgtttactgatcgtatggataaagaaagtgtggtgaataggacgcgtaaaattctctacgtatgctgtacccgtgcaaaatcaaatttggctttattttatcactcgccatctgacgcagttgttgaaaaagcgaaggactggttcggccatgagaacgtaaaaaatctagattag

SEQ ID NO: 79692 - DNA, 2298 bp, Pseudomonas syringae pv. syringae PD2774
atgcaaattcagcatctggaaatcgcgaacttccgcaagctcctatccgtacgggtcgacctcgcagccgagaccacgctcctcgtcggagccaacaacagtggcaaatcatctgcgatgctggctttgcgcaagttcctactttcgaaagcatcgattttcagattgcaagatcttactctgagccatctcgccacaatcgatgccattggtgaagcttgggaggctgcagatgatagcttccccatcccagtcgcaaatgaatgggctgactggttgccaacgttagatatttggcttgaggcagctcagggcgaacttcatcacatccgagatctcataccgaacttcgcctggaaaggcggccatgtcggtatgcggttccggctggaaccggatgatatgccaacgctgttcgtcgattaccgcaaagagcgagcacgagtgaaggagcttcagcaggaaattcaaaaacaggcagcgctaggtacacagccaccatcgcttccgctctggccgcagagcttgcatgactacctaaatcgacggattggtaaaaccttcaagatccgatggtaccgacttgatccaggccagctacgagcaccaaatcctgcgactcgtaaagctaaccggcaaccgcttgcggccactgctacgccacttgaacgcaaccccctaacaaacctgattcgagtccacgagatcaatgctcaacgcggctttggtgacagcgctgacgaaggagtcctagagggaggacatggatcgggcaggaagctctcggaacaattgcgagcgtactacagcaggcatctcgatcctggcgatagcccagatatttcagatttagaggcactcagagcaattgaggcagctcaaactgcctttgacactcgcttgagcacgagcttcgcgcctgcgcttaaggaagttgccggcttgggctatccaaataactccgacccgtccattcgagtttccacccgcctcgcccctaccgacgggatgaaccacgaagcagcggtgctgtttgaattggattccgttggaggagcccctggagcaccgcctcttaggcttccagaaacgtccaacgggctcggataccagaacctcatctcaatgatattccgaatgatggcatttcgagatgaatggctgaagaagtacagaagtcctgaagagcaaagtgctactggtgttgagcctatacatttggttctgatagaagagccagaggctcacctgcacgtccaggttcagcaagcatttataaaacacgcctaccatgtgctttgcagcgacccattgttagcgaagtatccgaacctcagaacacagctgatggtcagttcacactccagccacgtagctcatgaaattgactacgaaaacttgaggtacttccgcaggcttccgtccggcatggccgggatatcaatcccagtctctaccgtctccaacctgagttcagtgttcggcgagtccaatcaaactaaggaatttgttacccgttatcttcgggcccaacatgccgacctgttctttgcagatgcggtgatccttgttgaaggggccgctgagcgtatgatgcttcctcattttttgcggcagcactttcgtttcctagaccagtgctacataaccattttggatattgggggaagtcacgcgcatcggctccgaccccttatcgatgcgttgggcattgtcactctggtgataactgacttggacgcgggtctcctacaggtcggcaaacctgtagagaggaagaaaggccaaactactaacaatccaaccgtgcgccactggatgcgcgcagcaggccttggacatgatgtggactcattactagatctgtccttcgacaataaagcacagcaaattgacgatctgttttcgatcaggatcgcttatcagacgcccattactgtccgcttacccaaaactgggctagatgtcgaagcattaccaaatacctttgaagacagcctcgtcctgagcaatacagagcattttgctaacaaagcggggcgcgggctgatgcgatcctttgccaaggcgctacgtgaagcagaaacatccttagagctcggcaccgagctattcaccaagctcaaggatggtgataaggctgagttcgcactacacgttctcggcgactctaatttcgccacgttgaaggtgcctacttacatccatgaaggcttggcgtggttgcagtccaagctcgaaagaaaaagcaaagagctactgatcgtcccttcagcgattctcgaggtgacgccatga

SEQ ID NO: 79693 - DNA, 1872 bp, Pseudomonas syringae pv. syringae PD2774
atgagccggcagccggaagctgctacggatgatgttccagatgccgatcaggtcattcaggaatgtctgagtctcgaccatccgaagagttttttcctatacgccggcgctggctctggaaaaacccactcattggtcgaggccgtgaaaaacctgaagagtagggaacggcaacggctgacgtttgaagggcgtcaaatcgcgatcatcacctatacaaatgctgcatccgaggaaatttcccgccgtcttgaacacgatccattggtggtcgtatcaactatccacgcgttctcttggcggatgattcaaggctttaataccgacattcgtgagtggcttagggccaagctcacgcgagatattggcgagcttaatgagaagctcggaaaggcccgaggacaaaataagacatttctagcaaatcaagcttcaagggatagcaaagctcgtcgccttgattccctggatgagatatcaacattcatttacagccctaccggcgacaatcgcggtagacaagccctaaatcatagtgaagtcattcaaatggcagctgcttttattcagcagcctccattgctgaacgttatggcggatctgcatccggtacttttgatcgatgagagccaagatacttatgggcctctcatggacgcttttctccaagcacaatccctcatccctgaccgtttttgtctcgggcttctcggcgataccatgcagcgtatctacaacgatggaaaggtgcgcttggaggaagcgatccctcgagactgggctatgcccgaaaaacgtatgaaccgtcggtgcccaacacgggtcgttgatctaatcaacgtaatccgtgcgagcgcagatagtcatcagcagaagccaaagcctaacgctatcaaaggcacggttcgaatgttttgcacccaacagataccaggtcaaggtttcgagctggaggaagacatcgcacgccgcatggccgccatcaccggcgacggtcagtgggcaattggtaaagacgggagaaaatccctgattcttgaacacaagatggccggacgccgaatggggtttgagggtgtgttcacaccgttgtatggagttgagcacttgcgaacggggctactggatggaacactgccaatcttgaaactgttcttcgaacaggtagctcctattcttcaagctgccaagacgaacagtttcagtctcatggaggctgtgcggcttcagtctccgctcctcgatacaaaatctataaaagaggcgcctgaccagttagccttgcttgataaagcaggagcagcaactgagtccttatgtgaactattcaatgccaacgatcccttgatcggaaaggtggctcatgtacttttcgaaactggcttactagatctccctgatcgtcttgtgacagctctattactgggcgccacaagtgacgctcctccccagacatcggatcgtgatgcgttggaaacccatgcataccagattctacttggacgccccttctcggaaatggctgcgttcgccgggtataccgaaggactatcccctttcgacacacatcaaggcgtgaagggactggaattcccaagagtcatggttatcctaaacgacgaggaagcaggtggtttccttttcagttacgacaagctcctgggggtcaagcctgcttctgacagcgatgtaaaaaatcaacgcgaggataaagatgactccttggctcgcactcgtcgcctactgtacgtcacttgcagccgggccgaagaaagtctcgccattgtggtttacaccgctcagccggcaacggcgaaacagcgagtgattgaggcaggatggctcaaggcagaagagatcgagatcctgtga

SEQ ID NO: 79694 - DNA, 2355 bp, Pseudomonas sp. ICMP 19500
atgaccacagaccagatccctgcttcctctctcaccgatagcccacccttgatcccagcggggccttcccccaaagcagctgcagctatcgacaccccaccgatccggctcgcctgccttgaggtctgtaattttcgacgcctggccaagacccgacttgagctcgacgaggtcactaccattttggtaggtgccaacaacagcggcaaaacttcccttcttacagtcctccgcaacttcttgagcgagtcacccggattccgcgcgttcgacattagcctttcgcagtgggcgaagctgcgcgaggtatgccaccgctgggaggcacttgatgaggatcccacgacggactccaaggatgccgaatcatgggaggccgagtatcaggaactccaggcgtgcatgcccttcattgatctttggttcgacgctaaggagggggcgtacagccatgttgcgccgttcatcacctcgctgaagtggtcgggtggcgcagttggtgtacgggtacggctcgaacctgttgcagacgcgaacgaacttcgcaatctggcttggcgctaccgtgaggcgcgcgccccggtccgagagcttccgaaggatggccatgcctggccgatagatctgcttgactactggcttagacattctgcggatctgcgacgcatagccgcttaccgtctcgaccccgtgaagggccccttggccgataaatcgcgccgtgacttgcaggagctgccacttggatcacaaccgatcgagttgcagcatctgcgcaagctcattcgtgtggattttgtaccggctcaacgaggactcggtgccgaagaagacgaaatgcggtcagagtccgcaagttctcggcccggattgttctcaagccaactcatgaagttcgctcggcaacacttgaacgtagccccatccggtcacggacatcgagaagacttggtcaaggccgttgctaatgcacaagcagacctcgacaaatctatctacaaggcgttaaagccagcgatggaggacgtggagattctgggttacccaggcctgcatgaccctcaccagttccattttcgtacaagaatccagaccgcagaccttcttgctcacagcacggccgtacagtacctcctggacaaaactgctgttgatgagtccttgcctgaacactctattggcctcggctatcagaatctgcagtcgctgagcttcatgctcgtgtcattccgcgccgcacgcctcaatccgccgcagggcagtccggcggcagttcacctcgtgatggttgaagaacctgaggcccatttgcacgttcaggttcaacgaaatttttcgaagaacgcccacgagctcattcgtccaaaggagcaggtgcatagctacctccgcagtcagctgctgatcagcacgcactcgagccatctggctcatggagacaacttcacgcgtctgcggtacgtgaggcgggtggccagcacggtgcttggcgcaaaacccagcacgcaggtcgttaacctgggcgatgcgttcggcgaagacgctccaaccaggacgttcgccgaacgctactttcaggtgcaacacaccgacctgcttttcgctgacgccgccatcttcgtggaaggaacagcagagagaatgctggtgccacttttcatcgagcgggatttccccaaacttgccaagaagtatgtttctttcctcgacatcggcggtagccacgctcaccgccttaaacccctggtggagcgattggggattccgacgatcgttatcactgacttggatccggttctgccaacccgaaccgataaggggcgcctagtccgggcagcggtgcacatcgccggccaagaaaaattggagtgtgggaatgacacattgacctcatggcatccgatgctggcggagtttcaagcttttggtaagccgacgcctgcccagctggtgtggacatccgacacaggcgttcaagtccgcttcgcgtggcagcttccggttgcggctgccagcgagcagtggcccagctcgtttgaggactctctagttctctccaacatcgattggttcaaagcgttggaagaggaggttgacccaatcaccgctgccaaagtaaagcaccgcggcaccttggcaaaggtgataggtcttgtgctcgactacccagaccacgccgagctgctcaaggaactccatgcgatgctccgcgggagcttcagtaaaggagatttcgcggcaaccctgttcgaacggctaaatgctggccaagacctgaaatgccccgcatacatcacagacgcgctcacctggctgagcgggcaactcaacgtcactgcgggagagaccccttga

SEQ ID NO: 79695 - DNA, 1953 bp, Pseudomonas sp. ICMP 19500; identical to SEQ ID NO: 73987

SEQ ID NO: 79696 - DNA, 2316 bp, Legionella parisiensis
atgcgaataagttttatagaagttcagaattttagaaaactgaaatctattcgaattgatttatcaaaaaatagaaccctgtttgttggagcaaataacagtggtaaaactacagcaatgattgctctacgccgatttcttgtcgatcaaaaatttaatgcctatgatttcacactttcgaactggacacagataaacaaaatcggtgcaaagtgggaaaaagcagatataactcctctcgacttgactgaatgggaaggtactcttcccttaatggatgtatggttagatgttgaaccaaatgaaattcactacgtgcagcacttgctgccaactttagattggacgggtggtttgttgggggtcagactgcgactagaacctaaaaaactggaagagttgcataacgaatatgttgttgcccggcatcatgccattagtaccattaattcagccaaacaagacaaagacagagattataaagttcccctctggccgtcttgtatgaaagattttctggaacgtagtctaagcagtaggtttcgtgtgcattcttacattttagatcctaataaacttgttgccccgaaaaatggctcggcacaaccgcaattattatcaccaactgcggaatatatggaggagaacccttttgcaggcctcattcgtattgatgaaatcaatgctcaaagaggtttttcagatgctcatagtaatggggactcattttctgaaagaggagaagagaacatcggacgcggcgacacacgcaaattatccaaccaactgcggtcatattatgataagcaccttgacccatccgaaatgcccgaatcaggtgacgtggatgcattagaagctattcacgaagcacaagagatatttgataaaaagctggccacgagtttttcagaagtattaaaagaggttcaaaatcttggctatcccgggatcagcgatccaacgttgactatttcaacacgtataaaaccaatggatggtcttaatcatccttctgcacttcaatacgaagtcatttctaactatgaagacgtacagggaataccacctagattgccagaacaatataacggtttgggttatcaaaatttgatttcgatggttttccgcctaatgagcttccgtaatgaatggatgcaggtaggtaagattggaaaaaaagcgattaccaaatcgagcgaaacagcttttccgccaccactgcatttagtacttgttgaggaacccgaagcacatttgcatgtacaagttcagcaagtttttattcgccgcgcatatgagatactgcgtaatcatcaagacttgaaagaaaatagaacactgaccacccaactagtagtctccacgcattcaagtcatattgctcatgaatgcgaattcgagtgcttacgatattttcgacgtaagcctgcgagcaatcctggtgatgttccaacatctacaattattaatctttccgaagtatttggtaaacaggacgaaactgcaaaatttgttacccgctatctaaaatcagcgcattgtgacttgttctttgctgatgctgctatttttatcgaaggtgcggcggaacgaatgatgattcctcatttcattcgagaaaacttccccaacttaaatcaaagatatttaaccttgttagaaattggcggaagccatgctcactgtttccggccacttatcgagcatttaggactaactacgcttatcatttcagatattgatgcagcagaaaacaaaggccgtaagccttctcaacctattgtgaaaggtggaaatcaagttacacgcaacaccactctgcgaacctggataccaggtaaagaatcgattgatgatcttttagattcagctccctccgataagatcaaaatctactctgaggcaaatttcttggtacgagtcgcttatcaattaccgctaaaaatcactcttgatccctctgctggagagataaatatagctgccaacacttttgaagatgctctagtgtatgagaatattgacctgtttaaaaccttggaaggcaacggcctggtcaagaagttcaatgaggccttgaaccaaaacaaaactcctgctgatctaaccacagcgatgtttgaggctttgaaatcaggaagcaaagcagagtttgcacttgatttactctttttaaaagacccaaaagtattcaatgttccaacttatattcgagaaggtttggaatggctacaagagcaggtatgtaataaggaagaggtatctgaaaatattagcctctcatcctcggatcagggaggagttgcgcaatga

SEQ ID NO: 79697 - DNA, 1908 bp, Legionella parisiensis
atgaaagatgtccttgctgcatatgataataatattgatgataaggcggacactgaaataatagattgtcttagttcgcaaacaccaaaaagttttttcctatttgctggggcaggttcaggaaaaacacgttctcttattaaagcattgcagtaccttcaaaccaaccatagcaggtatcttcgactttatggaaaacgtgtcggcgttatcacatatacgaataaagcatgtgaggaaattaaacggcgaacaggttttgacccaatggttaaggtttcaaccatccatggtttcgtatggactttaatccaaggatttaatgaagatataaagtcgtggcttaaagttgaattagaaaatgagattactgatttacgagaaaaacaagataaagggcgtggtggcaaagctagtattgatcgtgagaaaagtattgaagccaagacaagacgtttaatctcattagctgaaataagggagtttacctacaatcctaacggtgaaaaccatggacgtgattctcttaaccacagtgaagttattaagatatctgctgcttttcttattggaaagccagttatgcaacagcttctcattaataaattcccaattcttctgattgatgagagccaagacactaataaaactttaatggatgccttttttttagttcaagcccagcatcccgttgagttcaggctgggcctatttggtgatatgatgcagaaaatttatgcagatggcaaagccgatcttggtcagaatctccctgcagattgggcgaaaccagagaaagtaatgaatcaccgttgccctaaaagaataattactctgataaataaaatccgaacagatgtagataagaaagaacaaaaacctcgaacagacgcagcagaaggaattgtaagattctttattttaaaggcaagctctcccgataaaatagctgctgaaaagttaattgcaagcaagatggcagaaatcagcggagatattgcatggaataagccacaagaagttaagacgcttattcttgaacatcacatggcagcaaagcggatgggatttcacgatatgtatgaacccctttaccggaacgatgctcttcgtattggattattggacggtactctaagtggcttgaaattttttactgaccgcgttctaccacttgtggaagcgcgaatgataaatgatgcctttgctgttgcagctattgtaagaaagcattccccgcttttaagcaagcccatgttaaaatcagttggcgataaacaacctgcgcaaattcaaaaaaccaaagaagcagtggaatctctttggaagttatgggaaggaaataaaacacctagatttatagacattcttcgtaatgttgccaaaactaatctttttgaaattcctgaaagcttacaaccaattgcttctcggagtgatgaacaacaactacttgctgaggtggaaactaagaaaagaatagaagaccaccgggaaaatgaaacggttctggacaactgggatgaattccttcttacatcattcgatcaggctaaatcttacgttgattatgtgaatgatagggccaactttgatactcatcaaggtgttaaaggactggaatttccccgagtcatggtaatcattgatgacagtgccgcaaaaggatttcttttttcttacgaaaaactttttggtgttaaagcaaaaacaaaaagtgacctggagaatgaaggtgctgggaaagaaacagggatagaacgaacgcgtcggcttttctatgttacttgtagtcgtaccaaagaaagcctagctattgcagcatattcaaataatcctcaaggcattaaacaacatgtcatcactcaagagtggtttgcggaaaatgaaatagaaataattgaatag

SEQ ID NO: 79698 - DNA, 2241 bp, Legionella tucsonensis
atgcaaatagctcatattgacattcaaaattttaggaagttgaaagcttgtcgtgtggaactttctcaaaaagaaactatttttgttggtgccaacaacagtggtaaaacttcggctatggatgccttaatactatttctgaagtgttctaaaaggagagatatttccacaagtgatttcacgctatcaaattgggtagaaataaataaaattgcggagagttggattgttaacactgatgagaataagatgcttatctcaacctcatcttgggtaccattcctacccgctatagatgtatggattaagatcgaagatgatgaaatccactatgtcagtcacttattaccaacacttgattggactggtgatttacttggagttcggcttatttttgaacctaagaatattgaggttctttataatgaatttacagaagcttatgtatccgcacgtgatacaaccgaaaggcataatgtagataaaagcgaagaccaacacttatcaatttccttatggccaaaatctatgcacgacttcctgaatagagaactgcataaatattttattattaatgcatacctactcgatccggaaaaacaatctgatattcaaagtcttcctttaggaatagaacctcttgattttgagccgtttgatggcctgatcaaaattgatattatcaatgctcaacgagggttttcggatgtaaatgcggatgaaggctccacaaattcaaataggcgactctcttcacaacttaaacaatattacagtaaacatctagatccgactgaattacctgatgaaaatgatctagacgcactctctgctattgatatggctagagcagctttcgatgaaaaattaaaggtgagttttaactccgcgttatgtgagcttgaaggacttaattatccaggatttggaaatccacagattgtattatcaagtaaagtagatcctcttggaggacttaatcataatgcagcagtacagttttctgttattacaaatgatgatttatcagggattatgccattaaggttgccagagcaatacaacggactaggttaccaaaatcttatatcaatggtttttcatttaatacggttcagagatgaatggatgcgtgtcggaaaagccggcaaaaaaaaaagcgattctaataaatttatggagcctttacatcttgtgcttattgaggaaccagaagcacatttacatgcacaggtacagcaggttttcattaaaaatagttacaaagtattaagaaatcatgacagtttaggtgataataaacattttcacacacaaatggttgttagcacccattccagtcacatagcacatgaaattgatttcacctgcctacgctatttcaaaaggcacccagcggaaggtgataatccggtcccaagtgcaactgttgtaaatctcactaaaacttttggtagtgatgctgatacatcaaaatttgcaactcgatatcttaaaacaactcactgcgatcttttttttgctgacgctgcaattttggtggaaggacctgcagaaagaatgcttattccacattttatttgctcaaagtttcctcttttagcaaaaagctatatctctttgctggaaattggagggagtcatgcacatcggttaaaacctttaatcgaagcattgggattattaacactagtcataactgatcttgattcgcttattggtcgcgaaaaagctcctccagaaataggaaaaaaccaactaacaggaaatgaaactcttaaaaagtggattccccaaaatgatgaattggataaactattaaacaccagttatgaaaataaagaaactggggatggtaaaatccgagtggcttatcagtattctctagctgtaacattggaaaataataagaaacaagatgtaatcccctatacttttgaagatgctttagtcttgagcaattttgaatttttcagaagtaaaaaagacgcccgtggtttaatgaagaaaatggtagaagcagtgaataaacctactcttaaagaagcatgtgagaaaatgtttgaggatcttaaaactggtaagaaggctgaaatggcactcgagcttctctattccactgatccaagtcatctactaccaccaaaatatatccacgaaggattaaagtggctagagcaaaaaataagtctgaggaataaggattatattgtgcagagtgaaacaaaaataggtgcataa

SEQ ID NO: 79699 - DNA, 1914 bp, Legionella tucsonensis
atgaatgaaacagattattctatgtgcgttgatgaagaaatatacaactgtcttaacttggataatccaaaaagcttctttttatttgcaggcgcaggttccgggaaaaccagatcgttggtcgaagtactaaaaaaattccgtgaaaaaaatattcaacgcctaaagcttcagagacagaaaatagccattatcacatataccaatgccgcatgtgatgaaataaaacgtcggcttgattttgatccatcattttcaatatcaactattcacagtttcgcttgggaattaattaaaccatatcagagtgatataaaaaaatggttaaaagacaatctaaaatccgagattgcggaacttaatgaagctcaagaaaaaggccgtccgggtactaaggcttccgaagataggtcaagaaaaataaattccaagttagaccgaattaattctttagaaaacaccaagaaatttatttacaatcctaatggagataatacttccaaagattcgcttaatcatactgaagtcataagtataacagtagacttcctaatgactcatccccttatgaggaaaattttggtacgaacattcccaatccttttaattgatgaaagccaagacactaaaaaagaactaattgatgctttttttgaaatacagaaaatacacgcggataatttctcgcttggactatttggcgacacgatgcaacgtatatatacagatggaaaatctaatttgggtcaaaatataccaattgcttgggcaaaaccagaaaaaaaaatcaactaccgatgtcctaaaagaattatcaaacttataaaccaaatcagatcagaagttgatgggcaggctcaagagcctgctaagtcaaattatggatttgtacgtttatttatcgcagatacaagaaaagatcttgataaaacagcatttgaatttagagtttcagaaaaaatggctgaaataacaggtgacaataattggaaagaattgaacaatgaagtaaaaatactgactattgaacatcacatggcagcaaagcgtggtggattttccgatttcttcacccccctttatgagattgataagttcaaaactggtgtacttgatggaacccttcaaggaatttcatggtttagtaatcaaattcttcctttaattaatgccttacgggctaatgataaatttcaagtttctagaatcgttaaaaaatattctcctctcctttcaacggaggtaataaaaaacagtttgactcctcgtgaaaaaataagaacagctaacgcagcagtgcaaaaactttacaacttgtggagtgaaggtaatagcccctcattaattcaaattcttaatgaaatatatcagagccatttatttcaaattccagatatttacatgccaattgctgcgcgattaaaaacacaggaaaatagacaaacaatttccctcgaaaatcattccgacgaggataaaattattaacgcttgggataatgctctaaagagttcgttcattcagtttgaggcttatttcaattatatctccgatcactctcgatttggcacacaccaaggaataaagggtctagaatttccgcgcgtcatggtcattctggacgatgaagaatcacgtggattcctcttcagttatgaaaaattgttttgtgctaaagaactctcagaggctgataaaaaaaatagattggaaggtaaagaaacaactgttgagagaactctcagacttttttatgtaacttgtagccgtgctgaagaaagtttagcaattattgcttacacaaaggatccaataaaagtaaaaaatcatgcaatatcccaaggatggtttgatgaaaatgaaattattgataatcttcaggagtgttataaattactagaagcccctgaataa

SEQ ID NO: 79700 - DNA, 1983 bp, Sphingopyxis sp. H050
gtgctaatcgaaagtgtcaccctttccggcttccgctgcttcggccccgaggcgatcacagtgccgatcgcagcggagattaccgcagtcgtcggcccgaacgcggcgggcaagacggctctccttcaggcgttggccaagttgttcggcgtctcgcgtgcgcagcgcaccgtgcaacgctcggattttcatctcggtgcggacgacgatccggacgatcgcaaggcgaaggacttgtttatcgacgtgctgatcggcttgcccgaactggaagatggcacagcgacggcggagacggtcgccccgtcattccgccacatgcagatcgagcgcgagggcgaggctccggtttgccggatgcggctcgaagcgcgctgggaggacgacggcacggttgatggcgaagtgtcccaggacttgttctggatccacacgctcgacgacgatccgcccgaagacaaatgtcatcccgtttcggcggcggaacgtggcctcatccagctatactatacgccggccagccgcgatgcagccgcgcaagtccgcgcaacgacaggcgcactcgcggcgcggctgcttcgcgcaatcgaatggtcatcggaaaccgaagatgccgtcgaggaagcgagcgagaacctcgccgccgcgttcgaagcggaaacggcgatcgcggcgatcggccaggcgctgcaagcacggtggtccggcttgcatgacgaaattgtcgataccaaaccgaggctcagcctcgtcagccgacggttcgaggaggtggtcaacaagatcgccgtggttttcgaacaagggccggatgggcatgaacgcggattggatgcgctaagcgatggccagcaatccttgttctatttcgcgttggccgctgccgtgttcgatctggaacgcaaggtggttgctggcgatgtcgaaggatttctcgacgatcagctgcgcatcccggcgctcacgctcttcgcgctggaagagccggaaaatcatctttcgccgtatttcctcgcgcgaattatccggcaggtccgatcgctcaccgaagagggcggcgcacaggccatcgtcaccagtcactcgcctgcggttctgagccgggtcaatccgcgcgaagtgcgctattgccgctgcgatcccaagacccgcatttctacggtcaagaagatcaagctgccgaccggaacgggcgaagatgccaagttcgttcgcggggcagtcctggcctacccggaactgtatttcgcgcgcttcgtgctgctggtcgaaggcgattcagagcggatcgtcttgccacgactggctgaagcgctcgacttgctgatcgatccggccttcgtcgcgatcgtcccattgggcgggcgacacgttcagcatttctggcggctgctgagcgatctcggcattccttacgcaacgctgctagatctcgatctgggccgggcaggcggcgggttcggtcgagtcaaaacggcgatcgaaaacctgatcgagatcggcgtttccaaggcaacattgctaaaggtcgatggcggcatcctgtccgatggcgatttcgcgaagatgcacacttggcaggataccgaagaccgcaaaatccttaaaggatgggtcgactgcctgaagccgcatggcgtgtacttttccgcgccgcttgatctcgatttggctatgctcaaggcattcccggacgcctttgaagccaccgtccctgccggcggtgggccgaagttggcagccgacaaagcggccgaagctgttcttggcacggcgggaccgggattggccctctataccggcgcgttcaaggactaccccgatcttctgccggcttaccgctatcatttcctgacgcggagcaagccggcgacgcatctggcggcactcacccacatcaagaccaaggcgttgcgcgacggcatgcccacgattctcagcgacgtcttgcagcacgtcgccaagaatcttcggagagactag

SEQ ID NO: 79701 - DNA, 1905 bp, Sphingopyxis sp. H050
gtggcggtattggcgcggcgtgtgcgcgccgatcaatgggcaccgatcggagtcgacgcgctcgaatccaatgcgatggcggtcgtgaaatctaccgacaatcgctcggtgatcgccggcccgggcgcgggcaagacggaacttctcgcacagcgcgctgctttcttgctgcaaaccgggacatcgccgccgccgcgccgcattctggcgatcagcttcaagcgcgatgcggcgaccaatctggccgcgcgtgtcggcaagcgatgccaccgcagccacgccggtcgtctggattccatgacgttcgatgcgtttgcaaaggggctagttgatcggttcggccaagcgctgcccgagcgctggcggccccgaccggactatgaaatcatgtttccgaccgaagcactgtatcgtggcttcctctcccaggacgtcggtgccccaccgccaatcatcggctcctatgccgatcttcaggccattgcgtccaagacgttcgagcgctcgatgttgctgggtaaaccgattcccgaagacggctggccgataccggcggtagggcaatgggccgccgaccggttctggcaatcctcgttgcacgagggaatgaagacccgactgtcgtttccgatgatcgggcggctcgccgaactcctgctgcgcgtcaatccgatggcccgcgacgcgctgagactgacctactcgcatctattcatggacgaatttcaagacacgacgcaggttcaatacgatcttgtccgcacgatcttcaaggacaccggcacggtgatcacggccgtcggcgacaacaagcagcagatcatgcgctgggcgatggcgatggacgacccgtttgcggcgttcgacgcggacttcggcgcgcaatgcacaccgctctataacaattaccgctcatcacctgaactggtgcgaattcagcacattctcgcgcaggcgctggacgcgcatgccgtcgagccggtctcgaagacgaccggaacgatctcgggcgaaagctgcgccatctgggatttctcgacgcccgaggtcgaagccagccgtctcgcggcctttgttacaagcgagatgaaaacgcacgggctcggcccgcgcgattttgcgattttggtgcggcagaaggcagccgaatatgcagccgttctggagcctgcatttgaagcggccaagataccgctacgcaatgaagatggggccgttggcgcggtgaagttgcaggaactgctgacagaggaagcgtcgcaactggccgtccagcttttgcggttgtcgacgaccaagcgggccgggcggtattggtcggcaggtctgaatgcacttgctgcgctacagggaatttccatcgaggatgaggctgggcacgcaaggcttgcgcgcgacctcgataccttcgcactaaagattgccgctacctatccggcgccaccagcttcaacgtcggaaagccttacgatcgcaaaaaagttgatcgacttcatcgggcgggaaaggctcgttgctgtccatccagcctacgcacagggcggctggctggaaaaagtgattgaggcaatcgcgttacacctggcgtcatccggaaaggatgcagccgattggggcgaagcactcgacgtatatgagggcattgatgccatcccgttgatgacaatccacaagagcaaggggctggaataccatagcgtcatgttcgtcgggcttgacgacggcgcatggtggagctttgccggcgaccagatcgaggcgactgccggctttttcgtgggtttcacccgcgcaaagcagcgggtagcgttcacatattgctcaaaacgtgggcgacggacgaagatcgccacactctatggccttcttgaaaaggccggtgtgcagatcgtgcaggtcgcgtag

SEQ ID NO: 79702 - DNA, 1806 bp, Sphingopyxis sp. A083; identical to SEQ ID NO: 73306

SEQ ID NO: 79703 - DNA, 1764 bp, Sphingopyxis sp. A083; identical to SEQ ID NO: 73307

SEQ ID NO: 79704 - DNA, 1737 bp, Lactobacillus plantarum
atgaagattcagaaaatagaagtgaaaaattatcgaggattagatggggtttcagtgtcatttgattcgaatgaaagctttattgttggtaaaaacaatatcgggaaaacaagtaccctagacttactgaacacaatcttgtcaggaaacgatttcagaagcagtgactttcaggatgaagaaagacctatcactgcgaatgccaaatttcttctatcagaagaagaaattggaatgcttgacgacaattttgattcatcagaggagaattctgtaacgattcaattctcacaagttgatccagtatcacaagtgaaaattatagcagctacaagtggagagaatataacaaaaaatcagattcagaaatcaaattatattggatttagttctagtcgaaaacccattcaagaaaacgatttaacacgtcaaattggtagttataaattgatcccgcatctagttagaaagttttcagaagataaaagtatggagataccagagaccgataaggacaataaagctattattaactatattaatgagcgcttgttgcatatcaaaccctttcgtgacaatcagattcatgtgggtatggagacaaactactttgattatataactcgttctctcagagtacagagtaacgaaggagtggatttttcgaagttgggttttgggactcagttttcgagcctgataccacttgtattgatcgaccaactcatcagttggtcaagataccaacacttggacgaacatctgtgtagtgacaataatgggggacaggaactgcatataattcttggattggatgaaccagaagtacatctacatcctaacttacagtttgctgtgcgagaagatattgaaacgttacttttaggaaaggaccaagaatttaataagctggtaaaggaattgtttaatattgataaggtaacaggacagatgattgttgtaacccactctcctgctgttctatctaatgattatcatcaatatatacgatacagctctgaaataaatggtcttcaagttacttctggacagaatcttgcccttagttcaaaccaacataagcaacttatgatgcaattacctaacgtcaaggcagcactatttgcagatgcagtaatcttggtagaaggtgagactgaatatggagcacttccggtatttgcaagcaaacttggaatttcgttagtacgcgaaaatatcaatattgttaatgctagcggagtgaaaagcacaacagcgctaaaatgtctatttaacaatcttggaatcaagtgtatttcaataatagataaggatgatggaaataaagcaaccgaagatgtttttgtcacgagtcaaagagattttgaagacgaatgttttgaacttatgggattgcgcaatattcatgaatacttcaaaattttttatggaacaatagaaaattcaaattataacggctcgttttgggattgctatttcagttctgactataagagtgggagaatagaagtacttaaagctcagaaagatgtccatgaatatgttgagaactatttcacagatcatatagattccaagctagttaatgaagacaacattttatctaacctaagaacaccctttatcaaaggatatctcaaaaaaaagtccgtattgaatggggccattattgcacaatgtttggaaggagtccctgaaacatacaagaaagcattgaacgaggcagctaaatga

SEQ ID NO: 79705 - DNA, 1731 bp, Lactobacillus plantarum
atgattagaaacgtacagagagtgaatcagaatactagtcgcccaacattagattcgaaacaacttatggtagttaatgcaaaagacaagcgcttgatcgttgaagctccggctggctttggtaaaacttcaacaatgatttcaatgattagctattgggtggagtcaggtatgctaccgcattacaaaaaaatactttgtctctcttttagcgttagtgcagcaactagaatgaaagacagtattacggaacattttgctgaacaatttacgcaaaaatctccgatgtatcaaattatcgttactaactttcatggattttgtcgcatggtattgaggaagtacggtcacttaataggcatacaaaacattgaaaaaattgatacagttgatattaacagcgtgaaaagttctgtgaatggtaatcgtaaaaaatttgattcgatgttagatttggagagtgatataaagtctggagcgttgagtgtaaaaggattgatgtcacgcacttcaacgtacgttagtgggcttatgtcactgctcattcctaggaatcaaattacttatgatggaatcatcataatggtccttcatttatttcaacagtttcccacaattagaagtggctaccaacatatcttttattctctttgcattgatgaatttcaagatacaaatatcttgggctggagtttaattcaaattcttctttgtgataactctagatttgttgcattcggtgaccagatgcaacaaatctatgggtttcaaggcgcacttcccaatttgattgataaactaattgaaaaaaagtactcatatgttcggcttgaaactaattaccggtttgcaagcaacccagacatgcttgcaatggattcagctcttagagaatataaggacgcgccaggtcattattcagcagaattaagaattccaattaagttaatatttggaaatactgtgtcagacgaaggaatagcaattatttcaaatattcgtaagattaaaaaaaataatcaaaaggcaacatttgcaattctagttggttcgaggtctgttagtacagataaattgattcgtatatttcaaaacgagtttgacacgatggatgctaccttcaacacggaagatgaagagttcattgcttttcagtcagaatgtttaacactttttgaatcaaccttccaaaatctgccattggtccggcaacgtgttgcatcttttctatccaaagttgaggagtcaattctacccggatcaaatatcgaatcatatatgaaactgttaaaaggactccttacgtacactgtggagaaagtaaccgtacattctcgaaaagaacatgttatttcagttttagaatcaggtgcattgcgtaggagtttatcagaagtagacagtgaaataactgtctctacgatccatggagcaaagggccttgagtgggattatgtgtttatagcaaatttcgagcagtttgaatttccagtctatcctgagatgcagaagctaaatcttaagccccggtctgagaaaattcaagttacaaataataatgaagaagcagtaaaagagattttaaataaactctacgttgctttctctagagcaaagcagcaagtatactttgcatacgccggagagcgatttaataaaacaggaaaatcaattaacgcaaatcttagtgtactggcatcgctccctttcttggaaaaaacgtttgtgtaa

SEQ ID NO: 79706 - DNA, 2163 bp, Pseudoalteromonas sp. H103
atgaaaattacttccttcactttaaagaattaccggcggctagccaatgtaaccttagtgcttgatgataaaacagcggttcttgtaggtgctaataatagtggaaaaacgtcttgcattggtgctttacatacatttctaaaaagcccggacaatctcaaggttagagatatatctaagaagaattggaagcacatccaaaatcttggtaaagaaatcgaagaaaagtttccctccatcgagaaaatgaaggggctatccgatgctcttatcagtttattgcctagtttagatatagagataacagcggaagcgagtgaggcatataaggttcgtgacatcctaccagacctagagtggaaaggtggtgctctatccgttcgcataaattatgaagtgattgacgtcaccaaactatttagtgagtttattaacacgagagaggtagtagccaagcatcaaggtaaggtaagcctatggcctaaagatctctgtgatttcttagagaaaggacggaacttcagtaagttcataaagcaaaagcactatgttttgagcaaagagactgatcctagctcgaacgaaattttacagccgctaaaatttgaagctttgaaaaagttaattcgagtagacgttatatccgagcagcgggggctaggtgctgaagataacgcagatcaaaatggaccatattctgaaaagcaacggctcaacaagttacttcgaggctactatgagggtattttgaacccagaagattacccagaggctgacgacctcaaagtcttgggacagcagcaaaatttagaaaatgacttcaccaaaagattgaacgatcagtttaaggctcctttcgaagagttggaaagtatgggttatcctggtatcggtggcaatccagctgttgaaatttttgcgcaaattagcggaacggatgcgttgcaaaaatcgtcatcggtacgataccgttttgataaaaaagatgaagaatttcttcccgaaagctacctggggcttggctaccagaatctcatctatctgacctttaggcttctagagtttcgcgacaaatggatgcgtgttggtaaatcggcttcttcacgggacaatgtcgaagagcagattgagccaatacacctagttttacttgaagaaccggaagttaatcttcacgcgcaagttcagcgtgttcttgtatcgaaagcatacgatactttgcggaatcataccgatttgcgcgacaaacataccaaaaaagataagtctgaataccagacacagctcgtgattagcacccactctagtcatattattaatgatattgacttcaaaaatttacgttacttccggcggaatgatgcaaatacgtccatcgcaatggaccatacaacaattgcaaacatgtcagagctttttgcgcatgcgaaagatgagcttttgtttgtaagtaaacatttgacactcactcattgtgacatcttctttgccgacggcgttatattcgtcgaggggcaagcagagcgccttctggtaccagagtttattgtcaagagcttcccagatttatctaatcggtacatctcgatgctcgaggttaacggtgctcacacgcacaaatataaagcgttagtcgagaagctcggggtcacgacactagtgctgacagatcttgactctgttgataacagcgggaagtcatgttttccggaaaggaactctgatcaaaagagcaataatgatactttgaagttctggcatccacagaaagaaaccttgaatgaattagtagatttgcccaaaaatgaacatattaaaacaagcgaaggtgcgccgctttacgttgcttttcaaaagcctacccagatctctgaggaagaggttttgtcccgaacatttgaagatgctttgattttggctaattttggccaagagtattttcagaagaaacctaaactcaaaaatgcaaaatcggcccatgaagatggcagcaagtcgctgtcagagtcactttatgaatatgtgcaaggtttaaaaaaaggcgactttgccttcgattgcttattccatctcgcagataatgagtcgaatagcttcaatgcccctgaatacataagcgatggccttaaatggctggctgttcagctttcaccaaaagaatag

SEQ ID NO: 79707 - DNA, 1926 bp, Pseudoalteromonas sp. H103
atgtcagatggattctacttggcggacaccaaacccatagatcatgacagtaatgttgatgaagctattaaggcgtgcctacgaatagggtcagggaaaagctttattaccttcgctggcgcgggttctggaaaaacctactctctaaaaaatgctctggatttcctgaaaaatcaacactctgaggacttttctcggcgaggaaagaaaattgccgttttaacctttaccaacaacgcggcagatgaaatcaaggaccgaatcgagcaaaacccgatcttcgcggtttccacgattcatagcttttgctgggatgcaattggcggcttcaatgaggacattcgcaagtggtacttgggaaaaattcccaccgatttagaagaactcaaggaaaaagaagataaaggccgtgcgggcaaggcatcagatgcccgaaaaagggatatcatccggctgaataagaaaatggaatggttagcgcaatctcgttcatttaattatgatccaaacggaataaactcctccccaaatgccctttcgcacacagatgttttgaagattttctctaatttattgaccagcaaaccgatgatgatggaaatcatagtaaataaattcccttttatattcatcgacgaaagtcaagatactaataaagacgtagttagtgcattctttgagctgcaaaaagctaaatcgtataaagttgttatcggcctgtttggggatacgatgcagcgtatctttggcgggggagaacctgaactgggtaaaactaagcccagtggctggactactttagacaagaaaatgaatcatcgatcagcaaggcgcatcgttggtttggggaaccaagtacgtagtgaggatgataaacgtaaacagttcgcccgagatggagcggcggaaggttatgttcgatattttttattgtcgcacggtgtttcggacaaagaccaagtcgaagagaaaattcgcgagactatggcggaagtgacgggtgacaaggactggacagatactcaatccaaagaaacggctatcttacttttggaacataaaatggccggacgtcgacttggatttggtgagctatgggacacgctttcaagatcagaaaagataaaggatcgaattgctgaaggtgaaaataccgagcttaacttcttctctagtattgtttttcctttggctgaggcgagccggaagaaaaggcgagccgaattgatgtatattttgagagaaaacaagtctccgctgttggaagccaatgtgattgatacaaataagaacgatccgctagctcttgcacgagtcgcggaacatgcatttagagatgttgtttccaatgatatggttagctttcgtgaagttctagaaatactagctgagcacaagctacttagaatcccagaaaaattgcagtcatttgtggcggatttagaaaaaacagagactgagtcagatacaggccaaatgggagctggcacggagattgaactagaacctaaggagcgggatgacagtgaaatagatgcttgggctgaagctttggagactagttttttccagattgaaaaatataaagactacatcgatgggaactcaattttccgaacacaccaaggtgtgaagggtaacgaattcgagcgtgtaatggttgtaatggatgatgatgaagctgggggattcttattttcctacgagcagtactttggtgtgaaggagctttctaaaaaaagccaaaaaaaaaggaaggcaggtgaagaaactggtttggatcgaacccgacgattattttatgtcacatctactcgtgcgaagaatagccttgctcatgtgatttatacttccgatgttactaaggtaagggaaagtcttatggataaaaagttagcgcgagaaggtgaaattattaagttataa

SEQ ID NO: 79708 - DNA, 2007 bp, Streptomyces sp. AVP053U2
gtgcagctgacctgtgccaaagtgacgaacttccgcgtgttgcaggacgtagcggtgaagatcgacaagaaggccacgctcgtagtgggccggaacaacagcggcaagacgtccttcgccaacctcttcgacaagttcttcggcagcgacgacaccaagttcgtcctggaggacctgtccgtcagcaggatcaaggggatcaagtcggccgtggaggcttaccgcacggcccgggcggtgccggaggacagcagcgagacccgcgaagagcagttgaaggcagcggaagaactcatcccagccatcagtctgcaggtcgttatcgcctacaccgtagaggacgacctcgctttgctgtccgggatcatcctggacctgggcgaggactgcctggaggcccggcttgaggcagtcctaagtgtgaagcggccgcgtgacctcctcgagcaggcggacgctgccctggcccggcaaggaccggccttcgactggggcaagttcctccgcaagaacttttccacgttctacgccccgtcctactgggcggtctctgccctggacccgaacgtccgccgggagatcacgcccgctgcggcgcgcagggtgctgtcggtaaagtccatccacgcccagccccgtatcgacgacgtccccgcggaccgggcccgcacgctgtccaagaccttcgagaccttctacaaggcgaacagcgccgacgaggaacgcaatcagaacatcgagggcatcgagcaggcgctggccgtcgcttcgaagagcatcgacaccaactacgacctgttgttccgacccatcctcgacgaactgcgcaccttcggcgtgggcactatcgctccgctgcaaacgccggagatcatctcgctgatcgagtctggggatattctccgcggcagcacccgcatccagtacgcctcgcctgggagcgaccatccgctgcctgagggccacaacggcctcggctacagcaagctcatcagcaccgtggtccaggtcatcggcttttaccacgcctacctgcgcttgaagccccggccggccctgcagctgctcttcattgaggaacccgaagcccacctgcacccccagatgcaggaagtcttcatcagcaacattaaccgcctcttggagagagaagagtgggccgtccaggcggtcctgaccacccattcctcgcacattgtcgcgagtagcggttttggtgccgtgcgctatttcgactccaacggccccacccttaaggtcaaggacctctccgacttcgagcacaccaccaagcagcagaccaacgggaagacgacccttcagttcctcgcccagtacatgcatacgcaccgctgcgacatgttcttcgccgaccgcatcatcttgattgaggggaccgctgaacggctcctcctccgcgccatgatcagcaagtgtgcgccggaattggcaaaccagtacatctcgatcattgaggtcggcgatgcatacgccgcccggttcaagactctcctggagttcctcggcgtcccggctctggtaatcaccgacctcgactcggtagaccccgccaccaaaaaacgttgcgcgcccgacactggcggcgccctcacctccaatgccaccctcaaggattggatgccgaagctcagtgaggtcaaggcgcttctgcaggctccggcaggggcgaaagtctgcgggaacgtacgcgtcgcctacgaggtgccggaagcggacggggggccgtgcggacgcagcttcgaggacgccatgatcattgccaacgccgacatgttcgcccgcaacctgggcaccctggccctgaagaacgccttcaccagcgaggttggcatcatgccgagccccgaggccatcgctgccgccgccttccccatcgccgagcgactgagccgcaagaaaaccgacttcgcgttcgacatggtcatcacggagggctggacggtccctcgctatatccgggaaggcctgcagtggctgatgaggtag

SEQ ID NO: 79709 - DNA, 1575 bp, Streptomyces sp. AVP053U2
gtggaagccggggccggcgccggcaagaccacggccctggtggaagcccttctctaccttctcgacacccggcggtccgccctggaacaggccggtaagcagatcgcctgcatcacctacaccaacgtggccaagagccagatcaagcagcgcatcgctgacgaccccctggtgtacgtcggcacgatccacgagttcctgtggagtctgatccaagatcatcagcgcgaactgctggacgccctcatcgagtacaaccaaggcttgccgcgcccccaggacatggcagaactcgcttccggcctccggatcgagtaccacgatcggggccggcgcttcgccgacgggaaaatctcccacgacgaggtcctcgcgctcgcatccgcactgatcggctctcactccaaacttgcgaggatcatcgcccaccgctacccggtggtcttcgtcgacgagtaccaggacaccttccccgccactgtcaccctcctcttggaccacatcgccacggcgaccggacccgcctgcaccgtcggcttcttcggcgactccatgcagaagatctacaacaccggcgtcggcgccctggagcgggacgacctgatcacgctcaccatgcatggcaaccaccgctgcgcgaagccgatcgtcgacgtcctgaataagatccggccagacttgatccagcaaccggacatggacaaaactgcaggtgaggtccgtctgatcctcaagctgcctggtgctgaggacgagaacccggtccagcgggcccgggcagtgctcgacacctgcggctggcctgcgacgggggtcaagtacctgagcctgacgcaccgcagcatcgcagccgctcatggctaccccaacctcctccagctttacagcaaacgagggagccacgggagggacgaccttctggagggaactgagccttacgcccagttcatgaagagcatcgaggagctgtgcgccgcctacgaagcccaggagtacgcccacctcacctccctgctcggcacagggcccctcaccatccgcaagcactcggacaaagccaggatcaacggcatactccaggagatcaccgctgtccgggccacgggcaccgttggcgacgtccttgacgccgttacccgcgccaagctgatcactccgccgggcagggtcaaatccattgaacgcaccatcggcgcggaggacctcgatgaacgtgcccaaagagacgctgactttgcggctggcctgcgcgccatcaaataccaggaggtcgtccgtctcaccgagtaccgcaacgagctcacccccttctccacccagcacggcgtcaagggcgacgagttcgagaacgtcgtggtcatgatcgacgacagcgcatggaaccagttcaacgtcgaccgcatgctcaccggagacgaccaccgcaaggaacgagcctcccgctcccgcaacctcttctacgtctgctgctcccgggccattaggcggctcgccgtcgtcttcgtgactccgctcaccccgcccagcgaagcagtggcacggcaatggttcagcggcgctacggtccacgactaa

SEQ ID NO: 79710 - DNA, 2028 bp, Xanthomonas translucens pv. translucens
atgcggatagaaaaaattactattgaaaattttagattattacaatgcactgaaatgtctcttgagcggacgacgacattaatcgtcggtcgcaacaatagtggcaagacatccatcacggaattcttcgcacatgtcctcggggatgagcctaagaagctacgacttgaggacttttcggcagcgagaagagaggcctttctcgacgccaagcagctacgtcgcgaaggcaaggatgagaaagatgttttagcggcactaccggtcatcgttgctacagtcctcgtgtcgtacgacccagcccaagagcttggtacactagccccattcgtgatcgaccttaaccccgagtgcaagacagccaaggttcgtattgaatacaggccagcacaagaggcgttggctttgctgcttgacgcccctgtccccgtaggaggagcagatgacgcggcgcacctcttcaaaaacctcaaagaggttgtgccaaaggcttatgagtataaagtaacggcagttgatcccaacgattcgaccaatcagcgcacagttgaactaaagcaactcgggaagctatttcagtgcgggcttgtgagcgcacagagatcccttgatcaacacaagcgcggcgaacccaatgttctggggaagctcttagagtcattgttcacaacggcgacaagtgccacagcaaccaccacagaccaagcgattgctgccgaacttaaggcagctgtctcaaacatcgaaaaaagcatgcatgaaggcttcaacgagaagctcaccgcattactgcctaagatcaagagctttgggtatccaggcctcaatgacccggacttgcggactgagacagcactgaatgttgtcagcctcctcagcgagcacacgaaggtattttacacgggtgcacatggggtccaccttcccgagggatacaatggacttggtgctcgaaatctgatctacattcttctccaacttttgagcttccataaaagtttccgcgtcaactcgatctttccggcagtgcatcttattttcatcgaggaacctgaagcccatttgcatccacagatgcaggaggtctttatcaaacaacttaatgcagcggtacaggtattttcggctgaatatccagatcaagaatggccagtgcagtttgtcgttacgacgcactcgtcgcacgtcgcgaacgccgccccatttgatgcagtgcgctatttcctcgctaagaccgtcaacgacggagaaacacggcatacaataatcaaagacttcagaaaaggaactgacaatattaaagagccagatcggaggttcctacatcgctatatgaccttgacgaaatgtgacttgttcttcgccgacaaagccatcctgattgagggtccaacagagcgactcttgatgcctcgtatttttcagattattgacgaagcgttagatgatccaaaaaagctctcgcatcaatatgtatcgacagtagaagtagacggagcgaacgcgaagatcttctctccactgctcgactttcttgagctgaggacgctggtcattaccgaccttgactccgtaaaaatgggtgacaagggccgctatgtgaagtgtccttactcacagggcgagcggtcattgaataccactcttcgtgattggttcaagatcaatgacggtgaggcactcaccttggactttctgaaagcgaagacaccagaagagaagattaaaggctatcaacgagtcgcttaccagattcacgaagccgaatcgaacttctgcgcgcgcacatatgaagacgcgttcattctcgcgaatcccgcgctattcgcgctgaaggaaggcgacgactggggtgacctttctttcaaacttgcctcagatatgggcaaggtcgagaccgcattgaagtacggtctttccgaggacgcatggaaggttcccgcatacatcaacgaaggccttctttggttagcggattcgacgccgctgccgcttccatctgtcgccctcccgcagatggaggcctga

SEQ ID NO: 79711 - DNA, 1740 bp, Xanthomonas translucens pv. translucens
gtggcccttgaaaagctaagtcccgcggctgaagccgctcagaaagcgcagcagcatgtcaatcaatgcattgaccaccatcagtgcttccgcctcgaagccggcgcaggagcgggcaagacctattcccttgtccaagcccttaatcggctcatctctgagcgtggatcggcttatttgcgtcgcggccagaaggtcgcgtgcattacttacacaaatggcgcaaagagcgaaatttctcaaaagattgacgagcatccggttgttctagttgaaacaatccattccttttgctggggatgcatagctcagttccagtcaattctcagaaacgaagttgggcagatccaaagacacgctgagaagatcgcggaagcgggaggcgtcggcaaccgaaatattgagtatgaccttgggtatttcgggatacatgatgacaggataaccctctatcatgacgatataccagagttaatggcgcgatttttagcaatgccgaagttccagcagatttttactggctcttatccggtggtactcattgatgaataccaagacacgaatgaaaagttcatgagtgctttggcgactcactttctagaacctaagaaggggccactgatcggtctgttcggcgatcactggcaaaccatttaccgcgacgattttgatctagctgcactgccaaacgtcgagggaatcgacaagggctcgaatttccgctccgtgcctgctgtggtggatatgctcaaccgccttcggccggctttgcctcaagtcgttgatgacgagacagcgacgggtgaggcacgcgcgtttcatgctaacagctacacgggggagcgaactgacaccgcacactcgaaattggatacgccgccagatatcacacgcgcctatgtcgccgcgcttcgcaaacaacttcaggatgagggctgggacctctcccctggtgtcacgaaagttttgatgctaacgcacgcagcccttgccgctgagcaaggctatccctcagtcgcagagatcttcaagtctcaccaagacgccatctccaaacttgatgatgcgaccttagagtttcttggaagagttatagaacctgcatgtgcagcgtataaggcgaagaagtacgggctgatgttcgacgtgctgggccaagcgaccacactaaggaagcactcagaaaagctcgcctgggcagatgacatgatgtctctcgatgccttgcgtgagaatggcactgtgggcgaggtgctagatctcctcaaaaagacccgccggcctcgtttgcctgacaatgtgatccgtcgcgaggaagacatggcagcgtttgatcctgccgcggaggaacccgagaagcgttctgttgaccgccatcgacgcctgcgcgaagtaaagtatcaggagatcgttaacctcgtgcggtttgtcgatggcttcacgccatttgcaactcagcatagtgtcaagggcgcagagtttgagaacgtcctcgtcgtttgtggtggcggttggaaccagtacaactggccgcgcatgcttgaatacatggatgctggcgccaagccgacagccgcgcatcagaaaggcttcaaccgcgccagaaacctcttctacgtcggtgtctctcggccaaagcgccggctagcagtgctttttacacagactatgaacgacaagtcgttagcggtactcaacacgttgttcgccaataaggtggccgaagttaatctaccctag

SEQ ID NO: 79712 - DNA, 1953 bp, Pseudomonas aeruginosa; identical to SEQ ID NO: 74520

SEQ ID NO: 79713 - DNA, 1668 bp, Pseudomonas aeruginosa; identical to SEQ ID NO: 74521

SEQ ID NO: 79714 - DNA, 2298 bp, Enterobacter hormaechei subsp. oharae
atgcggataaaacacatagaaatcgctaactttcgcaaattgaaagcagttcatatagatttttcagagaaaacaactattttcgtcggagccaacaacagcgggaaaacatccgctatgattgcacttcgtcgatttctggttgaacgctctggtttctccatcaatgacctcaccctatcttattggccacaaattgatgcagcagctatgcaatgggaagcagcccctgatgaccaagagccgattcagtgggatcgcttctcaccattcctggatgtatggctcgacgttcctccaaatgaacttcatcacgtacaaaagattttgcccacgctggattgggatggggaaagcataggtgtgcgcctccgttttgaacccaaggaccctgacgcactgcaacacgaatatctcacggcaaaacgcgcagccgccgaagttatggcccaagctaaagagtacggtgaacaagtaagctccacaaccgcatttgcactttggccgcgttcgatgatggagtttttagcccaaagaatgcgctctactttcgagatccgtgcttatttgcttgatccttcaaaactgaaaatgccggaagaaggtagagcctcccctcaaacactcccagaaagcagtgaccctatcgatggcggggatccgtttaatggtcttattcgtatcgacgagattagcgcacagcgtggatttgggcacagcgatcaaacagggtatacgcggggtaacgaatcacgtgaggatatggctgaacccagaatggggaaaaaactttccagccagctgcgcaactactatagccaacacttggatcctttcgatacgccggaacccaaagaccttcaggcgttgatggcattgcatgaagcacaaacggctttcggcacgcgtttagcagattgcttctcagatgccttgaccgaactggaaaatattggctatcccggcgttaccgaccccaagctgacaataaccaccaacatcaggcctatcgatgggcttaatcatccgtccgccgtgcaatacgaagtgccaacccatgttaccggttcttttggcgcacatcgccttcccgaagattcgaacggacttggttaccaaaatctcgtctccatcgtcttcgcactcatggcatttcgtgataactggatgaaagtcggaaaggctggaaaatcaaaggtggcggaagaaactctcattccaccgcttcatctagttttgattgaagaacctgaagcgcatttacatgcacaagttcagcaagtttttattaagcaagcctacggtgttctgcgaaaacatgacaagctaaaggattcttcacgccttcaaactcaactgatcatcagtacccactccagccaccttacccatgaagctgagttttcgtctttgcgttactttcggcggctaccagcactcgcacaaagcggtgctgtacccttgacttccgttatcaatctttcggaagtcttcgatggcaaagacaaaaccgaacgtttcgtgaaacgatatttgaaagctacccactgcgatctcttcttcgccgatggagcgatactcgtggaaggtccggctgagcgtattctcgttccccattttgttcgtgagcgtgaagcctatgcttacttaaagcgtagctatatcacatggcttgaaataggcgggagccatgcacaccgattgaagaatttgattgaacatctgggtctcaataccctgatcatcacagacattgacgccaaagacggcaccaccattgctgcggttgtcccgaaacgaggcatgggccaacgagcccgcaatgagacagtgaaaacgtggctacctaaggaagaatctttcgatgcactcctcgacatggaaagtgagcgcaaagtgcttgccgaaccaggcggctatgccatccgggtggcgtatcaaacacctattttcatgccattcaagtctgaagaagcgcttgaagcagtagccaacactttcgaagatgccctcgtgtatgaaaatccggggctattcgccaacctggacggttatgggctcatcgcaaagtttcgtgaagcgctaaaggagtccgccgatctcagcgaattggcaagaaagatatttgaggcactgaaaaatgggacaaaggccgaatttgctctcgatgtcctttttagtgaggaaatcgagcggctgaaggtcccacagtacattgacgaggggttagtctggctagcagaacagctgaaacgtaaagaatatgatgttcttggaaaaacggaggtgggagagtga

SEQ ID NO: 79715 - DNA, 1833 bp, Enterobacter hormaechei subsp. oharae
atgccggctgatgcggaaatcagaaaatgtcttgacctcgacaccccaaaaagtttcttcctttttgccggcgccggttcaggaaagacaagatcgctggtatccgctctccagtatgtgcgcgacacattcggggatgaacttcggctgaaaggacaacgagtcgctgtcatcacttataccaatgcggcgagcgaagaaattcaacgccgcctggattttgatccgactatagacgtttcgactatacatagcttcgcctggtcgctgatagaagggcttaaccgtgatatccgtgaatggcttcgcgcgaaaataaccaccgatatcacaaagcttgaagcagaagaagcaaaagggagaaaaggtacggaggcatcaagaacccgcttaaaaaaaatcgcctcgagaaccaaacgccttcaaaacctcgataacgtcaaacgttttgtttacagcccaaccggagaaaatctcggccgcgattcgctgaatcatgcggaggtgattcatctcaccgcctattttttaacaacaaaaccgaccatgcagaacatcttgatcggccgtaatcccattctgcttatcgatgagagtcaggataccaataaatttctgatagaagccttatttgccgttcaggctcaacataaagagacattcgttctcggtctgattggcgacatgatgcagcgtatttatagcgatggtaaagacggactagataaaaatctgcctgccgactgggcaacccccggaaaacagatgaatcaccgttgcccaaaacgcatcgtaaaattaattaacaccgtacgtagcgcagtggacaaacagatacaacggccacgaaccaacagccttgaaggcagtgtgaggcttttcgtgcttcctaatcataccgttgataaacctgctgccgagcgaaaaattgcgatgtatatggccgaggttgccgatgatgaacaatggcggaatttggcgctctgcaaatgcctcacattggaacatcacatggccgccagtcggttaggctttttagagctgtttgcccctttgtatagcgtgaaaagttggcgaaccaatcttattgatggctctttaccctgcgttcgattctttactgatgagatgctgccattaattcaggcaaagtttgccgaagaccgtttttccatagccagaattctaaaaaaacgatcgtcgctagtcagcccagatgccttgcaatacgcagcagatcaacgctcgcaactgaagttagcatcggcagcaatggaacgccttatggcattgttcgcacagggttctgatccttcgcttggcgatgtccttcgcttcgtagcggatagcgcgctcttgcctattcctgaatctctgcagctctgtatagcaagcgataatacgctacctagcgtaacaccgtatgtcgatgaaagtgatgccgaccaccagagtgagcgtacaatggcgataggcgagtttttacttgcccctttctctcaggtcgaaaaatttgcatcctacgtatctggaaaagcgcctttcgatactcaccaaggtgtgaaaggactcgaattcgaacgtgtgatggtcattatggacgatgaagaagcccggggttttatgttcaaatatgagaaccttttcggggcaaaaagcgttaccgatccctcggttgaagcagttcgccgactgttctatgttacctgcagcagggcgcagcaaagcctggccctcgtagcctatgcagcgtcaccggaacaagttcgccgattcgtgatggaccaaggctggtttaatgctgatgaaattgtcatcggaatacctgagtaa

SEQ ID NO: 79716 - DNA, 2397 bp, Enterobacter hormaechei subsp. oharae; identical to SEQ ID NO: 75404

SEQ ID NO: 79717 - DNA, 1869 bp, Enterobacter hormaechei subsp. oharae; identical to SEQ ID NO: 75013

SEQ ID NO: 79718 - DNA, 1776 bp, Enterobacter hormaechei subsp. steigerwaltii
atgtcaattcttataagttctgttaggatttcaggttttagaggtataaaggaaattgaggttgagctaggacgtattgccgttttgttaggtacaaacaatgcggggaaaacatccttcctaaaatcgttgcaactagctttaggtgattaccaacgttactttagtgatgaagatcttcatatagatagttctgggttaaaagttaatgaagttatcgttgacttaaaaataatacctacggatgaacattataataaaacagaagagtttgacgaaaaatggattgatgttttcggtgataatattgcagtagatgcaaatggacatgagtttgtggctattcgtacaaaagttcagccagatgagataaaaggtgggtttaatacacaacgttattatttgaatgaatggggggagtttgagggatggaaagagattgttgtcaacgagagaagaaaggtaagaacaaaagttgatgcaatcccctatatttgtattgaggctcagagggatatacatcatgagcttaaagataaaagctcatatatagggaaggtcttatcatatattaaatatgaagatgaagatgttactgcacttgaagaaatgataagttcaataaatgaaaccgcagtgagtagaagtgagccgcttcaaagcttaaaaaattcacttcaagggttaaaccaatcatttctaggatcaagccacacagaaataactcctttccctaaaaaaatccgagatctatcaaagcaatttacagtacatttcggagatgaagaaaaccattcattttcaatggaatatcatggcactgggacgagaagttgggcttcaatgcttacagttcaatcgtttttaagctttatgcatgaacggcatgagctcgaaaataaggcgctacatccaattgttggagctgaagagccagaagcgcatctacatcccaatgcacaaagaaccttgtttaaacagttatcatcatctcagggacaaattatactaagtactcattcaccatacctgagcgcaatggctgagatagaagatataagatcattcataaagaaaggtgatggagtaacagtaaattgtctgaagaaaagaattgaacatgatgaaaaaaatgcattaaaaagggagataatgttaacccgtggtgagttgcttttctctcgagccttaattttatgtgagggtgttacagaagaacaattaataccatccatgtttgaattgtatttcggtaggacgatgttcagtgttggagttaactgtgtaagtgtcagtggtaaaaattatccaccattcattaaacttgcaagtaatttaggtatccctgtctgtattattagtgataatgatggtgatactcatggtgagataaaccgtcaggtagcacgtttagttcgtgaagatggcctcgtattgaatcctgattgtttctccttagagttcctcaaagaaacaaatgatattgaagctgagttatacaacgagttgaatattcgtgaagaaataattgaatcattagtgttaagtgaaaccaaagctagtcctaatgaacggtatcgagatgccaagaaaagagaaatagaggctttacaagatggtgctataattgaaaaaatgcgtgactcaaaagctagttatgcagggtatttaggggtgattctagcacagaatgcaaatggaaagagaattgaggagttacttccggaatctgttattattgcatttaataaagttaggggatggcttgagctatga

SEQ ID NO: 79719 - DNA, 1899 bp, Enterobacter hormaechei subsp. steigerwaltii
atgattgataatttatcacaatctcaaattgaagttgttaaagctcctatgggaggggctatacaagttcttgcatctgcagggtctggtaaaacaagagtgcttactgagagggttaggttcattctcaataactctgctagaggaagtgtggttgctttaacattcacaaataaagcagcagatgaaatgcttgaaaggttagatgatggctcagaaaatcgtgataggatttggattgctacgattcattctgttgcacaaagggtactcgaaagttatgggtatactattgggttaccaaaagaattacatatatttgaacgtgaccaagatcggatggaggttttcctacattccttaagagaacagggggttaatattgatgaatacttagatgttgaggacgttagagaaaagcgcaatcgtgaaaaaattataagtcaatatcttaatgtgttctctatgattaaaagagagcttttaactgaagatgaagtaaagataaaattcagttccaatccgcgtatttggaatatttatcaagattatcagtctgctttattggaaagtggtggtgtggattttgatgatatacttttatatgcacataaaatcctattaaatcaagattcggtagcaagaatatatcaaaaaaaatacgttgctttatttgttgatgaagcacaagacttaaacagagctcagtacgaatttataaaggttctctgcggtgataaaataaaagatgtcatgatggttggtgatagtgaccagatgatctatggttttaatggttcatcatcagattattttattaaatcattcgtgaaagattttactcctaaaacttattatttaaacgagaactatagatcttcgaaagcagtaattgaattagctaataaattaaaaccaaatagccaagttggtgttaatgctgctcttgatggctataaatcttttaatgctttaccagatgaagaatctgaagctatatgggtttgtgatagcattcaacatatactggatttaaaaagacatccagaaattgagggcgatattgattgctctaaaattgttgttataggtagaaatagatttgtttttaaggctatggaaagtgagcttaaaaaaagaaatataccttatttcctaaagcgtagtgatagaaatgaatcgcctgtttctcttattgggaaaatagtcgatcttgctataagggttaaggttaatccaaaggattgggttgatgggaagagattatataaactaatcggtttggaattaaatccagaatcagatgttacctacgatattagcaaagtctatgctgacataaaaaaatcatctaacctaaataaagatttaattagcttggttttagcacatattgaacatatatctgtagacacacctaatattttgaagttctgtttagatattaaatcagaactggtgaatttaggagcaaataccaaagattctgctaaagaagatgatattgccacagggattaaagatatagagcagcttcaatccatgtggacacgattcaaacgtaaaggcctcggtgataatctatcctcatttaggaatgcacttgctttgggtcagcttaatgatgataccttaaataatgggattatgttaagtactgttcatacaatgaaaggacttgaaaaagatatagttttccttatcggtatgtgtgagggggtttttccagattatcgagctaagagcaaagtcgagctagatgaagaaagaaataatgctttcgtagctataacacgatctcggcgttggatttttgttacttatccagaaaaaagaatgatgccttggggggattataaatatcatcctgcatcaagattcttcctcgatatgcagtaa

SEQ ID NO: 79720 - DNA, 2190 bp, Enterococcus faecium; identical to SEQ ID NO: 71696

SEQ ID NO: 79721 - DNA, 1794 bp, Enterococcus faecium; identical to SEQ ID NO: 71697

SEQ ID NO: 79722 - DNA, 1872 bp, Pseudomonas aeruginosa; identical to SEQ ID NO: 74442

SEQ ID NO: 79723 - DNA, 1656 bp, Pseudomonas aeruginosa; identical to SEQ ID NO: 79449

SEQ ID NO: 79724 - DNA, 1905 bp, Pseudomonas putida; identical to SEQ ID NO: 72778

SEQ ID NO: 79725 - DNA, 1677 bp, Pseudomonas putida; identical to SEQ ID NO: 71997

SEQ ID NO: 79726 - DNA, 1698 bp, Vibrio cholerae; identical to SEQ ID NO: 71760

SEQ ID NO: 79727 - DNA, 1377 bp, Vibrio cholerae; identical to SEQ ID NO: 71761

SEQ ID NO: 79728 - DNA, 1707 bp, Vibrio albensis
atgatttggctgtcggtaaattttgatgttttcataaagaatctcctgcgtttatggtacgagaaaattctacttttgacgtcagttaatttatggggtgattaccgagtcgatacaattgaagctcagagagggtttactgacccccattcagattcaggaaagactgttagtagtctgtcctcacaactcaacgagtattataagcgccatttaaatccgtctgagatgccagaagctgaagacttaggtgcgttagaggcaattgaaaacgcgcaaactgaattcgacaaacggttagataccgcttttgagaaaaccttgggagagattaaagagctagggtatccaggttttaccgatcctgatataaaactatcgagtcgattgaacccaatcgatactttagagcatgatgccgcagttgttttcgatgtcagaaagcagaactttggagacaatacattttctcttccagagcaatacaacggtttgggatacaaaaatttaatccatattatttttcagttgatcactttccgtgatcgttggcttcgagttgggaaaatagggaaaaagaggtcgaacgaagatattgctattgaaccaattcatctggttttggttgaagaaccagaggctcacctacatgcccaagtgcaacaagtttttgtacgtaaggcttacaaagttctcagagagtatggtcaggtgaaagagcaccttactacacagatggttattagtacccactctagttatgttgcttacgaagctggatttgaaacccttcgatatttcaaaagaaagccggcatctcaagaacaaccaacacctcaggctgaagtggtgaatctttcgactgtgttttcttcgcagacaaaaggaaaatctgatatgtcagccacgaacaagtttgtatcaaggtacttaaaaacaacgcattgtgatttattttttgcaaacgggattattctagttgaaggagctgcggagcgtatgctacttccacattttattgcccatcatcacaagaatttgcggcgaagttatatttctatattggaaattggtggtgctcatgcacaaagattgaaacctctcattgagctattaggtctaccaacactagtaattacagatactgatgcttgtagttcttcagggaataaagcacgtccgaaaagaggagcatctttatattttggtagcgagacactaaaaagttggtttaacttcagcgatgtaagtttggatgagttgcttgacttaccttctgaacgtaaagttcgagataatgtacgcgtatccttccaatgtggtattcatacaaagttctcgccaaaagcgagaaaatcaaaagaagttataccttatacatttgaagatgcagtagcactaacaaatatagagttatttaagaaattaagtaaatcatctggaatggtaaagaaaatgcatctagcgacaaaaatgcgaactctggatgcttgctgcaacgctatgtacaaagctctcgatggagagaaagcaaaaatggcattagacctacttttcgatgttgagccagaaaaactcttggtacctgaatacataaaagaaggtttggagtggttagagagtgaattagacactatgagtttagagtatgcatgggctccagaggcaaatacttctgaagacgtgaaggagtttgtggatgcgtga

SEQ ID NO: 79729 - DNA, 1857 bp, Vibrio albensis
atgcgtgattttaattgtttaaccggagtagatcgtgaaatctacgagtatctaaatcttgataatcctaggagttttcttttatttgcgggagcaggttcaggtaaaactaggtctttagtgaacgtgctacaagagatacgtgaaaaaaacttagcgcgcttgatccaaagtggtcagcgaataggtgtaatcacttatactaatgcagcttgtgacgaaatacagcatcgtttgtcttatgaccctctgtttcacgtatctactattcatagctttgtttgggagttgatcgagccattcactgaagatatcaaggggtggctaaagacaaaacttagtgccgatatcgatgatctagacttaatgatctcgaaagcgagagatatcaacggtaagaccactcaacaaaatatcaggaaaaaagaatctaaatctaaaaggttaaatgaactaactttggttaggaagttttcatattcaccaacaagcaataaagttgaaagaggcactgtttctcatgaggaagtgatacagataacagcgactttactaaacgaaagccatttactacaaaatatactaacgaatagatatccaatacttctaattgatgagagtcaggatactagaaaagagttaatggaggctttaattagaacacaaagcctgaaccgctcaaagttctctcttggattgtttggtgacctcatgcaaagaatctatagtggagggaaagatgatttagaaactgctcttcctgaagactggaagacaccatctaaaatagttaactatcgttcaccaaaaagaatcgtttcactaataaatagcattcgcaatgaagatgatggcaaaaaacaagaacctaaagctgaagccatacaaggaagagtcaggttgtttattgtcgattctgttagtgcaaataaatttgaggtggaggacaatgttagatacagaatgtcatcaattgcagatgatgcgctctggctggagccaaatcaaacaaaagttcttactctagagcatgcaatggctgcgaaccgaggtaacttcgacaagttctatatgccattatcgaaagtagatcatcttagggactcaatgttgaatggcactaactcttcacttagattcctttgcaatcaactcctaccgttgatctacgcagttaagacaagaaatgactttttgatagctagtattataaaaaaatattctgacgttattagtcctaacaatgttcagttttgtacagatccgatatcaacattaaaagaaacaaacgattcagttagtcgtgtcgcagctatggtagttgatggagatccttctattagcgaagtcttaaaattggtggataaaagcagtctactttacattcccgatgcactaaaagtacttcttgttgatgtcgatagagagtcaattgaaaatgaaatagagcctagtgaaacttcatttgcttgggaagtcgctttaaatgcccctttgagccatttgaataactattcttcatatattaatgagaagctggggttcggaacccatcagggtgttaaaggcttggaatttgatcgtgttttagcaattatggatgacgatgactctaatggctttttgtttaaatatgaaaagttgtttggagctagggcattaagtagcacagacattaagaaccaagccgaaggccgagactgcgtggtatcaagaacaagaaggcttttttacgttatatgtagcagggctcaaaaaagtttggctgtagttgcatacacgcaagacccagaagctgtgaggaataagagtttagcatctggttggtttaccgaagacgaaattgaaatgatgtag

SEQ ID NO: 79730 - DNA, 1992 bp, Vibrio albensis; identical to SEQ ID NO: 72204

SEQ ID NO: 79731 - DNA, 1758 bp, Vibrio albensis
atgacaacactgagcccagcagcgcaggcatcagtggagacgctagaaagcttgcgaagttgtattgaacaagggcaatgtttcagattggaagctggggctggagcaggtaaaacatattcgttaattgagtcgctcaagtatgtaatctctttacgagcgaatgagtttgccatctcaggaaaacaggttgcatccatcacttacacaaacgtcgcgaaagacgagatcaaggctagaaccgataataatccagtcatttttgcggatacgattcatgcgttcagttggagtattttgcaaaactaccaggagcagttgagacaacttattcctacgcttggagcaaagtggcaagagagaattgcagaatcggcagggattagtcatcaaacggttaagtacgatttaggttttgcgtcgattaaagaacaagaaatttctctccatcatgacgacgttgtcgcgttaatggctcgcatgttggcgtttcccaaattccaaaaattactgaaaagcaaattcccaattatctttattgatgaatatcaagacacagatagcgcacttgccgagagtatcgtgcaaaacctgattgataatgactctggagttatggttggtctttttggcgatcactggcaaaaaatatacggctcgtctgcttgtgggttgattaggagtcctgcagggaaaatcatcgagattggcaaacgagccaattttcgttctgataaaaatattgttgaatgtctgaatcgcatgcgtccggaattacctcaagctgaatcagaccccagctccacgggaactataaaggtctaccactcaaatgattggcaaggtatgcggcaggcaggtggacattggaaagacgatcttcctgaggaagaaactagacgatttatccagcaaaccaaatcattaatggttgaacatggttgggatatgtcgttatctaaaaccaaaatactgttcttgacgaataacctgatagctaccgaacaaaaatttaagaatttggcggattgcttcaattattcagaagactatctgaaaaaaaatgacaaatacattgagttctttgttgatactgttgagttaacggcgcttgctttccagcaacgtaagtatggtgaattgcttcagattaaaaagaaaaaccgctcctacttaacgtcgcaagctgataaaactgcttggattgagaatttagagaagttaatgcgacttagagacacatctacaatcggtgatgttttagaccttttgataactacaaatgtgccaagagtacctgcaaaagtctcggattctgaagcccgctatcaaacactatctgtccgcgaccaagagtcattggcgccagatgaattgagatttgtcgagaaaatccggcgtcttcgcgctgtgccgtactttgaagtcataaatttggccgagtacatcaatgataaaacaccgttttcaaccaagcatggggtaaaaggtgccgagtttgataatgtgctagtagtttgtggccgtggttggaatcactacaactgggaccaaatgctcgaatggatggaagacggtgttccgcaaagaaatgccgaaacttttgaacgaaatagaaacttgttttatgtcagctgttcaagggcgaaacataatctaacccttctttttacgcagcgcctaactgataaatcacttactgcccttggtaaaatctttgggcatgaaaatatcaaaggctgtccatttaaggtttga

SEQ ID NO: 79732 - DNA, 1785 bp, Enterobacter hormaechei subsp. oharae
atgtatctgtctaatttaaggatagccaacttccgaaatttcgagacggtagatattcccctgaatggtaacattgttttgctgggtgaaaacagagtaggtaagagcaacctgctgttcgctatccgccttgtgattgatccaacattacctgattcagccagacagctaaaactatcagatttctgggatggttgcgatttatccacttcccctcaaattgaaatacatcttgagttcgctgatttcgacagcgacgcttcactctcagcgctgctaaccgattttcgcatagcagaaaacccagccttggcgagactcagctatgtctttcgaaagaaggaagatattgcaggagaacccaagtcaagtgaggattgtgaatttatcgtgtttggcggtggtcaggaacaacgcaccatccccagtcgcgttcgtcgccggatagccatcgatatgctagatgccttacgagacgctgaagcgcaactcgcatcatggcgtaactctccgttacgtcctttacttgaagatgcgttcggttcgctaagtcgagcagatctggacagggttgccagcgctcttgaatcagcaacgggtacaatggaggcattcactcctattaagaatcttgaggaatctctgcgtggtggcatccttaatcttgccggtactgctcacgatcttaatgcgcgtcttcgttttgcaccaactgatccgctcagattaatgcgctcaatatcaatgttcatcgatgacggaaaaagaggaatcactgaagcaagcctcggctctgctaatgtggcattaatttctcttaaactggctgagtttgcctggcgccgcgccaagaacgaacgaaatttctcacttctttgtattgaagaacctgaagcacacctgcaccctcaacttcaacgggctgtttttgataagctctttaataatgccgataaggcgcagtcactgattgtaacgagccattccccaactctggcaagcattgctccgcttcgttcagttgtacgcctctgtagagatgatagtgggcgcactcacgccttttccttggctgaacttcctgtaacaactgatgaactcgatgatattgagcggtacctcactgcaaccagagcggaattactttttgccaaaggagttatatttgtggaaggtgatgctgaagaggttttaattccgggatttgctgaagccatgggactcaaccttgacgagcttggtatcactgtatgtagtgttgcaggagtgaattttgaaccttacgttaagcttgcaggaagtttgggtattcgcatggctgttataactgattgggacccacttgatggaagcaaacaacctttgggaaaagcacgagccattagtatctgggatgcattctgtgctgtccgtccagaaagccacaagcttagtgctgaatggaaggcttggtttgtggataaaggttttgaggagtgtagcgacgtatggaaaaaagtaggtatatttcttagtccacaaacatttgaagtttctgtagcaaataccccgatcctgaaagacgcgctacttaatattctcgatgcacagggttttggatcacttagatcctcaagaattgcctcttggcgagccgggcaggatcctgaccctgggcaactccttgcaatgatatctgatattggtaaaggtcggatggcggcaaaactcaagaaaaaagccatcggtttagcaccaccggaatacattgcagcagcaattcagtatgtggtgtccaatgtctga

SEQ ID NO: 79733 - DNA, 1782 bp, Enterobacter hormaechei subsp. oharae
atgtctgatcggcacgcactgtcaatggcgttaagtgagctctcatcgaataaagagcagtatggcgctgccaccgagcaaggacactgcgttgtcattgccggacccggtagtggtaagacaaaaacgctcacgaccgccatggcgcgagccctgatggatgatattactgaccctcgaggcgttgcctgcattaccttcaataatgagtgtgcagctgaacttgaagaacgtctggcttgctttagcgttgcctgcagcgaacgaaactttattggcactgtgcacagctttgcattaaaccaagttttaataccctattcgcgctgtatacctggtttgctacctaatgactttcgagtggcgacacgagacgagtgccgtgccgcagttgaggctgcttatctagcaaaatttggcgcaatcggggaccctcatacccggtggaaatttgcagaagaaaagcggcgtcgggacgttaaccgacagttaccatcgtggcggagtaacaatccggagcttgcagatttcatcgaattatatgaagcacatcttaggcgtttaggtcttattgactttgatgatatgccgctcatcgccttccgtatgatcagagagcatgactggatccgtaatggtattcggtctcgctatcccgtcttattcgtagacgaatatcaggatctgggacatgcccttcatgaactagtgttactgctgtgctttgatgccggaatacggctttttgcggtaggtgatgctgaccaatccatttatggattcaatggtgcaaatccacgattgttggatagcctcgtttcacgtgctgatgtgaaaacgttccgtcttcgcttcaactatcggtctggcgctaaaatcattagggcatcaatgggggcactgggagaagagcgtaattatcgtggaccagatggaacggcagaaggagaaataggatttcacggagtagaaggcgattatgaaaaacaggcacgttatatcgctcaggatttaatcccctccctgacagaacggggatttaaacctgagcgcatcggagtactttaccgggcagcttggctcggagataaagttgcggatgcgcttaaagccgagggcatcgcactcatgcgtactgacaccaatgcattaataaaacgcaattcacgccttgcccgcttcatcgaggcctgcagccagtgggtaacagggggatggaaagaagcgtcccctgcctttaatttgctgctgggtcaggcactttctttagtctatggccgccgtgcaagccgtactgaagaacaactgctcaccgtacaactcatcacatttttacgaagcggaattgctcaggctgaaactgctcatcaatggcttttgcgattcgacaaagaacttatttccggctggcagataatcacggagaatccccaggttgagtggaatgttgttaaagagctactgaaacgaaccgatcctgcattaaagcaagatatggctctgatcgtatttgccggaaaggaagaaagtaccagacgaattacactgagcactctacatagtgcaaaaggccgagaatttgatgtcgccattatgtttggcgttaacaagtatgattttccgggtaaacgcgaccttgtttcagacaatgcattacgcgaggcacggcggttgttttatgtcggcgttacacgaccacgcaaagagttgcacatggtttatagaaaaggtgaacattccccttggattgcggaactctatcatcgcagccagcagacttag

SEQ ID NO: 79734 - DNA, 2139 bp, Enterobacter cloacae; identical to SEQ ID NO: 74086

SEQ ID NO: 79735 - DNA, 1785 bp, Enterobacter cloacae; identical to SEQ ID NO: 74087

SEQ ID NO: 79736 - DNA, 2313 bp, Enterobacter aerogenes; identical to SEQ ID NO: 74078

SEQ ID NO: 79737 - DNA, 1950 bp, Enterobacter aerogenes; identical to SEQ ID NO: 75791

SEQ ID NO: 79738 - DNA, 2136 bp, Enterobacter hormaechei subsp. steigerwaltii
atgctaagggcccaatcgattactatgtatatcaataaattagctattagaaactataaaaactttcgaagctcaaatttctactttgttaaaggctcagtgaatacaattatcggtgaaaatgcttcgggaaaaacaaatttatttaatgcgatgagattaattctagatgattctctcccaatgaattctaggattctatctaatgaggacttctaccgtggattatccgaaccctttggtcattggatcataattacgctatattttgatgatttaagtgagtcggaggaggaacaggtccttgccaactatacagtaaatgatggtaatgataagtctataaaggaaggtaattatacttttatatatcgacctaaatttcatattcgacaaaagctgtatgagttaacattagaagatgacaatgtggaagcaagatccgcttcttttactgaatttgcatctaaccatattatttctaaagaaacatatgaagcagtagcttttgttagaacaaaggttgatttgaataatgacgaaatttataaacaagtagttggtgattttgatagttactccttttcaaatcctaatgatgatgatgctactgtattaggggttaagaagccaccttactttgccttaggcagcgaagtcgcttgcacttatgtcaaagcacttaggaatgtagttgcagatcttaaatattataaaacgaatccattgtataaattacttactttaaaaagtaaacaaattgatgatagaagagatattgtagaaaatgttaaagagatcaatggtaaaatttcagctatacctgaaattgagagattgagtaataagatatctgcttcattacttaatacagtaggctcgacttattcccctaaaatattagtatcctcacaacttccagaagatttcacagaattaattcaatcacttggcttagtggttgaagattctctggattacaatggctcaggaaagattgatgatctgagtcttggtggagcaaacttaatttatcttgctttaaagttatatgaatacgaagaaataagggatagtgaagagcatattactcacttcttgttaattgaagagcccgaagcacatattcataatcatatccaaaaaacccttttcgataacttcaattttaaaaatacgcaagtgtttgtttctacacattcaacacaaattagctctgtatcaaaaatatcatcaatgaatatattatcacgccaaaatggattcactgatgtatatcatccatcgtttggtttgacgccgaaagaaatttcttccgtagagcgatatcttgatgcaattcgtagtgaccttttgtttgctaaaagtgtcattctggtagaaggcgatgcagaacttattttaataccagcaatggtaaaagaaacgttaggaattagtttagatgagttgggtataagtcttatcaaagtagatggcactgtttttaaacatatttctaatcttttccatgaaaaacggttgaaaagaaaatgtgcaattctcacggatcttgattcggcctatgtaaaagtagctgataatatttttgatgcggattttgtcgaatctctggtagatgccgaagatgatggattacgaagaaaagaagagttagataaatatattgaaggtaatgagtttataactgttcattacgcagaaaatactttcgaaactgagcttgttcgctacgatgaaaacaataacttgtttatagaagttatgaaaaccgagtataaaaaagaagcgtattttaaaaaggctgaatcagacataaattcatctgatctcagagttcggtataaaagagtattaaagtttgcaaagaaaatagggaagggatggttagctactgaaatggtagaacatcttagtgttgataatcgtgttcctgattatattttacaggccattcaatttgttcttcgggatagaaatgttgagcctatatatcaaaaaatgcttgactacaatatgtctttaatgggggttaaagcatttgactgtataaatgccgaaaaagatttttctagtaaaatgatagaatataagaaacacttcaatgacagttttgtaagattgttggagttatag

SEQ ID NO: 79739 - DNA, 1752 bp, Enterobacter hormaechei subsp. steigerwaltii
atgccatatagaaatttaacttctgagcaaatggatgccgttaaattcaacgggaatttattattaacggcatgtccagggtcgggtaaaacaaaaacgttggtttctaaactttgtttcattttagaaaataaagaactattttgtattggtaaaaagaagataattgctcttacatatacaaatatagcagccgatacgattcttgaacggattatgtcattcggcataagtagtgaatctttatggattggaacaatacacagtttttgtttgaattggattataaaacctaatgtagataagataccaagactttgccgaggatttagtgtaattgatgaacatgaaaaggaatttctcataaatgaattaaaagaaaaacatggcctatctgcaaatgataaagtttttactaatttagattttaaccttggtcagttttattcccgtgggaccaaagaacatttgattgtaaaagaatatcataatcatttgtatgagaaaaaattaatcgattttgatttgatattaaatctgacttgtcgagtgttgacaaaatacaatgcactttgtgaaagattgtctttacttttaaggtgtattttagtcgatgaatatcaagatacatctcttatacaatatgagatactcagacaaattgtattaaagaaaaatacaatgattacttttattggggataaagagcaagctatatacactggtttgggggctgtcgtaaagaatagagatgaattaattaattgtttccaacttgataatctaaccgagatgaaattaacggggtgtttccgtagtagccaatctattgttgatttttatagtaaatacaaagacgaagattatgagattaattcactttcagataataaggatttcaactcagtaatttttaaagaaagcgaggtagatgtttctcaactgccgatttatgtatcaggtattattagaactcatttggctcagggagtacttccaaatgaaattgctattctgtgtcctggttggtttgatgtgataaaactttcaaatgatattgttactcttaatccggatatagaaattgatggagtcatgatctctcctatacctaaaaacaatgagaatctttggcttgctttagttaaactatttttaattaggagagttccctctaattttaatactagacagaagctattgcgggatttccttcaagaattaaatgttgttgcaccctatactgaatcgttgtctcctaaaaaaatattaaagattattaataaaatatcattatctgtggattataattgtgaaattgatgtttggttgagacaggttataacgagattttgccattctattaatttgggcataagtaatgatagctactattatcaagaaatggaacttttgattaatgccacattgaaaagaatgttaaagtataatatggcttataaagcaaatgaattacatttgtttttcaattttagaagcggtgttaaaatcacaacttgtcattcgacaaaaggtgatgagtatgaagtggtcatttgcactggattactaaatgggaaaatacctaattggaatgatattataaattgtagctcagagcatcaaaattatgttgcccgtagacttttatatgttgtttcttcgcgtgcaaagaaacatttatatatgatatcagagagaggttacaagacaaaaaggggatatccatatcagacaactccacagctttga

SEQ ID NO: 79740 - DNA, 2298 bp, Enterobacter asburiae
atgcggataaaacacatagaaatcgctaactttcgcaaattgaaagcagttcatatagatttttcagagaaaacaactattttcgtcggagccaacaacagcgggaaaacatccgctatgattgcacttcgtcgatttctggttgaacgctctggtttctccatcaatgacctcaccctatcttattggccacaaattgatgcagcagctatgcaatgggaagcagcccctgatgaccaagagccgattcagtgggatcgcttctcaccattcctggatgtatggctcgacgttcctccaaatgaacttcatcacgtacaaaagattttgcccacgctggattgggatggggaaagcataggtgtgcgcctccgttttgaacccaaggaccctgacgcactgcaacacgaatatctcacggcaaaacgcgcagccgccgaagttatggcccaagctaaagagtacggtgaacaagtaagctccacaaccgcatttgcactttggccgcgttcgatgatggagtttttagcccaaagaatgcgctctactttcgagatccgtgcttatttgcttgatccttcaaaactgaaaatgccggaagaaggtagagcctcccctcaaacactcccagaaagcagtgaccctatcgatggcggggatccgtttaatggtcttattcgtatcgacgagattagcgcacagcgtggatttgggcacagcgatcaaacagggtatacgcggggtaacgaatcacgtgaggatatggctgaacccagaatggggaaaaaactttccagccagctgcgcaactactatagccaacacttggatcctttcgatacgccggaacccaaagaccttcaggcgttgatggcattgcatgaagcacaaacggctttcggcacgcgtttagcagattgcttctcagatgccttgaccgaactggaaaatattggctatcccggcgttaccgaccccaagctgacaataaccaccaacatcaggcctatcgatgggcttaatcatccgtccgccgtgcaatacgaagtgccaacccatgttaccggttcttttggcgcacatcgccttcccgaagattcgaacggacttggttaccaaaatctcgtctccatcgtcttcgcactcatggcatttcgtgataactggatgaaagtcggaaaggctggaaaatcaaaggtggcggaagaaactctcattccaccgcttcatctagttttgattgaagaacctgaagcgcatttacatgcacaagttcagcaagtttttattaagcaagcctacggtgttctgcgaaaacatgacaagctaaaggattcttcacgccttcaaactcaactgatcatcagtacccactccagccaccttacccatgaagctgagttttcgtctttgcgttactttcggcggctaccagcactcgcacaaagcggtgctgtacccttgacttccgttatcaatctttcggaagtcttcgatggcaaagacaaaaccgaacgtttcgtgaaacgatatttgaaagctacccactgcgatctcttcttcgccgatggagcgatactcgtggaaggtccggctgagcgtattctcgttccccattttgttcgtgagcgtgaagcctatgcttacttaaagcgtagctatatcacatggcttgaaataggcgggagccatgcacaccgattgaagaatttgattgaacatctgggtctcaataccctgatcatcacagacattgacgccaaagacggcaccaccaatgctgcggttgtcccgaaacgaggcatgggccaacgagcccgcaatgagacagtgaaaacgtggctacctaaggaagaatctttcgatgcactcctcgacatggaaagtgagcgcaaagtgcttgccgaaccaggcggctatgccatccgggtggcgtatcaaacacctattttcatgccattcaagtctgaagaagcgcttgaagcagtagccaacactttcgaagatgccctcgtgtatgaaaatccggggctattcgccaacctggacggttatgggctcatcgcaaagtttcgtgaagcgctaaaggagtccgccgatctcagcgaattggcaagaaagatatttgaggcactgaaaaatgggacaaaggccgaatttgctctcggtgtcctttttagtgaggaaatcgagcggctgaaggtcccacagtacattgacgaggggttagtctggctagcagaacagctgaaacgtaaagaatatgatgttcttggaaaaacggaggtgggagagtga

SEQ ID NO: 79741 - DNA, 1833 bp, Enterobacter asburiae; identical to SEQ ID NO: 79715

SEQ ID NO: 79742 - DNA, 2298 bp, Enterobacter hormaechei subsp. oharae; identical to SEQ ID NO: 79714

SEQ ID NO: 79743 - DNA, 1833 bp, Enterobacter hormaechei subsp. oharae; identical to SEQ ID NO: 79715

SEQ ID NO: 79744 - DNA, 1785 bp, Enterobacter kobei; identical to SEQ ID NO: 73016

SEQ ID NO: 79745 - DNA, 1818 bp, Enterobacter kobei
atgccgtcacgtagtgtcagtgcagcctacttagctcaggctgccgagctggttgggaatccgggccagttagccgcgtatcactcccagggacactgcgtggtgctcgcggggcctgggagtggtaagacaaagacgcttgtgctgaagctggcccgaatcctggctgaggatgttcaagctccacgtggtgcggcatgtatcacatatagccaagaatgcgcacgcgagctaacccgtcgtctcgaagcgctggggctcagagaggcaccgaatctctttattggaaccgttcatgggttctgcttgcgccatctgttgatgccctatggacgactggccgatctgccaatcccatttccgctgtcagtagcgtctcagcgcgagagcgaacggttacttagacaatctggtgaccgtctctttggtgcaaaccatccctataaggctatggatctcggacggcatcgccgttcggtgttgaatcgcaacagcgttgcttggcgtgcagaggaggaactcgctgcatgggccgaggcctacgaagcggcattgcggcagcaaggactaatagactacgacgatatggtgatattcggccagcgtctgatcattgagcatgattgggttctgcccctagtacaggcgaaatttccgatccttgcggtggatgaatatcaggatttgggcgtggcgcttcaccgtatggttaaacgcctggctttcgagggaggcgtacgcttatttgctgtgggtgatgcagaccaatcgatttacggtttcactggtgccgatggtgcgttactcctagaactggcaggcaggggagacgttgaaacagttcggctccagttgaactatagatcaggggcgggcatcgtcaatgcatcggagatggtgttgggtgaggttcgtggttatcgagcaaacgacccgaaccgccagacaaccattgcgttccagctgtgcccggatggtttggtggatcaggctgtccatgctgtcgcgcaaattattcctgctgcgttggctgctaagccgggtcgaacgctgggtgacatcgccattctgtacaaggactaccgtgcaggcgatgtggtagccgatgctgtgaccgctggcggttttgattacattcgtgtggacaccgcagcaccttatcgcaaggttgccttgacgaactgggtagaggattgcgcggcatggtgtgctggcggttggcgtatcgggcgccctcaactgcgcggattgatagaccgttatctggcatttcatcgggcaaggctggatgatgcgtgcgcccggcgtaaagggcaggagttaaccaggctgctttgggtacttcgtgccgaccaatatcctgcgtgcgattttgtcgcgtcgttgcgcaatggtctcgttgattccctgctggcaactgaaccgacgctttctgatcagggtgagcaaatagatcgcatgactgctgcacttgccgaaggcggtgcgttagcgatgctggatatcacgagcctaggtggtcgtgacggttcacccgagcacctcaatttgctgacacttcactcagccaaaggttgcgaatatgacgtggtcatcatggtcggcttagatctggggaatttgccgtggcgtaatgagacgccagagaagctgcgtgaaagccgtcgtcttttctatgtggggctgacccgcgcacgggacgaagtgcatatgctgtattccggttttgttgacggtcgctatggccctatgcgtctggggcgttccccatttctggatgaactggaggcgcgaatgcgaggggcaggtttacgatag

SEQ ID NO: 79746 - DNA, 2313 bp, Enterobacter aerogenes; identical to SEQ ID NO: 74078

SEQ ID NO: 79747 - DNA, 1950 bp, Enterobacter aerogenes; identical to SEQ ID NO: 74079

SEQ ID NO: 79748 - DNA, 2313 bp, Enterobacter aerogenes; identical to SEQ ID NO: 74078

SEQ ID NO: 79749 - DNA, 1950 bp, Enterobacter aerogenes; identical to SEQ ID NO: 74079

SEQ ID NO: 79750 - DNA, 2298 bp, Enterobacter hormaechei subsp. oharae; identical to SEQ ID NO: 79714

SEQ ID NO: 79751 - DNA, 1833 bp, Enterobacter hormaechei subsp. oharae; identical to SEQ ID NO: 79715

SEQ ID NO: 79752 - DNA, 1869 bp, Enterobacter cloacae
atgtatcttgcagagctcacgataaaaaattttcgcaaacttcatgatgccagactgaaatttcagcccggtttaaatgtacttgtaggcccaaataacgtaggaaaaagtgcagtagtcgatgcgctccgcactcttcttgccggtcaggatgaaacttatcctagactcgatgattctgacaggcaccgaccgaatgagggcgaatcatccggtgatatcagcttccattttgtatttagggatctgagtgttgaagatgaagcggattttatagctgcactcaagccaaatggggacaaaaaaatggaggcgcatatccatgtacagtatacagatatggataaaacgggacgattcaaagttcgtcgctggtgcggcgatcacccagaagttcctcttacctcagatatgatggagaatctccgcggggtctatctcccgcctctccgcgatgccgcgcagggccttcgtcctaaccgtaacagtcagttggctcgattgcttcatttactcactgatgaagcaggccgtgacgctataaacaccgctttaaaaactcttgacgaaacacttaaacaagacaaatccattcagagcacccatacagcgatttcagccagacataattccatgatgggggttcaattagcgcaggaacttgccgttgggcttagcgtgactgattttcagcgtctatcttcccgcctgactctgacggctgaagccatggaaattgaaaagaatgggttgggcttcaataatctgatctttatggcggtcgttctcagtgaattggctaaaaacacagattctgctttcaggagtttgataattgaggaaccagaagcgcatttgcatcctcaactgcagcgcgtgctgctgaagtaccttgcaggaattccaacgggtgaaggtgaaaagcctgtacaactgtttgttacaagccattccccaaattttgctagtaattcaaagttggattctcttgtctgcttgattgagaatgaggcgggtatacaaaccttctttccacgtgatattaaatttgaaaagggaaaacgtgaaaagctagagcgatatttggacgtaactagggcagaactgtttttcgctcgccgggtaattttcgttgagggtacagcagaacttatgctgattgacgcgcttgctaagaagatggacttcgatctcagggaatatggggtcagcctgattagtgttgaaggacttaattttgactcatttctccctctctttggagaacatgggctgcgaatccctgtcgctgtagtgaccgatgcagatccatttgaagaagaagagattgaaatagaatgtgaaaagggcgaggaagaaatcgatgacataattgctgaagcagcctatagggaagaaacaaacgctcttgaggaagaagaacccgctggcaatgctgagaaaaagaaaaaagtaaaaaggaaagaggtatatccagcattgggagatgtggtgcaattgtctgctaatacgatgaagatgaagaatcttgaggataacttcgtgaaggtattccatggattgaaaacattggaatacgatttggcactcatcgaggcgaaccgaaatccaatgcttaccgcattagccgacccgcatccaaagatttctacagctctgaaaaagatagttgatgcccagcctgacaatacaacaaaagccaaggccttgttctgtggcatgtttgagcgaaaaggcagcgtcaatattcagaaaggtagatttgcccaagcattagctgaacagattttaaaagagccagaattcgaagctcctgaatatcttttaaatgctatcaagcatgtctgtcatggagtggctaagccatga

SEQ ID NO: 79753 - DNA, 1731 bp, Enterobacter cloacae
atgaaactatctaatgagcagatagatattattgatgcgccattaggatctattgctgtaactgcatgcgcgggaagcggaaagacggctacagctattcgtcgactgatctccattcgacaaaagatgcaagacagtcgcggccgcgttgtgttgttatctttctctaatatagctgtaaatacctttaataaaggttatacagagctcgcatctgctctgccggacgatataaatcgtcgacgtgtagaggtcgatacactcgatggattttttaccaaacatattttacgtccccatgcttataggactatgcacgcgactcagtctgcatacctagtgtccggaacggagccttttctaaccaagtttcaatattggcgtgaaggcagccatccactgccattgaaagacataaaagtaggtatgctaaataaagacttcttctttgttacaagcaaaggagataagctggaacaacttgataaaacagaaattttaaagatcatcaataggcttggaaagacaggtgcctacactcatgatcttggccggtattgggtttatcaaactctggtttcacaaccagccatactgcgtgcgctggcagcccgctatccgcaaatccttgtcgatgaatcacaggatttaggtacagtgcaccaagaaatcctagaattacttattaatgcaggggttcaggtaactcttattggtgatgtaaaccaaggaatttatggcttcgcaggggctgacggagagtttttgaagaattatgatactcgtgctgaggtaacgggctacatgcttactcgcaactatcgttcactgccaccaataattaaaatcgccaattctctctgcggtcgtaatgacgagtccgaccgacagaatgaaaaaggtggcgcatttttcattagatataaagaatctgaactaagtaaattaactggagcattcaaggctcatattaatgagttgggtatacaacttcaggattcagtgattctttgtcgcggggccgagagagccgaaaaaattgcgggtagagcgtcctcggtaggacaaggtatggttaaaattttagcagaagcatcgttgttacgagatctacatggtaactaccatggttgctttaaattggtctgcagggcaatcattggcttactggacaatgcgccccatggattaagttccggacttcaaagcctgtcaaatgcagacggaatgagcgggctgaggcgtcttttatggagtttcagtcgaagtacagatctgggactcccttcttctacacttacagcgaaaacagactggcacaacaagctattaactaatgtcaaagcgcttcttacagagattgaaaaacaatacggatataaaatttctggcgcggttggcacaaaattgaaaaaaacatcactaccagaccttccattggccagtgcaacaatcactcaagcacctgggatcagggtagagactgtacaccaggtgaagggggagtctattggcgcggtaatgtacctagcaaagaaacccaatattgaagctttgctttcaggcacaggtgatgaagaaggccggatcggatatgttgcaatcacgagggccaaaaacctattttggctagctgtgcccgactcatgtctaaaagagttaaaggagaaacttattaacgctggttttcaggaatgtgtcacacctgttgaaatagctgcacatgactaa

SEQ ID NO: 79754 - DNA, 2145 bp, Enterobacter cloacae
atgctaaggaaccaatcgattactatgtatatcaataaattagctattagaaattataaaaactttcgaagctcaaatttctgctttgttaaaaactcagtgaatacaattatcggtgagaatgcttcaggtaaaacaaatttgtttaatgctatgcgattgattcttgatgactcacttccaatgaattcaagagttctatcaggtgaagatttttatcgtggcttaaatgaccccttcgggcactggattattatcacaatgtattttgatgatttaagtgaatctgaagaagaacaggttattgcgaactatacaataaataatggtaacgaagaggcattaaaagaaggaaattatacatttatatatcgcccaagatttcatattaggcaaaagctatacgagttaactgtagataataaagatttagaatcaagattagaggcttttacagagttgaaatcaacttgtataatatccaaagagacttacgaggctgtcgcttttgttagaacaaaagttgattttaataatgacgaagtttataagcaagtagttggggattttgaaaattacattttttcaaatcccaatgaagatgatgctacagtcattggtgtaaaaaaaccgccatacttcgccttaggtagtgaagttgcttgtacttatgtcaaggctcttcgcaacgtggtagctgatttaaagtattataaaactaatccactgtataaattgctcactttaaaaagcaaacaaattgatgatagaaaagatatttctgagaatgttaagaacattaatgaacaaatttcagcaattcctgaaattgctcgactaagtaataaaatatcaacatctttacttaatacggttggctcaacatattcgccaaaaatattggtttcatcacaactacccgaagattttactgaattaatccaatcacttggattagtagtcgaggattctttagattatgacggttcaggaagaattgatgatataagtcttgggggggcaaatttaatatatttggctttaaaattatatgagtatgaagaaattagagatgctgaagagcatataactcatttcctattgattgaagaaccagaggctcatatacataatcatatccagaaaactttatttgacaattttaattttcaaaatactcaagtcttcgtttcgactcattcaacccaaataagctctgtttctaaaatctcgtcgatgaatattttggctcggcaacgaggatatacagatatctatcagccttccaacggactacagccaaaagaaatttcgtcaattgaaagatatcttgatgcaatccgtagtgatgtgttgtttgctaaaagtgtaattctcgtagagggtgatgctgaattaataataatcccagaacttataaaggtcactttaggtattagcttggatgaattaggtattagcttaataaaattggatgggactgtatttaagcatatttcaaatctttttcatagtaatagattaaaacgctattgcgcaattttaactgataaagatttggcatatgtgcaagaaccggatgaactatttgatgctgatttcgttgaatctttgaaaaacgctgagactgacggtttacgcagagaacgagagttggcagagtatgtagaaggcaatcaatttgtctccgttttttatgcagagaatacgtttgaaacagagcttgttcggtatgatgaaaattccgatcttttcaacagtgtcattaggacaacatataaaagatcaggtgatattgagcgagttgttgcaggtattaattccgatgatttacgggtaagatttagaactgctctttttttcgccaataaaataggtaaagggtggttagctactgaaatggtagagtatctccataatgagaatcgtgttcctgactatatattaaaagcgattcattttgcacttaaagatagagaactgaatgctgtgcttactaaaatgcttgcctataatatgtctttaatgggaactcactgggatgatgtatgcaacaagattaattctgaacctgattttgataaaaagatgcaagagtataggaaacatttcaatgatagcttttctagattttgggagttgtaa

SEQ ID NO: 79755 - DNA, 1752 bp, Enterobacter cloacae
atgccatatagaaatttgacatctgaacaactagatgctgtaaaatttgatggcaatctattacttacagcttgtccaggttcaggaaaaacaaaaacattggtttccaaactttgttttatccttgaaaataaggagttgtttgatataggtaagaaaaaaattgtggcattgacatacactaatgttgcagcagatactattctcgaaagaattatttcatatggtataaatagcgattcattgtggattggaacaatacatagtttttgtttaaattggattataaagcctaacattgatagaattccaaggctcagcaaaggttttaatgtaattgatgagtatgaaaaagaatttatattaaatgatctgagagaacgttataacttatctccttacgataaaatagatacgcttttagacttaagttttactccggtatattctcgaaatactgctgaatattcagtggtaaaagcctatcactcctatttgtatgagaatcgattaatcgattttgatttgattttgaatttaacgtgcaatttattattgaagaatgatgtgctatgtgaaagactatctttaattatgcgatatattttagtcgatgaatatcaagatacctctcatattcaatatgaaatactaaggctgatagtaagtaaaagaaattccttggttacttttattggtgataaagaacaagcaatatatactggattgggagcggttgttaaaaatagagaagagttgttcgattacttcaaccttgaagaattagaagaaatgaggttaaccggttgtttccgtagtagtcaatcgatcatagatttttatagcaaatataaagatgatgcctattatattaattcattgtcagaactgaagacatttccttctgtgatactcaaggaaaatagtgttgatatcacccagttgtctgtttatgtttcaggaataataagaactcacttagaacaaggtatttctcctggtgaaattgctgttctatgcccaagttggtttgatgtaataaaattatccaatgaaattatatcactaaattctgatctggatatcgatggtatcatggtttctcccatacctaaaaataatgaaaacttgtggctcaatcttgtaaagcttgctttaattgaaaagaatccatctaattatcttgttaggcaaaaacttttgcgagatttactcaaagaattaaatgatttagagtcatatacaaaattcttatctccaaagcaaatcataaaagaaataaataaaatagaatttgcattggattataattgtgaaatagatatttggataaaaaatcttataactaacttctgtagttcattaggattggatgttaataatcaaagctatgcttataaagaaatgatctgcttgatagatgctactaaaaaacgaatggctaaatatagtatgaactatagggcaaatgatcttcattctttttttaattttaaaagcggagttaaaattacgacttgtcattcgacaaaaggagatgagtacgatgtcattatttgcaccgggctattaaatggaaaaataccaaattggaatgacattatagattgtagccctgcacatcaaaattatgtggctcgcaggctcttatatgtcatagggtctcgtgcaaaaaaacatttatatttgatatctgaaagcggtcataagacacaaaaaggttatccatatcaggtcactccacagctttaa

SEQ ID NO: 79756 - DNA, 2133 bp, Enterobacter cloacae
atgtttattaagaccctctcggtaagaaattttagaaattttaaggcaacgtctctttccttcaaaaaagaatgcgtcaatacaattgtaggtgaaaattcatcggggaaaacaaatgtctttgaggcgatgagacttatacttgacgataccttgccatattataagcgatatcttgtagaaaatgactttcatcgagggctagggacagcgtttggtcattgggttataattagtttggagtttgatgaaataggtggggatgaagagtcagagttactatgtcaattaaatactaccgttaatggtggtggaacagggcgaataacttatatttacagaccgcagttttacatcagagaacaacttttcaatttaaatgatattggagatgttgatgagcgtagaagcgcatataacatactgaaagaacaatattcgattgataagaccacgtatgaatccttagtgttatgtcaaggcacagcagattttagcgatgatggattatacactcatgtggttggtgattttaatgattatttattccctgacccaaaattagagcggattgatttaattggtaatagacaacgtgggtataatattcaggataatatcagttgtacttatgctcgtgctttgagagatgtggtaagtgaacttaagaataatcgattcaacccatttcaaaagcttttagaatatgtttctaaaggaattgataatgatgacacattgagcgaaaacatcaagagcgtgaatgacagaatatcatcgattgaagaggttaagagactttctgagggcatattattatcaatcactaatgctgttggtaccacttactcgccagttttgaatgttacatctgaattgccctgtgagctaaaagagttggtaaaggttcttcaactcaaggctggcgactctctttgtgaaggatatgtatcagagctatcagagatgagtcttggtggcgctaatttaatatatttagctttgaaattgtatgagtacgaagaaggtatcagtaaaaacctcttagctaattttttaataattgaagagcctgaggctcatattcatacgcacatacaaaaatctttatttagcaatctgaaaaataacaaaacgcaagtttttatatctactcattcaactcatatatcttcagtatcaaatatatccactacaaatgtgcttgtaaaaaatggtcttgaaacaatttcttgctctccatctaacggattggaaaaagagaaaattaatcgcattgaaagattccttgatgccataagaacagatattctctttgccaagaatgttatcctaattgaaggtgatgctgaagaaatattaatacctcatctcgttaaaaatagtttcggtattacacttgacgaacttggcatatccttgatatctgtacggggtactgggtttgaattgctatcatctttatttcactcagaccgaattaaaaagaaatgtgcaattttgaccgatgacgacataaatttgtatggagataataagcctgattatttatctcaagatgactataataaagctgtgaactcagcagagtctggtgtcgctcgtaaagtaattctagataaaatagttagaaataacgcttttattcgtgcctatttttctaagtatactttcgaaattgatttagtgctatcaggcgccgtaagatactttgatgagatagccgctgaatcatttgagaaaagagcatattacacaccataccaagaagcattccaatcctctgatagacaaaaaataggctgctacgctttaaagttagctaataagcataaaaaaggttggtttgcaatgatgcttgttgacaagcttaatgcagattttcctatccctaaggcactctgtcagtcgttagggttcactggtgattttaataaattcactctagcaaagatggttcgatatcgtagtgaggttattaagaatagagatgggactgatttattaaataatatattgggacaggatgatttagcatttattatagataacatagatgctgctttggacatatttaaagcacattaccctaacgatcctttaacttctttgcttgaggttcatcatggatga

SEQ ID NO: 79757 - DNA, 1677 bp, Enterobacter cloacae
atggatgatcaaaagagacaattaattaatattaaagataatctattggtcagcgcttgccctggggctggtaaaacaaaactattgattggtatgttagaggataatttatatcgaaacgaaggttttcgttggcatattgtgttaactcacactaacgcagcagctgatgagatctctagcaggatagataatctaagtatagaggtagatagagtttggtgcgggactattcattcttttcttttagagtgggttgttaaaaagtatgctggagctatatcaaggttaaaagatggattttctttactttcagaatataaacaaagaaaaataatccagagcatagaaactgataaaaagctaggagtaagaatacgttataattgtgatgagcaaggtaacgcatttgtggaaccttattgccattcgttagataataagaacaaagagttacttgtaattcaggagtataatgcctttaaggaaaataatagactgattgattttgatgatattattaagcttggcgtggaatttcttgaaaacaatcaaaacatatgtgagcacctctccaagttaattggtaatatttatttagatgaatcacaagatacaagcctgattcagcttaaagcattgtcatatataactaggtataatcgcgtctcagtatttattgtcggtgataatgaccaagccatttatcaagatcttggcgtttctataaaggataaagatataattaaatctgagttgcaactatctgaattaaagcatgaaactttgtctggatgctatcgatcttctgaattactggttaaatattacaaaaaatattctgcttcgcgaaatgatgttacttctctgcgtgaatttgaggggaaatctccaataatcaaagatatttctcaagatgaattgccacaaagagtgtttaatttaataaatcaataccaggcaaaatataatagcgtttccggtattgctattatagggcctgataagtactatcttatggcgctaattaatgctttatatgacctttcagaaaacttcgtttatgattttcaatcaacaaaccccctatattgtgctaggaatactgtattttacgagttgataagtttggttgttttggatgtaaatgttattaactaccaaagaagaagttctcttgcaaggaaaattgttgattctgttcctgaattgagtcatatgacgccattacaacttaagcgtgatttaaaggagtttcagtcagtaaaaaataatttcatattgtggttgagggagttatatgattttttagaaatgaagtatcaaaaatccattaaacttgagacagattacaaaatatgtaatgcagcggcttctgtggcaaaaatcagggctggtatgggcgcaattagtaagatgattaacaaagacaaaaatgttgtctctgtatctactatacatggttcgaagggtgaggaatatgattatgtaatctctattgggtatcatgatcaggtggtgcctcatcaatcatcttttgaaaaaggaaatgaatatgctcgcgatattgctaatagattaatgtacgtggctttttctagagctaaggattatatgaatatatttatagatgatcgaagaaaagttagtcctttctttattagagaacctgactaa

SEQ ID NO: 79758 - DNA, 1701 bp, Enterobacter cloacae; identical to SEQ ID NO: 75204

SEQ ID NO: 79759 - DNA, 1626 bp, Enterobacter cloacae; identical to SEQ ID NO: 75205

SEQ ID NO: 79760 - DNA, 1752 bp, Enterobacter aerogenes; identical to SEQ ID NO: 73074

SEQ ID NO: 79761 - DNA, 1776 bp, Enterobacter aerogenes; identical to SEQ ID NO: 73075

SEQ ID NO: 79762 - DNA, 1905 bp, Enterobacter asburiae
atgaagcttgaagcaatacggttatctggttttcagtcgtttgggtatgaagcaacagaactcagccttgaagatataacatatatcattggccctaatggttcaggtaaaaccgcagttcttcaggctttgtgtcgactttttgcattcgaccccgcgttaaggcggatccagcgttcagatttccacgtgccctgtgatgaggagaacgttccgcttgagcgccagttgtggatagaggctgattttctttttcccgaactggaagaggacgaggacaacagtaccgtagcaccccacttcagccatatgcgactggacgagccagatggggttccgcacgtgcgttttcgcctaacggcaactatggggatagatggcgatattgaagaagctctggtatatgtcctggaagttgatgaagatgatgcacctctaaataccgctcaggttccacgctccgaacgtaatcatatccatgtacactatctgcctgccagacgtgatcccgctgaccatattgcgtacggtgcgaatgcattactcgggcgtttacttcgcgctgttcgttgggacgatgagcgtgaaacgattaaaagcctgaccgatcaaataagcgtcagccttgcggccaatccctcggtgaatgcttttagtaagagtttaaagacaacttggataaaactgcataggggtaaattttttgctgatcctaaaattacttttgtcgcgtcagaaattgaatcgctgttaaggcatttgtctgtttcatttaccccaagtcacgatggctcatttgtcgatttttcaaggctgagcgatggccaaaaatccatgctttacctttcacttgtgttatcgtctcaggctattggcagggccgtgcttgcagaagaagatatatcatttgatcccgataaattacgtcctccggtcttcacactggtagcccttgaagagccagaaaacagcctttccccacattatttgggtcgcattgttagctccctgagtgccatggtaggaaacctagatgcgcaagctctcattgcgacgcatgcgcccacaatgctgcgccgggtagcacctgagttaatacgttatcttcgactgaatgagtcacgagagacgcaggtcacttgtattaaattgcctaatgaaactgatgaggcacataagtttgttagggaagccgtccaggcgtttccggaaatctatttttcacggctggtggtgcttggcgaaggtgacagcgaagagattgtgctgccacgcttgcttcagtccaagggggcgcccgttgatgagtcagccatcactgtagcgcctttaggggggcggcatgtaaaccatttctggcgattactcacagcgttaaagattcccttttttacactgctcgatcttgatgtagcccgccatggggcaggatgggggcgaattaagtacgtaaatgaccaattttccaaacgtcaaaggcgtaacaaacttcctgaatcttacgtaattccaaaatgggatgatgaaaaatataaaattcgagactacgaaaattatctcgacatgcttgaagagcgcggcgtgtttttctcctatccgatggatttagactttgcaatgttacttgcgtacccagaagcctataacgtttgggaagagatgcccgacgatgcaactataaaagctgttcttggaaaaagtcattacgattcatctcagtacagggatgatgaattagcgctttttaatacctatcaccaacgtttcaagctcggcagtaaacccgcagcccacattgaggcgttaactcagctaaatgatgctgatctacttaaaaacatgccagattcactggacaggctggctgatgcggttattgccaaactcacggaactgccagaatga

SEQ ID NO: 79763 - DNA, 1665 bp, Enterobacter asburiae
atgattactgtcgaagaatggcagcccgcagatggattgacgctggaacctaatgcgaaacgtgcagcgaaagcgcgtaaacgttgcttggcactgactgctggaccgggggcgggtaagacggaaatgcttgcacagcgtgctgacttccttttgcgaacaggaacgtgtcgataccccaaaaggattctggcgatctcatttaaggttgatgccagcagaaatcttacagaacgcgttgaacgcaggtgtggaagatatctggcttctcgctttgacagttttaccttccacgcatttgctaagcgcatcatagatcgatttaggccggtacttacgggagaatatgccttagatgctggctacacaattgtagacaagaaaagcggggcgtctcgtcacgaaatagcattcggcgatctggttccttatgcaattaaaatattgcaaacctcaaaaatagcccgaaatgcaatccggcaaacttatagtgatattttccttgatgaatttcaggactgcacaaatttacaatatgacttggtaaagcttgcttttaagggaacaaaaattcgactgactgctgtcggtgacacaaaacagaaaatcatggcttgggcaggtgctctggacggcattttccagtccttcacaaaggactttaatgcggtgccgctcaacatgtatcgcaatttccgctcaaaaccaactttgctgcgtgttcagaacgaaattattcgcaagttagatcctgactctgtaatgcctgatgctcagttggaaggggacgaaggggaggtttttgcttgcaaatttgaagacagtcaaactgaagctatctatctggctgacctaatttatgaatggattaacacagagaagctacctccagctgaaattgcagtcctaatctctaagcaaccagatttatatgctgatgacctcttcagagagttagagcaacgcggaattccctaccgcaatgagcagcaaatgcaggacatcactgtcgaaccagtggctaggttaatcgttgattacctatcttgcctgtatggacatcgggaacctaaagcctggattcgtctgatgaatcagctggttccctttgctgatgaagaaattcaaaccaacgtacggaaagatcttgatcacctgattaaaaagcatcgtaaaggggtgtctgaagcaaaaaaaaaggacaatcccttttcggaatggtggacatttagtcgctctttcttaaagcatataggtttacagatgcttgttgccttatcgcctgaatatgagtcccatgatcgtcttaaacaggttgtgagcgatgtagaagcacgtattaaagatttactgaaaatcgaatctgatttacccctcgcattaaaacgatttagtgatgatcaagctgtacgcattttgaccattcacaaaagcaaaggattagagtttgattcggttgttatcatggctatagaaaatgagattttttttggtgatgaagaagagaatcgctgtgcgttttttgtcggtgtttcacgagcaaagagacgacttattttaacgcatactaacaagcgtgatgaacccgctaatgccagatattggaaagtttttaggactgctcgagtagagtatttggattatgttcttccgtttgtgaggtaa

SEQ ID NO: 79764 - DNA, 2322 bp, Photorhabdus luminescens subsp. laumondii
ttgaaaatagcccgtatcgacatacaaaattttcgaaaactacaatcctgtcgtgtagagcttgctgggaaaagtacggttttcgtcggcgctaataacagtggtaaaacgtctgctatggacgcgctgatcatgtttttgaaaaaggcaaagcgcaaagagctttcaaccaccgatattactttatccaattgggcaaccatcaattcggtcggcattggctggattagtgaaagtgaaaaacaagccccagtcccggatctgactttggatacatggcgtacacagttcccttcgattgatgtgtggttagaggtggatgagttacaaatacactacgtcagccacattttgcccaccttggattgggatggcggcttgctgggtgttaggttaattttagaaccgaaaaaccttgaattactatacaaagcttatatcaacgcttactctgcagctagggaaactatatctgctcacaagatagaagcagatgaaacaactggatcaccactggtattatggccaacttcaatgcgtgattttctggatagaaagcttcaggaattttttgcaattagcgcttatgtgctagatccagctttagccgacaacgaacaacctcaggcttttacagaattcatggaggcaattgatggtgacccgtttgatggcctatttaagattgacatcattaacgcgcagcgtggtttttcagacccaaatgccggtgaaggcgcggcaaatactgatcggcgcttgtctgctcagttaaggaattactttgataagcacctcgaccctagcgagcttcctgatgtgagcgatctggatgcacttgaagcaatggaaagtgcccgaacagtatttgatcaaaaattgaagaccagtttcagtgccgctattggtgagttggaagggcttaattatcctgggtttagcgacccacaaattttactgtcaagcaaagtgaatccattagaaggactgaatcatgattcggcagtacagtttaaagtcattcgcagtgaagacccttcaggtgatgctttctgcctgcccgaaaaatacaacggattaggttatcaaaatctgatttcgatgatttttaatctgattcgctttcgtgatgaatggatgcgtgttggcaaggttagcaaaagagaagaaagcaataataggcctatagagcctctgcacttaatgctaattgaagagcctgaagctcatttacatgcgcaggtgcaacaagtctttatcaagaaagctttcagtgtgctgcgtaatcatcctgatctggaagaaaaacagcagcttgctactcagatgatcgttagtacgcattctagccatatagcacacgaaacagattttaccggactgcgttatttccgtaggaaaccgttggttaatgaacttgaagtgccaaatgcatgtatcgttaatatgtctaccacttttggcgcagatagaaaaaagactaaaggtgaaatagcccaagaagcacaagagcaagagagaatcgcaacggcacaatttgcaacgcgttatttaaaaacaacacattgcgatctattttttgctgatgctgctattttggttgaaggtcccgctgagcggatgttggtgcctcactttattcgaaaccattatccagatttagatagaagttatatttctattctggaaattggtggtagtcatgcgcacagattacgtccacttattgaagccttaggaatacctacgctggtaattaccgacctcgattcaattcaggctgagtcaacaagtaaagctcgtccggtaatgggtcagggcttcaaaacggggaacgatacattaaaaacttgggcaccaggaaaaacattattagacgaggtattgagggctgagtttgaacagaagacagcgagcaacggaaaggtcagagttgtttacccttgcactgtatcaattcagtttaaagatgagaaagacgtaccggatcaaccagagccggaatcagcgatcccttatacctttgaggatgcactggttttagctaacttgtcagtatttagaaagatgactgataaaactggtcttatcaaaaaaatggttgaagccgttaatcaaccaatgcttgatacagcctgtcacttcatgttttgtgcattagataagaacgccaagaaagctgaaatggcactggatctattgtattcggttgaaccaagcacttttaaagctccgcactatattgctgaggggctcaattggctggaaaaagagttgatcaatagctctccgcttgcggcaaagtcggaggcaaaggaatga

SEQ ID NO: 79765 - DNA, 1875 bp, Photorhabdus luminescens subsp. laumondii
atgacagaggtgattgatactaagacagttgacgatgagatctatggatgtctagatctagataatccaaaaagcttctttttgtttgccggggctggttcgggcaaaactcgctctttagtcgaagtacttaagcgatttcgtgaacataatatccatcgtttacgagtaaaagcacaacaagtagcaatcattacttataccaacgccgcttgtgatgaaattaaacgccgcttggagttcgattctgcctttagcgtctcgaccattcatagttttgcttgggagctaatcaagtcgcatcagcatgatattagagagtcgcttagagtcagacttcaatcagacattgtcgaacttgaggaagcacagcgtaaaggtagagcaggcacaaaagcggccgaagatagaccaaagcagattgtggccaaactaaagcggctggaatcactaagcaacattaggaagtttacttacaatcctaatggtgaaaatttgggcaaggattcacttaaccatgccgaagtgatcggcataaccgctgaattgctgatcagccgtccattgttgcagcaaattcttacacgcaaattcccggttttgcttgtagatgaaagtcaggacacgaaaaaagagctaattgatgctttgtttgtagttcagagcttacatcaggacaagttctcgttaggtctgttcggcgacatcatgcagcggatttataacgatggaaaagaagacctaggtctagctccattgccggatggttggcttactccaaaaaaggaatataaccatagatgtcctcgtcgagttgtgaaactcatcaataaaattcgagccgaggtcgatcaaaacttacagcaatccgctaagctagrggaaggcttcgttagactatttattgcggatacatctgatgggatagacaaagaggcttatgagcgctttgtttgtcaaaaaatggcagagattacagctgatgacttgtggatagcagagaaaaaacacaataaaacactaaccttagaacatcacatggcggcacaacgagggggctttgcaagctttttcaattctctctatgaagtcgataagcttagaaccggtttgcttgatggaacccatgctggcattacttttttttcagagagagtacttccacttatcaagagtttggacgtaggtaaccacttcgctgtttctagaatcgttaataagtattcgccacttatttctaaagaatgtattgaacaaagtgctgagcctaaggcggagttagcaaaagctaaggatgctgtcgatggtctttatgttctatggcgtgatgacgcagatccctctctaatcaacatccttaaagaagttcagcgcactcgtttgttcaatgtccccgatgttctcacattgattgctgagaggcaggataggaactatgaaaaagcagaagatgataatgatcgagatcccgttgttgacgcttgggataccgcgttgatgtctcgctttagtgagtttaaggaatacgttgcgtacatatctgatgaatctaggttcggtactcatcaaggcattaaagggctcgaatttccaagggtaatagtcattctagatgacgaagaagctcgtggctttttgttcagttatgataaattgtttggagctaaacccccaaccgcaacagacatacgtaaccagaaggaaggcaaagaaactagtattgatcgcactagacgactgttttatgtgacttgtagtcgagcggaaaaaagtttagcgatagttgcttacacaaacgagcctaataaagtaaaaacgaatattatgagtcaaaattggtttgaggaacatgaaattatatcctgtcaaatataa

SEQ ID NO: 79766 - DNA, 1926 bp, Salmonella enterica; identical to SEQ ID NO: 72180

SEQ ID NO: 79767 - DNA, 1662 bp, Salmonella enterica; identical to SEQ ID NO: 72181

SEQ ID NO: 79768 - DNA, 1872 bp, Salmonella enterica
atgtatcttgcagaactcacgataaagaattttcgcaaattgcgtgaagccacgctgaaatttcaacccggtttaaatgttttggtaggcccaaacaacgcagggaaaagtgcagtaattgatgcactccggacgcttcttgcaggtcatgaagagacttatcctcgcctcgatggttctgataggcaccgtccgcatgaaggcgacccaactggtgatatcagtttccattttgtcttccgagatcttagccttgaagatgaagcggactttatagctgccctcaagccaaatggggacaagaacatggaggcgcatatccacgtccagtataccgatatggataagacgggacgattcaaagttcggcgttggtgcggtgatcacccagaagtttcgcttacctcagatatgatggagaaccttcggggggtctatctccagcctctccgcgatgccgcgcagggccttcgtcctaaccgtaacagccagctggctcgattacttcatttgcttaccgatgatgcaggtcgtgacacgataaatacggctttaaagcaacttgacgatacacttaaacaagacaaatccattcagagtacccataaagcgatatcaaccagacatgattccatgatgggtgctcagttagcgcaggagcttgccgtcgggctcagcgtgactgattttcagcgtctctcttccagactgaccctgacggctgaagccatggagattgagaaaaatggattgggcttcaataatctgatcttcatggcggtagtacttagtgaattggctaaaaatactgattctgctttcaggggtttgattattgaggaacctgaagcgcatttgcatccccaactgcagcgtgttttgctgcagtaccttgcaggaattccaacgggtgaaggcgaaaagcctgtacaactatttgtcaccagccattccccaaattttgccagtaattcaaagctggactctctggtatgcttgatcgagaacgaggctggcgttgagactttctttccacgtgatatcaaatttgaaaagggaaaacgtgaaaagctagagcggtatctggacgtaactagggctgaactattttttgcacgccgggtgattttcgttgagggcgcagcagaactcatgttgattgacgcgcttgctaagaagatgaactttgatctcagggaatatggggtcagtctgattagcgttgagggacttaattttgactccttcctcccgctttttggagagcatgggctgcgaatccccgttgctgtagtaaccgatgcagatccatttgaagaagaagttgaagccgtggcagagggtgaacagcctgaagaggacattgacgacttacttgctgaagctgcctaccaggaagaaacagatgctcctgacaatgaagagcttgctggcaatgctgagaaaaagaaaaaagttaaaaggaaagaggtgtacccagcgttgggagatcaggtgcggttgtcggcaaataccatcaagatgaagaatctggaggatgatttcgtgaaggtttttcatggattgaaaaccttggaatatgatctggcactcattgaggcgaaccgcgacccaatgcttactgcattagccgaccctcatccaaaaatctctaaagctctgcgtaagatagttgatacccagccagacaataccgcaaaaactaaggcgttgttctgcggtatgtttgagcgaaaaggcaacggcaatattcagaaaggtcgattcgcccaggcattagctgaacagatttcgaaagaaaatggttttgaagtccctgagtacctcaaaaaagctattcaacatgtctgtcagggagtggtcaagccgtga

SEQ ID NO: 79769 - DNA, 1728 bp, Salmonella enterica
gtgaaactatcaaaggaacagatagatattatagaagcgccgttagggccaattgctgtcactgcgtgcgcaggaagcgggaagactgctacagccattcggcgcctgatcgccattcggcagaaaatgcaaaacagtcgcggccgcgttgtgttgttgtctttctccaatgttgctgtcaataccttcaatgcaggatatgcggaactcgctgctggcctaccagacgatgctaatcgtcgaagggtggaagtcgatacacttgacggtttttttaccaaacatattttacgtccccatgcctacaggactatggccgcgcctcaggctgcgtacttggtgtcaggttcggagccttttcttgctaggtttaaatattggcgtgaaggctacccccctttgccattaaaagacataaaattaatcatactagatggggatttcgtcttttattccgatacaagaaatgaccctgaaattcttgataaaggtaaggttttgaagatcattcatgatcttggacgtttaggtgcttacactcatgagattggtcggtactgggtatatagaaccctagattctcaacctgcagtattgagggcgctggcagcccgctacccgcaaatacttgtcgatgagtctcaggatttgggaacactgcataaggaaatcttaaagctactcattactgcaggggttcaggttacgcttattggggatgttaatcaggggatttatggcttcgctggtgctgacggtgagttcctgaagagctacgaggatcgtgcagaggtgaccggctacaagcttactcgcaattatcgttccctgcctccaatcataaatatcgccaacattctctgtgggcgtcatgacgaaccagaccggctgggggagcagggtggagcatatttcattggatacaaggattcagaactttccaaactaactgaagcattcaaggctcatattgatgagttaggcatgcaacatcacgatgcggtgatcctctgccggggtgcagacagagccgcagtagttgcgggtaaaacccctccgccgggacaaggtatagtcaaggtgttagcagaggcatcgttgttaagggatcagcatagtgactatcatggatgctttaaattggtctgccgggctatcatttatttactggaggatgtacctcatggcctcagttccagacttcaggggttatcacatgatgacgagatgaaagagcttaagcggctactatggcgtttcagtcgcagcgctgatgtgggactcccttcgtctgccctaactgcgcaaatagactggcactccaagctattaacgaatgtcagagtgcttctcgcagagattgaaaaacactacggatataaagttgctggcaaggtaggcactaagctcacaaaaaaattattaccagatcagccactgaccagtacagttttgactcaaggacatgggctcagagtcgagacggttcaccaggttaagggggagtctatcgacgcggttatgtatgtggctaagaaagccaatatcaaagcgctgctttcaggtacaggtgatgaagaaggacgtatcgggtatgtcgcaataactcgggccaagaacttgttctggctggctgtaccacaatcatgccttaaagaattaaaagaagatctcattaaagctggttttcaggaatggatcaaacttgccgtcaatgatcctgcctga

SEQ ID NO: 79770 - DNA, 1926 bp, Salmonella enterica; identical to SEQ ID NO: 72180

SEQ ID NO: 79771 - DNA, 1662 bp, Salmonella enterica; identical to SEQ ID NO: 72181

SEQ ID NO: 79772 - DNA, 1926 bp, Salmonella enterica
atgaaactgcacagtattcggatatcaaattttcaaagttttggtgctgaaccaatagaactgacactggaaagtattacctatctgattggccccaacgggtcaggcaagactgctgcactccaggctttgtgccgactgtttgcatttgatccatcattacgccgtattcagcgctcagacttccatgtcccgcacgatgaacaagaagcgcccgaagaaaggcagttatggattgaggcggacttcgtttttcccgagttggagggtgaagaagataactcaagcgttgctccccatttcagtcacatgcgccttgatgaccctgacggaattcctcgggtacggtatcgcctaagtgccactatgggcctagatggagatattgatgaagctttcgtgtatgtgcttgaagttggtccggacggctcacctataaatcctgaaacagttcctcgatctgaccgaaatcacatacaagtccactatctgccagccaggagagatcctactgaccacatagcatacggaacgagtgcgctgcttggccgcttgctacgtgccgtgaactgggaaaatgaacgagaaaaggtcaaagggttcaccgaccagattagtgagagcctggctgctaattcatcggttaatgcttttagctcccacctgaagaaaatatggggcaccctccataaaggcagctactttacagatcccaagattacttttgtggcatctgagatcgaggcgttgcttcgtcatttgtccgtatcattctcgcctggacatgatgacaatcttgtcgatttttctcgactcagtgacggtcagaagtcgatgctctatctatcgttggttctctcatctcaagctgttggtcgtgctgtccttgccggtgaggacgactcttttgaccctgaaaagttgcgtccgccagtctttactttaatagcccttgaggaaccagagaacagcctctcacctcactatttgggaagaattgttaacgctcttaactcaatgacgagtaacgaggatgctcaggccctagtcgctacgcatgctccgtcgatgttgcgacgtgtcgatccggaacatattcgatatcttcgacttactgaaacccggcaatcaagaattaagaaaatccaattacccgctaaaaccgatgaagcgcacaaatttgtacgtgaggctgtccaggcatttcctgagatctacttctctcgtttgattgtgttgggtgaaggggatagcgaagaaattgtattaccgcgccttttccaagcaaagggtgcgccagttgatgaatcagcggttacgattgctccgcttggaggtaggcatgtaaaccatttttggcgtctgttatccgaactgcaaatcccatttttgactcttctagatttagatgtgggcagatatcaagcgggctggggaagaataaagtatgtaaataaccaacttggtttgtatcaacctgaaaaggtactaccaactactttttctttatcagattggaatgatgacaaagtacctgttcgtacacatcatttctttgaaaacggcactaagagtgtatttttagagctggaaacacgtggtgtttttttctcatttccaatggatttagatttttcaatgcttcttgctttccctaatgcgtacggtgttcagcaggaggtttcagatgagtctacgattaaagccgttttgggtaagagccatcatggctcataccaatacagcggagacgagttaaatcttttctctacgtatcacaagctttttaaactgggtagtaagcccgctgcgcatatagatgctcttgctcaactgagcaacgaggaattgctggcgaacatgccaggatcatttggacgacttgcagatgccgtgatagccaagcttgcggagctgcccgagtga

SEQ ID NO: 79773 - DNA, 1662 bp, Salmonella enterica; identical to SEQ ID NO: 72181

SEQ ID NO: 79774 - DNA, 1854 bp, Salmonella enterica
atgtatcttgctgaactgactattaaaaattttcgcaaacttcgtgacactaaacttaaattccagcctggtttgaatgttctggtagggccgaacaacgttggtaaaagtgcggtagttgatgcactccggacgcttctggcaggacatgatgaaccttatccccgccttgatgtttctgaccgccatcgcccaaaagaaggtgagccagtcggagacattagcttccattttgtctttaaggatctcagtctggaagatgaagctgattttattgctgcgcttaaaccatctaacgacaatagcatggaggcacatattcatgttcgctatacggatgtggatcaaacgggacgctttaaagtaaaacgttggtgcggtgatcaccatgaggttgcgcttacctcagatatgatggaaaaccttcgcggcgtttatctccagcctctcagggatgccgcacaaagccttcgacctagccgtaatagtcaactggcacgcttgcttcatttgctcacagatgacgaaggtcgcgaagatattaatatggcgttaaaagaacttgatgataagcttcaactgaacgcgtccattaataatacccatactgcaatatcttcccgacacctctcgatgatgggtgaacagttagctcaagcgcttgcggtagggcttagcgccactgattttcagcgcttatccgctcggctttctctcacggctgaggctttggagattgaacagaatggactgggattcaataacctaatcttcatggcagtagtacttagcgaactggccaagaatcctgatgctgcttaccggagcttgatcgtcgaggaacctgaagcgcatttgcatcctcaattacagcgggtacttttgcgctatcttgccggagtgccgacgagtgaaggcgaaaaacctgtacagttgttcgttaccagccactcacctaattttgccagtaattcaaagctcgaatctcttgtgtgcttagtagagaacgaagacggcatagagactttcttcccccgggatattcaattcgccaaaggtaaacgagaaaagcttgagcgctatcttgacgtgacaagggctgaattattttttgctcgtcgggtgatttttgtcgaaggtgctgcagaactcatgctggtcgatgcgcttgccagccttatgaattttgacctacgagagtatggggtcagcctcatcagtgtcgagggccttaattttgattcttttctgccactgtttggagaaaaagggctacgaattccggttgctgtcgtaaccgatgctgatccttttgaagaagaagaggtagggcatgaggaggatattgaagatctacttgccgaagctgcctacctggaagaaacagacactcctgaagaggatcaacccgttaacgagcaggtaaaaaagaaaaaagttaagcgaaaagaagtctatccgtcacttggtgacgaagtaaggctatccggcaatactcttaagatgaagaaattagaagactcttttgtgaaagtttttcacggactgaaaaccctggaatacgatttggcactccttgaggcgaaccgcggcccaatgctgactgctttagccgacccgcacccacggatttcaaaagctttacgtaatattgtggatgctcaaccagacaacactgcgaaggcgagggcgctgttctgcggaatgttcgaacgcaaagatagctgcaatgtgcagaagggccgatttggacaggcatttgctgagcagattgccagcactccaggatgtaaggtcccagaatatcttcaaaaggccatccagcatgtttgtcagggaacggacaaactatga

SEQ ID NO: 79775 - DNA, 1731 bp, Salmonella enterica
atgaaactctcagacgagcagaaaaatataatcaatgcgcctttgggaccaatcgctgttactgcttgtgctggaagtggaaaaacggctactgccataaggcgtctgattgctattaggcagaagatgaaaggaaaccgaggtcgcgtcgtgcttttatccttctctaatgttgcggtcaatactttcaataaaggatatgctcagctcgcctcagttttaccggacgacgctaatcgaaaacgtgtagaagtcgatacgcttgatggttttttcacccaatacatattacgccctcatgcttaccggacaatgggagcgaagcaggctgcgtatctggtttcaggctctgagccttttctttccagctttcaatactggcctgaagaaggtcaccctctgccgcttaaggacataagaataggtatacagaatggaaatatcttcttcaccaattcaaacggtggggcagagaaactcaatactgttagagcgttaaaagcggttatgtctttgggacaaaccggagcctacactcatgaacttggacggtattgggtgtatcagactttagtctctcaaccggcagtactacgtgccctggcggcccgctatccacatatccttgttgatgaggcccaggacttggggacattgcatcaggccatcctggaattactgatcgatgctggagtgcaggtctctctcatcggagatgtccaccaggggatatatggcttcgcgggcgctgatggttcatttctgaaaacttatacggaacgtgctgacgtaacaggctacaagcttactcgcaattatcgctctctaccttcgatcattaatattgccaatttgctatgtgaccgtgatgatgaacctgatcgggagaccgaaaaaggcggagcatatttcatcgggtaccaggaatccgaactgcccaaattgtttgaatcatttcatgcacacattcaagaattaggcatgcgacatcaggatgcggtaattctcagtcgtggggcggaccgggtggcaaaactggcggggaatgcaactccgcccgggcgaggtacgatagcgacattatcagaagctgcgttgctacgagatcagaacggcctatatcatgagtgctttaaatgtgtatgcagggcagttgttggattgctggctaatcctccacatgggctcagttcaaatcttcagggttcacctcatgaaacctggatgctggggctgagacgattattatggaacttcagccgcaacgctgataccggattaccatcttccaagttaatagctaaaactgaatggcatactaatctcgtgaaaaatgtcagagctcttctcgcagatattgagaaacagtatgggttcaagacagtaggtacgcttggcaacagactggcgaaaacagctttgacggatttccccctgatcggggaagttaaacctaaagataattgccatggaatgagggtggaaactgtccaccaggtgaaaggtgaatctataggagcggttttgcttgtagcaaccaaagctaatgtcaaagcgttactttcaggtacaagtggtgaagaaggccgaattgggtatgtagcgattacaagagctaagaatttgtttttacttgctgtccctcagtctaatctaaaagagttgcgaggagaccttattactgctggatttcaagaaagacgtgagccggtcatgaatgaatgcgtctag

SEQ ID NO: 79776 - DNA, 1704 bp, Salmonella enterica; identical to SEQ ID NO: 73676

SEQ ID NO: 79777 - DNA, 1623 bp, Salmonella enterica
atgatagattttacccatgagcaaaaagcagcaatagattacccatctagtatggtattgacggcttgtcctggaagtgggaaaacagcagtaatcgtagagaagattgtccgtgacttggtagaatgcaaggaatatcagggtgttattgccatatcgtatactaacaaagcaagcgatgaactgaaaaagagatgtttaaaggctactccaaattcaaaatcaagcttttttgggacaatagataaattttatttgactgaagttattttaccattcattaagcaattatggggaagagttgatgacttacatgtagttaagcttaatgagttagcttcttctgaaaaagataggctttctgctttttttaatgtcgaattcatttgtgaaaaaattaatgagtatgattttaaggatataaaggaactatacgccaatggtattctaatactggagtttataccattgcttgcattttatatattgcgtaactcgttagcatgtcgccgatatatcgctaaaaaatacacatctatatatattgatgagtatcaagatgctggatgtgttcagcatcttctttttctttatcttttcgaacttggagtaaaagcggttgcagttggtgatgctgaccaatccatatattcatatgcgggtaaaagttcgaaatacttaatgtctttactggatgaaaaaagtggctttgccccttttaaaataactataaatcatcgttctcattcatctatagttaattatgcttctcgattgttgaatgaaaactgtgacttgttaataacagatgaaattcgtgtctacagaaaaactgttaatggtactcaatgtgaaatagctaagtggattgatgctaatattaacaatattaaacgaaagttcaatatttcaaaagaaaaagagatagcgatacttactgcaacgaatagttctgtcgctttagtatccggccttataaactccaaagcaagagcatatcttgatgatgagctgtctgtactcggtggagatgtgtctctcttattaaagaaccttttgaattatcgatttaataaaacgattacagcacaggctatcattgaaagtttaaattacaaggtgctagagaggaatgcaataagaaagatgaggggggttattagagatgtgagagattctaatgacaaccaacttattcctgatttacgtaaggcagtaaaattattaatcaacgctgatatttctgctaaccatattgatgccattaactcaatcttacacaataaaatgatgctaaataattatttaccagttagtgatgatgagttacaaataatgactttacataaagcaaaaggactagagttcgactttgtttttcatttggatctttatgattggatattaccgcgaagggaatatataaaacattgttttgatgaggttttttcacattatgagcaatgtctgaatcttcattatgttggagttactagggccaaaaaagctgtggtattaataaattctactgagcgtttaaattatcagagtgaattaaaaaaagcgaaaccatctcagttcttgtcactaaaaggacttgaaagtctgtataaaaaaatttaa

SEQ ID NO: 79778 - DNA, 1926 bp, Salmonella enterica; identical to SEQ ID NO: 72180

SEQ ID NO: 79779 - DNA, 1662 bp, Salmonella enterica; identical to SEQ ID NO: 72181

SEQ ID NO: 79780 - DNA, 1926 bp, Salmonella enterica; identical to SEQ ID NO: 72180

SEQ ID NO: 79781 - DNA, 1662 bp, Salmonella enterica; identical to SEQ ID NO: 72181

SEQ ID NO: 79782 - DNA, 1926 bp, Salmonella enterica; identical to SEQ ID NO: 72180

SEQ ID NO: 79783 - DNA, 1662 bp, Salmonella enterica; identical to SEQ ID NO: 72181

SEQ ID NO: 79784 - DNA, 1926 bp, Salmonella enterica; identical to SEQ ID NO: 72180

SEQ ID NO: 79785 - DNA, 1662 bp, Salmonella enterica; identical to SEQ ID NO: 72181

SEQ ID NO: 79786 - DNA, 1926 bp, Salmonella enterica; identical to SEQ ID NO: 72180

SEQ ID NO: 79787 - DNA, 1662 bp, Salmonella enterica; identical to SEQ ID NO: 72181

SEQ ID NO: 79788 - DNA, 1926 bp, Salmonella enterica; identical to SEQ ID NO: 72180

SEQ ID NO: 79789 - DNA, 1662 bp, Salmonella enterica; identical to SEQ ID NO: 72181

SEQ ID NO: 79790 - DNA, 1926 bp, Salmonella enterica; identical to SEQ ID NO: 72180

SEQ ID NO: 79791 - DNA, 1662 bp, Salmonella enterica; identical to SEQ ID NO: 72181

SEQ ID NO: 79792 - DNA, 1926 bp, Salmonella enterica; identical to SEQ ID NO: 72180

SEQ ID NO: 79793 - DNA, 1662 bp, Salmonella enterica; identical to SEQ ID NO: 72181

SEQ ID NO: 79794 - DNA, 2298 bp, Enterobacter hormaechei subsp. oharae; identical to SEQ ID NO: 79714

SEQ ID NO: 79795 - DNA, 1833 bp, Enterobacter hormaechei subsp. oharae; identical to SEQ ID NO: 79715

SEQ ID NO: 79796 - DNA, 1785 bp, Enterobacter xiangfangensis; identical to SEQ ID NO: 75898

SEQ ID NO: 79797 - DNA, 1818 bp, Enterobacter xiangfangensis; identical to SEQ ID NO: 75899

SEQ ID NO: 79798 - DNA, 1785 bp, Enterobacter xiangfangensis; identical to SEQ ID NO: 75898

SEQ ID NO: 79799 - DNA, 1818 bp, Enterobacter xiangfangensis; identical to SEQ ID NO: 75899

SEQ ID NO: 79800 - DNA, 1785 bp, Enterobacter xiangfangensis; identical to SEQ ID NO: 75898

SEQ ID NO: 79801 - DNA, 1818 bp, Enterobacter xiangfangensis; identical to SEQ ID NO: 75899

SEQ ID NO: 79802 - DNA, 1785 bp, Enterobacter asburiae; identical to SEQ ID NO: 75898

SEQ ID NO: 79803 - DNA, 1818 bp, Enterobacter asburiae; identical to SEQ ID NO: 75899

SEQ ID NO: 79804 - DNA, 1785 bp, Enterobacter asburiae; identical to SEQ ID NO: 75898

SEQ ID NO: 79805 - DNA, 1818 bp, Enterobacter asburiae; identical to SEQ ID NO: 75899

SEQ ID NO: 79806 - DNA, 1785 bp, Enterobacter xiangfangensis; identical to SEQ ID NO: 75898

SEQ ID NO: 79807 - DNA, 1818 bp, Enterobacter xiangfangensis; identical to SEQ ID NO: 75899

SEQ ID NO: 79808 - DNA, 1785 bp, Enterobacter xiangfangensis; identical to SEQ ID NO: 75898

SEQ ID NO: 79809 - DNA, 1818 bp, Enterobacter xiangfangensis; identical to SEQ ID NO: 75899

SEQ ID NO: 79810 - DNA, 1785 bp, Enterobacter xiangfangensis; identical to SEQ ID NO: 75898

SEQ ID NO: 79811 - DNA, 1818 bp, Enterobacter xiangfangensis; identical to SEQ ID NO: 75899

SEQ ID NO: 79812 - DNA, 1785 bp, Enterobacter asburiae; identical to SEQ ID NO: 75898

SEQ ID NO: 79813 - DNA, 1818 bp, Enterobacter asburiae; identical to SEQ ID NO: 75899

SEQ ID NO: 79814 - DNA, 1785 bp, Enterobacter xiangfangensis; identical to SEQ ID NO: 75898

SEQ ID NO: 79815 - DNA, 1818 bp, Enterobacter xiangfangensis; identical to SEQ ID NO: 75899

SEQ ID NO: 79816 - DNA, 1785 bp, Enterobacter xiangfangensis; identical to SEQ ID NO: 75898

SEQ ID NO: 79817 - DNA, 1818 bp, Enterobacter xiangfangensis; identical to SEQ ID NO: 75899

SEQ ID NO: 79818 - DNA, 1785 bp, Enterobacter xiangfangensis; identical to SEQ ID NO: 75898

SEQ ID NO: 79819 - DNA, 1818 bp, Enterobacter xiangfangensis; identical to SEQ ID NO: 75899

SEQ ID NO: 79820 - DNA, 1785 bp, Enterobacter xiangfangensis; identical to SEQ ID NO: 75898

SEQ ID NO: 79821 - DNA, 1818 bp, Enterobacter xiangfangensis; identical to SEQ ID NO: 75899

SEQ ID NO: 79822 - DNA, 1785 bp, Enterobacter xiangfangensis; identical to SEQ ID NO: 75898

SEQ ID NO: 79823 - DNA, 1818 bp, Enterobacter xiangfangensis; identical to SEQ ID NO: 75899

SEQ ID NO: 79824 - DNA, 2406 bp, Pseudomonas psychrotolerans
atgaagctacaggcatatcggctgcagaactatcgccgactgcgcgatgccgtcattgagcttgacgacgagatttctatctttgttggtgccaacaacagcggcaagacgtctgccatacaaggcctgtactcgatgcttcgtggcgaaacgaagaggttcgaactcttcgacttcagcgcggcgctgtgggccgagatcgacgccattggcacgatgcctccaggtgatgagaacgcgcccaagcagttgccgtccattcgtttggatctttggttccgcgtcgatgaagacgaccttgccactgcaatgtcgcttcttcccagcacggaatgggacggtaagtgtgtcggggtccgggtggcgttcgagcctcgggacgcccatgcgctgttgcggaagttccatgaattgcatgaaaaggggatcaacgctgcggccgcacttgtagccaagcgcggtgcatccgcggaggtaggcgcggcaaatggcccttcggcggtggtagatcccggcgagtacaagccctggccggaaagtctgacaaaatacctcaccaaggagctgagtaaggaatatacgttccgctactacgttctcgatgagcgcgcatttgtcggctatcaggttaaggaggctgattatgagccgctgcctctaggcaatgagccgggtggcgccgcaattcttaagtctctggtgaaggtagacttcctgcgtgcgcagcggcacctcgatgacccggatgctggcagctccgaccgcgccgagagtttgtcgcgacgtctgagccgtttttatcaccgcaatctggagaaacgtggcgacgaccatgcagcgctcaaagcgctcgatacctcggagaaggaactgaacttccatctggaggaagtcttcggcgacaccctcaagcgcctcgccaaactcggctacccaggcgttaacaaccccgagatagtaattcgggcggccttggatccgaccactgtcctggggcaggatgccagggttcactacgtgattcctggtgcggtcaccgcgcaactgcctgacagctataacggcttggggttcaagaacctagtctatatggtagttgaactcctcgacctgcatgagcagtggaaagccgaggaagacaaacgggcaccactgcatctggtcttcattgaagagcctgaggcgcatctgcacgcgcaaatccagcaggtcttcatcaggaacgttctgcgcctccttgaggatgccaacgatcacgcgacgtttttccacacgcagctcgttgtcaccacgcactccccacatatcctctatgagcgcgggttctcgcccatcaggtacttccgccgtgttagcgaccaattggcccataacaccgaggtaaggaatctttcgctcttcaaaacgggcgcggccgacactccagcgcgcgaatttttgcagcggtatctgaaactcacacattgcgatctcttcttttccgatgcagtcatattggttgagggcaatgtcgagcgcctgctattgccagctatgatcgagttggcagctaaacgcctgcgctcctccgccctgaccatccttgaagtcggtggcgcattcgcgcatcggtttcaagaattaatcgcctttgttggactcactacgctggtaattacggatttggacagcgtaatggtcaaggcggatgctgaggatgtcgccgagcaatgtgcaggagctgacggcaccgtagacggagataacgaggacgacgacctgaagcccttcgagctcgaagacgacgacgaggcagcaccgggcggcaagaagaagtccaaaaagcgtggcagcacatgccatgctcatgtggacggtgccgtcacgtccaaccaaacccttattagctggatccccaagaagcggtcggtggccgaactctgggaagtcacggcggcgcaaaagacactatcgcttgccgagggctccagcgctgaggttcgggtagcctatcagaccaaaattttggtgacggtaggaggcactacctcgcagctctgcggccgcacgcttgaggaggccttcggtcttgagaactatgattggtgtcaggcagaggctaaccgggcggtcggacttaagctgaagcacgtaccaaacagtcctgaggaactggctgagaagttacataatagagtgatcggcaagaacttcgacaaaactcgctttgcgctggaggtcctcgcaagcgggccgctcaactgctggaaggtgcctacgtacatcgccgagggcttagcctggctcgaagccaaagtggcgcatgaaattgaggcggacgcggctattgccaccgaggtcgcgacaattgagccgaatgtggccggttttgtcggcgtccttgcagacgtggggcagacggcatga

SEQ ID NO: 79825 - DNA, 1932 bp, Pseudomonas psychrotolerans
atgagcagacgaattgatagcccagacaccgacgccgaccgcgagatccacgcctgtattgctgcgacaccaccgcagtcgttcgttgtccgcgccggcgcaggttccggtaagaccacttccctcatcaaggcgatggactgggtgatctcagagcacggagtcagcatgcgggcgaaaaagcaaaaggtcgcctgcatcacatataccgacctcgccgccaaagaaatcttggcggatgttaacgatgatccgctggtccatgtctctaccatccatagcttctactggtctattaccaagacgtttcaggcggacatcaaggtttggctacagaacgacatccatagacggatctccgagctggaagaagagttcaagaactacagctcgcgtgttcggcagactacacgcgacaggaacaaggctgaccagggtcgttatgttcgaaatctggaggctatttctggcgtcaagacttttaattatggcgtggggagtgactacgcgaaaggtatcttaggccacgaggacatccttcaactcaccgatttcctgctacaaaatcgcccgctgtttcgacgggtcgtagcgttgaacttcccgttcgtgttcatcgatgagagtcaggacacgttcccgagcgtagtgaagtcattcaaggaagtggaagcccagatgcggcgcaagttctgtctcggtttttttggcgatccgatgcaggcgatctttatgcgaggggcagggaacatcccgcttgaggaccattggcggcctatcacgaaaccagagaattttcgctgtgctaagcagatccttgatgtcgccaacgccgtgcgcgcgcagggcgacggcatgcagcaagtccgagggctgcacgaaagggttgatggacatctcaagccggtggaaggctcggcccggatgttcatcctgtcgaacacgctgaaccgaattgaagccctggcaagagtccgagagtggagtgcggcaacgaacaacgacgatggttggacgacctcagacagcgcgctcaagattcttgtcatcgtgcaccgcatggccgcaaaccggcttggcttcggtggcatctactcggcgctgaacgataggacatcggagggaatgaagcaggggatgcaggatggcagcggatggcccgttcgaccctttctaagttttgcgctaccgatcattgccgccgtgaaggccggcgacgagttcaaggcgatcagcctgcttcggaagttcagcccgcgtttagcgccaggggctatcgccggccaacgtgccgcggctgtgttgcgagaactgcacgccgctatgtcgaaacttgtcgtcatgctggacgaggcaggaaccaccattggtgacatagcactccatctctgtgacacgggtcttttcgagttcgacgatcgctacgcgcgtgtccttggatttttcagagatgtagctgacgctgctcgggagcccggggctgctgatgcagttccggccgaaggactatcctcggacgcggcaatggccaaattcttcaactgctctgcacaagaactttggccctatgagcgctacatctcagaaagctctccctatgctacacagcacggtgtgaagggcgcgcagtttgaacgtgtcatggtggtgatggacgaggaagaaagcgactaccgaacgtacaattacgagagtgtattcgcgagtgctgaggcgcgtgctgcagatcgggcgcgagcactgggcggtgatgaaaacacttggagccgaacgctgcgactgctttacgtctgctgcactcgcgcccagcgtggtctggtattaacgttctttgtcactgatccggcgaccgccctggaaaacgtcgttgcgagcgggatcttaccgcgaagcgcggtctttacgcaggaagtgttagctgtagggtcatag

SEQ ID NO: 79826 - DNA, 2406 bp, Pseudomonas psychrotolerans
atgaagctacaggcatatcggctgcagaactatcgccgactgcgcgatgccgtcattgagcttgacgacgagatttctatctttgttggtgccaacaacagcggcaagacgtctgccatacaaggcctgtactcgatgcttcgtggcgaaacgaagaggttcgaactcttcgacttcagcgcggcgctgtgggccgagatcgacgccattggcacgatgcctccaggtgatgagaacgcgcccaagcagttgccgtccattcgtttggatctttggttccgcgtcgatgaagacgaccttgccactgcaatgtcgcttcttcccagcacggaatgggacggtaagtgtgtcggggtccgggtggcgttcgagcctcgggacgcccatgcgctgttgcggaagttccatgaattgcatgaaaaggggatcaacgctgcggccgcacttgtagccaagcgcggtgcatccgcggaggtaggcgcggcaaatggcccttcggcggtggtagatcccggcgagtacaagccctggccggaaagtctgacaaaatacctcaccaaggagctgagtaaggaatatacgttccgctactacgttctcgatgagcgcgcatttgtcggctatcaggttaaggaggctgattatgagccgctgcctctaggcaatgagccgggtggcgccgcaattcttaagtctctggtgaaggtagacttcctgcgtgcgcagcggcacctcgatgacccggatgctggcagctccgaccgcgccgagagtttgtcgcgacgtctgagccgtttttatcaccgcaatctggagaaacgtggcgacgaccatgcagcgctcaaagcgctcgatacctcggagaaggaactgaacttccatctggaggaagtcttcggcgacaccctcaagcgcctcgccaaactcggctacccaggcgttaacaaccccgagatagtaattcgggcggccttggatccgaccaccgtcctggggcaggatgccagggttcactacgtgattcctggtgcggtcaccgcgcaactgcctgacagctataacggcttggggttcaagaacctagtctatatggtagttgaactcctcgacctgcatgagcagtggaaagccgaggaagacaaacgggcaccactgcatctggtcttcattgaagagcctgaggcgcatctgcacgcgcaaatccagcaggtcttcatcaggaacgttctgcgcctccttgaggatgccaacgatcacgcgacgtttttccacacgcagctcgttgtcaccacgcactccccacatatcctctatgagcgcgggttctcgcccatcaggtacttccgccgtgttagcgaccaattggcccataacaccgaggtaaggaatctttcgctcttcaaaaagggcgcggccgacactccagcgcgcgaatttttgcagcggtatctgaaactcacacattgcgatctcttcttttccgatgcagtcatattggttgagggcaatgtcgagcgcctgctattgccagctatgatcgagttggcagctaaacgcctgcgctcctccgccctgaccatccttgaagtcggtggcgcattcgcgcatcggtttcaagaattaatcgcctttgttggactcactacgctggtaattacggatttggacagcgtaatggtcaaggcggatgctgaggatgtcgccgagcaatgtgcaggagctgacggcaccgtagacggagataacgaggacgacgacctgaagcccttcgagctcgaagacgacgacgaggcagcaccgggcggcaagaagaagtccaaaaagcgtggcagcacatgccatgctcatgtggacggtgccgtcacgtccaaccaaacccttattagctggatccccaagaaacggtcggtggccgaactctgggaagtcacggcggcgcaaaagacactatcgcttgccgagggctccagcgctgaggttcgggtagcctatcagaccaaaattttggtgacggtagggggcactacctcgcagctctgcggccgcacgcttgaggaggccttcggtcttgagaactctgattggtgtcaggcagaggctaaccgggcggtcggacttaagctgaagcacgtaccaaacagtcctgaggaactggctgagaagttacataatagagtgatcggcaagaacttcgacaaaactcgctttgcgctggaggtcctcgcaagcgggccgctcaactgctggaaggtgcctacgtacatcgccgagggcttagcctggctagaagccaaagtggcgcacgaaattgaggcggacgcggctattgccaccgaggtcgcgacaattgagccgaatgtggccggttttgtcggcgtccttgcagacgtggggcagacggcatga

SEQ ID NO: 79827 - DNA, 1932 bp, Pseudomonas psychrotolerans
atgagcagacgaattgatagcccagacaccgacgccgaccgcgagatccacgcctgtattgctgcgacaccaccgcagtcgttcgttgtccgcgccggcgcaggttccggtaagaccacttccctcatcaaggcgatggactgggtgatctcagagcacggagtcagcatgcgggcgaaaaagcaaaaggtcgcctgcatcacatataccgacctcgccgccaaagaaatcttggcggatgttaacgatgatccgctggtccatgtctctaccatccatagcttctactggtctattaccaagacgtttcaggcggacatcaaggtttggttacagaacgacatccatagacggatctccgagctggaagaagagttcaagaactacagctcgcgtgttcggcagactacacgcgacaggaacaaggctgaccagggtcgttatgttcgaaatctggaggctatttctggcgtcaagacttttaattatggcgtggggagtgactacgcgaaaggtatcttaggccacgaggacatccttcaactcaccgatttcctgctacaaaatcgcccgctgtttcgacgggtcgtagcgttgaacttcccgttcgtgttcatcgatgagagtcaggacacgttcccgagcgtagtgaagtcattcaaggaagtggaagcccagatgcggcgcaagttctgtctcggtttttttggcgatccgatgcaggcgatctttatgcgaggggcagggaacatcccgcttgaggaccattggcggcctatcacgaaaccagagaattttcgctgtgctaagcagatccttgatgtcgccaacgccgtgcgcgcgcagggcgacggcatgcagcaagtccgagggctgcacgaaagggttgatggacatctcaagccggtggaaggctcggcccggatgttcatcctgtcgaacacgctgaaccgaattgaagccctggcaagagtccgagagtggagtgcggcaacgaacaacgacgatggttggacgacctcagacagcgcgctcaagattcttgtcatcgtgcaccgcatggccgcaaaccggcttggcttcggtggcatctactcggcgctgaacgataggacatcggagggaatgaagcaggggatgcaggatggcagcggatggcccgttcgaccctttctaagttttgcgctaccgatcattgccgccgtgaaggccggcgacgagttcaaggcgatcagcctgcttcggaagttcagcccgcgtttagcgccaggggctatcgccggccaacgtgccgcggctgtgttgcgagaactgcacgccgctatgtcgaaacttgtcgtcatgctggacgaggcaggaaccaccattggtgacatagcactccatctctgtgacacgggtcttttcgagttcgacgatcgctacgcgcgtgtccttggatttttcagagatgtagctgacgctgctcgggagcccggggctgctgatgcagttccggccgaaggactatcctcggacgcggcaatggccaaattcttcaactgctctgcacaagaactttggccctatgagcgctacatctcagaaagctctccctatgctacacagcacggtgtgaagggcgcgcagtttgaacgtgtcatggtggtgatggacgaggaagaaagcgactaccgaacgtacaattacgagagtgtattcgcgagtgctgaggcgcgtgctgcagatcgggcgcgagcactgggcggtgatgaaaacacttggagccgaacgctgcgactgctttacgtctgctgcactcgcgcccagcgtggtctggtattaacgttctttgtcactgatccggcgaccgccctggaaaacgtcgttgcgagcgggatcttaccgcgaagcgcggtctttacgcaggaagtgttagctgtagggtcatag

SEQ ID NO: 79828 - DNA, 2406 bp, Pseudomonas psychrotolerans; identical to SEQ ID NO: 79826

SEQ ID NO: 79829 - DNA, 1932 bp, Pseudomonas psychrotolerans; identical to SEQ ID NO: 79827

SEQ ID NO: 79830 - DNA, 1995 bp, Sphingomonas yabuuchiae
atgtatctacagcgcgttcagcttggaaactttcgatcgttcgataccgcccggctcgagttgcagaaggatctgacggtcttcgttggcgagaataacggcggcaagagcaacgcgatcgacgcaatcagacttttgacggcgccgctgagtgggcgtcgcgaactgtattgcgaaccgacagatgtccgcttccaatgcggtgcgtcccattttgaactcgaggcccatttttctggactttcggcgggccagcaggggcgacttctctcggccgtcaccgatgcgagcatgaccagcgcttgtttcgggctacgctatggcggctcgcaggtcggcgccaagccggtcctttgggcgggcaaggaaggcaatccgcccgaagcgaactgtcacgacatggttcggcacgtctatctgccaacgctacgggatgcgaaacgcgccctcgcatcgggaaaccccacgcgcatccttgcgctcctccatcactttctcgaaggtacgaccgccaacgaactcgctaaggaacttggccgctcgcactcccacgacgttctcacgaaggtcgacaccgccgtcgagaaagggctcgcggcactgaccggcggcgtccgtcgccagacggcgtcgctcggcttcgccgcggacgaagccctcatcgacatcgcccgcgacttacggttcaagctcgccgatcacggcgttgatcccgaggatctgcgttactccgggcatggctatgcgaacctcctgtacatggcgatcatcgcggtcgaactggaaaaggttcgcacggccgacctgaccgtcttccttgtcgaggagccagaggcgcatctccaccctcagcttcaagcggcggtcctgtccttcttacgcgaccaggcgaaacagtcgcgagaatccccgccgaccgatcatggacctgctggcgaattgcaagtcgtcgtcgccacccactcgcccaatctatcagcgtgggtcagcagcgatcgactcgtcgtgttcaagtccgtggttacgtcctcaagccaaagcgcggcgggcgaagagcagaccaaacctgcctcgcttgacgctggcatcattgaaaatgtcctttcctccgatacgccggctgatccggaagccggtgctgagtcggtggcggaagccatatcggcggccgtgccgcgccgggccacgcgctgcatgccactcgcgaacatgcccctggtggacggcgaccgtcgaaaggttgatcgatatctcgacgtcaccaaggcggccctgctgtttggtggacgagcattgctcgtcgaagggatcgcggaggcgcttctcctacccgcgatcgccaaacatcatgtgctcaaaggtcatcccgataagctgcggctgttccgatcagccgttttcatcccgatcgatggcgtcgatttcgcgccctacgtcacgctcctgcttaccgaacttgaaggtgcgcggatcgccgaccgtgtcgtggttgtcaccgacggcgacaagggcctcaagatctacgacgacgaggtggaagccgatgccgatgccgatgccaatgccgatgccgctgatgaggtgacggagacctctgaagatgacaatggtgcgccttccatcgaggatgatgaagcgatcatccctggcgaacggcgcaaggcgacgcttgagaagctcactaaggccatgggcgcgagcgacatgttcgtcgccatcaccagcacctattccctcgagactgagctgatcgaggcaggcaatgctgcaatcctcgaaaaggcctatctcgagctccacccgcgctcaaagaaaaagtggcaaaacgccgtagcgaaagcgggcgacgaccgcgcccgcgcgatccacaagatcttcaaggccgcccgcaagggcgacttcgcgcaggtgctcgcgcgcctcatcgaggacggggaggcgttcacagtgcctacctatatcgcgaccacgatcgaacggttggtcgagacgtga

SEQ ID NO: 79831 - DNA, 1725 bp, Sphingomonas yabuuchiae
gtgaccgacacctattcgccaacggacgagcagtctgcgatcgtcaaccatgatggccccgcgttcgtgaccgcctgtcccggcgcgggcaaaacgcgcaccatggtggagcgcgcacgtcacgtccttgcggatcgcacggatcggcggggcatcgccttcctgtcgtttaccaacgccgcgatagatgaattggaaatgcggctgagagctttcggagttttgccttcaccgctcttcccgagctttatcggcacgtttgaccggttcctctggcaattctttatagccccctttggcatacccggatgtgacgagacgccccgcctcattcccgacaagccagcctggaccgttcagccattcccaggcgcgcaggccttacccctcagcgccttcgatagaaagacgagcgcattggatcggcggctcgctgctgatgtcgggtttccggccaatcgtgatgccacccgccacgagacccgcgctcgcaatatcctcgcagccgcgcgaaaacgaggtcaggtcgatttcgaagatgtgcgggaatgcgtgaaagagcggctgaacgacacgggtttcgccaagcggctggggcaggccctcgcggcgcgtttccgtgaaatcgtggtagacgaggcgcaggactgtaaccccgccgaccttgaaatcgtgcaatggctccgaaactccggtccgatcgtgaaagtgatctgcgatccgaaccagtcaatctatcagtttcgcgggggagttgccgacgagttgaccgccttcggcgattgtttttccccgagtgatcgcctcccaatgagcggcaatttccgctccacacccgcaatctgctcggcgatcgtcgcccttcgacctccatcgctgcgtgaccgtcccgacgaagcgctgggccgctacaaggccgatctgacgccggtgcatatcatgtcctatggcggctctggcgttccgtctacgatcggcgcgaagttcaccgaactcgccaaatcacttggcattctcccggcgaacgcgccaatattggcatcgaccttggcgagcgccgccaaagcgatcggacgtccgacgcttggcccaaccgagcacatgacgttggtcctcgctcaagcggccacgagttaccatttctcattcggtatcgggaatcgacgcgaggcgctggtcgctctccacaggacgatactactgctccaagggcacatcgacaccgcaggcgattatcacagttacattgcggctaaaggcctcgatgatggccggtggcgaccggaaatcatcgagatcgcggcggcacttcgctttaatgccggtatggacgctgcgaaatggctcgacggcgcgaggacccttctcgcacaggggctttcgggaaccagcacgatcggtcagcgcctgagattgagttccgatctcgcaaccgccttagccgtcccaccagcggaatcccaccccgcccggacaatacattcggcgaaggggctcgagtttccggctgtctgcgtagtgctgaccagccagaaaacgggagacattctttcgcatcttgaggggaccgaaggcggaacctccgccgaagacgcgcgaaagatatacgtcgccgcctcaagggcccagcgcctactcgtgattgcgattcccaaaagtcgtgcatcgcgattgcagtccctattggcgagctcaggctgcgcgctaatcgttcacgagctctag

SEQ ID NO: 79832 - DNA, 1926 bp, Salmonella enterica subsp. enterica serovar Typhimurium var. 5-; identical to SEQ ID NO: 72180

SEQ ID NO: 79833 - DNA, 1662 bp, Salmonella enterica subsp. enterica serovar Typhimurium var. 5-; identical to SEQ ID NO: 72181

SEQ ID NO: 79834 - DNA, 1704 bp, Salmonella enterica subsp. arizonae serovar 18:z4,z23:-
atgtatattgataatgtatatttaaagggatttaggaactattccgatagtttcattaaatttaatcattcaactcttataattggtagtaatgacattggtaaaacaaacctattgtattcattaaggattttgttagataagagtttttcagatttagatttagaacctaaaaatagcgattttcacattgatgcaaaaggaaatcaatgtgaagagttagaaataataattaattttcgtgagataaaagaggatgccgttctctctaagttagcggggtatgtcagtgaggatgcgcaaacatacatcaaatataaagcgcacagaactactcttgattacaaattatatatagggcacaaagaatccgaaatggatgagattagtggtagattttatcttaaatatctaaatttacgctatgtgaattcacaacgagatcttgctaaatatatatctacagagaaaaaacatttacttcggcttgctcaagaaatgagaagcgaggaacaggttaggaaggatgaaaatactttaaattcattaactgatttactaaatgatgttaataataaggtaaaagaaataagctacgtttcgaccgctacggaagagttaaatgatgagttgaagaaattatcatataacaatgaaaaggtttctgtaatgctcgattctggagcaattggtgttgatcagtttattgaaaaattagaattaagttcaaatacaaatggaaaaaaggtaatgcttggaggggatggattcaataaccaagtattgcttgcattatggaaagccaagagtgtacgcgaacatgacactgaaaatgaagtggttatatattgcgtcgaagaacctgaatcacacctttatccgcaccaacagagaaaactatctgagtatttaattagtaaattgccggggcagtcactagttactactcactctccacaaattgccgttaattattcaccggattcgataattaaaatttgctcttataacggcgaatcttacgcagcaagtgaagggtgttctgattgtattagtgatgcatggagtggaatgggatacaggatgagtatactcccagcagaggcattcttcgctaatgtcgtatttttggtcgaaggaccttctgaaatgttgttttatcaggctcttgcaaaagagtgccaaattgatcttgatttttttaatataagcatattatcagttgatggcgttcaatttgaagtttataggaaaatacttgatgcattcgagattaaatgggttgctcgtacagacaatgattcgtctaaagttccaaagaaaaaagagtggcaatattcaggtttaaatcgagctttggttctatgtggtatgaaaccactaaagaatgagttaatggaaatatctcaagttcaaaggatagagaaacataaagtttataaagacgcacttaaacgtaataatatatttgtttcaattaatgatctcgaaggtgatattagcgttgagttaagcaagcaactgaaagaatatgtaggtgttgataatgaggaaattgctgctgattatctaagggggaaaaaagcaataagaatgcaagagttcttgagagaatactctcatgcacttaaaaccatttcaacaggtgaattaattcaaccccttttgactgccgtaaaactggctacagaggagttgaaatga

SEQ ID NO: 79835 - DNA, 1623 bp, Salmonella enterica subsp. arizonae serovar 18:z4,z23:-
atgataaattttacccatgagcaaaaagttgcaatagattacccatatagtatggtactgacggcttgtcctggaagtgggaaaacagcagtaatcgtagagaagattgtccgtgacttggcgggatgcaaggaatatcagggagttattgctatatcgtatactaacaaagcaagcgatgaactgaaaaagagatgtttaaaggctacaccaaattcaaaatcaagcttttttgggacaatagataagttttatttgaccgaagtgatttatcaattcattaagcaattatggggaggagttgatgatttacatgtagttaagtttaatgagctaaattcttctgaacaagataggctttctgctttctttaatgtcgaatccatatgtgaaaagattgatgagtatgattttaaggatgttaaggaactatacgctaagggtattctaatactggaatttataccattacttgcattttatatattgtgcaactcgttatcgtgtcgccgttatatcactaaaaaatacacctctatatatattgatgagtatcaagatgctggatttgtccaacatcttctttttcttttgcttttcgatcttggaataaaagcagttgcagttggtgatgttgaccagtccatatatttatatgcgggtaaaagctcaaaatacttaacctctttactggataaaaaaagtggattcaccccttttaaaataactataaatcatcgctcacattcatctataattaattatgcctctcgactattgaatgaaaaatctgatttgttaattactgatgaaattcgtgtctacagaaagcttgttaatggtactcagcgtgaaatagccaagtggattgatattaatattgacaatattaaacagaaattcaatatttcaaaagaaaaagaaatagcgatacttactgcaacaaatagttctgtatctttagtatctggccttataaattctaaagcaagagcatatcttgatgatgagttatctgtgcttggtggagaagtatctattttgttaaagagccttttaaattatcgttttaataaagtaattacagcacaggctatcattgatagtttaaatcacaaagtactagaacgaaatacaataaggaaaatgcggggtgttattagagaggttagggattctgatgatgaccaacttattccagctttacgcaaggcaataaaattattaatcagcggtgatatttcagctcaccatattgatgccatcaactcaattttacacaataaaatgatgctaaataattacttgccagttggtgatgatgagttacaaataatgactttacataaagctaaaggactagagttcgactttgtttttcatttagatctttatgattggatattaccacgaagagagtatataaagggttgttttgatgaggttttttcgcaatatgagcaatgtctgaatcttcattatgttggggtcaccagggcaaaaaaagctgtggtattaataaatactaccgagcgtttaaattaccagggggaattaaaaaaagcgaaaccttctcagttcttgtcactaaaaggacttgaaggtctgtataaaaaaatttaa

SEQ ID NO: 79836 - DNA, 1704 bp, Salmonella enterica subsp. arizonae serovar 18:z4,z23:-; identical to SEQ ID NO: 79834

SEQ ID NO: 79837 - DNA, 1623 bp, Salmonella enterica subsp. arizonae serovar 18:z4,z23:-; identical to SEQ ID NO: 79835

SEQ ID NO: 79838 - DNA, 1704 bp, Salmonella enterica subsp. arizonae serovar 18:z4,z23:-; identical to SEQ ID NO: 79834

SEQ ID NO: 79839 - DNA, 1623 bp, Salmonella enterica subsp. arizonae serovar 18:z4,z23:-; identical to SEQ ID NO: 79835

SEQ ID NO: 79840 - DNA, 1704 bp, Salmonella enterica subsp. enterica serovar Braenderup; identical to SEQ ID NO: 73676

SEQ ID NO: 79841 - DNA, 1623 bp, Salmonella enterica subsp. enterica serovar Braenderup
atgatagattttacccatgagcaaaaagcagcaatagattacccatctagtatggtattgacggcttgtcctggaagtgggaaaacagcagtaatcgtagagaagattgtccgtgacttggtggaatgcaaggaatatcagggtgttattgccatatcgtatactaacaaagcaagcgatgaactgaaaaagagatgtttaaaggctactccaaattcaaaatcaagcttttttgggacaatagataaattttatttgactgaagttattttaccattcattaagcaattatggggaagagttgatgacttacatgtagttaagcttaatgagttagcttcttctgaaaaagataggctttctgctttttttaatgtcgaattcatttgtgaaaaaattaatgagtatgattttaaggatataaaggaactatacgccaatggtattctaatactggagtttataccattgcttgcattttatatattgcgtaactcgttagcatgtcgccgatatatcgctaaaaaatacacatctatatatattgatgagtatcaagatgctggatgtgttcagcatcttctttttctttatcttttcgaacttggagtaaaagcggttgcagttggtgatgctgaccaatccatatattcatatgcgggtaaaagttcgaaatacttaatgtctttactggatgaaaaaagtggctttgccccttttaaaataactataaatcatcgttctcattcatctatagttaattatgcttctcgattgttgaatgaaaactgtgacttgttaataacagatgaaattcgtgtctacagaaaaactgttaatggtactcaatgtgaaatagctaagtggattgatgctaatattaacaatattaaacgaaagttcaatatttcaaaagaaaaagagatagcgatacttactgcaacgaatagttctgtcgctttagtatccggccttataaactccaaagcaagagcatatcttgatgatgagctgtctgtactcggtggagatgtgtctctcttattaaagaaccttttgaattatcgatttaataaaacgattacagcacaggctatcattgaaagtttaaattacaaggtgctagagaggaatgcaataagaaagatgaggggggttattagagatgtgagagattctaatgacaaccaacttattcctgatttacgtaaggcagtaaaattattaatcaacgctgatatttctgctaaccatattgatgccattaactcaatcttacacaacaaaatgatgctaaataattatttaccagttagtgatgatgagttacaaataatgactttacataaagcaaaaggactagagttcgactttgtttttcatttggatctttatgattggatattaccgcgaagggaatatataaaatattgttttgatgaggttttttcacattatgagcaatgtctgaatcttcattatgttggagttactagggccaaaaaagctgtggtattaataaattctactgagcgtttaaattatcagagtgaattaaaaaaagcgaaaccatctcagttcttgtcactaaaaggacttgaaagtctgtataaaaaaatttaa

SEQ ID NO: 79842 - DNA, 1926 bp, Salmonella enterica subsp. enterica serovar Typhimurium var. 5-; identical to SEQ ID NO: 72180

SEQ ID NO: 79843 - DNA, 1662 bp, Salmonella enterica subsp. enterica serovar Typhimurium var. 5-; identical to SEQ ID NO: 72181

SEQ ID NO: 79844 - DNA, 2190 bp, Enterococcus faecium; identical to SEQ ID NO: 71696

SEQ ID NO: 79845 - DNA, 1794 bp, Enterococcus faecium; identical to SEQ ID NO: 71697

SEQ ID NO: 79846 - DNA, 2085 bp, Myroides odoratimimus
atgtacatatcaaaaattcaaatcaacaattttagaaactttaagaataaagaaattgactttaatgatggtgttaatgtaattataggacataataatgcaggaaaaactaatttgataaaagccctatcacttataattgattctacaaattcaaaaagattagaagttgacgactttcacaagaacgttactttagcagaattaaaatcagcaccacctaagatcagtatttccataacaataaaaaaaggtaaagaggaagaacctgatgatttagtaactatttcaaattggttgacaaaactagatagtgattatgaagctgtattaacatatgaattttttcttcctgaaaagaaaattgaagaatataataatgaaatgtctctaattgaagatgaagatgataaagcaatacataaagcatggaaaatcttaaaacataattttataagatattatgtttatagaatttggggtggcgatattgttaaccaagcaactgctgatagtgaatcactacagaaaatcgattttcaatttctgaatgccataagagacgtggaacgagatatgttaacaggaagaaatacattacttaaagaagtatttgatttctttatggattatgatataaagatagataccacaaaagataatgaacaaaaatatcaagaaataaaagcaaaaaaaatactattctctgaaaaagcagatttacttgttaaagatttaactagtaggatagaacaaggtaaaaaagaaattttatcatatgcaaaaaaaacaggagcctcatttaataaagctaaccccaactttgaaggttccatatctgaaagtgaaatgtactcagtattaaaactaatcgttgaatatgaagctggaataacgattcctgctacacataatgggttaggatacaataatttaatttttatgtctttactactagcaaaaatgcaagtaaatgcagatataaattatttagatacgaatgctaaggtatttacgacattagcaatagaagaacctgaggcgcacctacatcctgcaatgcaatataaatttctaaagtttttgaatgaaaacaaagcagagaaaaaagttagacaaatttttgtaactacacattcaactcatattacttccgcagtttcattagatgaaattatttgtttacacaatgaaaatggtgaaacatcagtaggctatccaagtaaagtttttatagaagaagaagtattacacaatgataaaagtaaaaaatatgttcaaagatttttagatgcaaccaaatcagatatgcttttttctcaaaaagtattgtttgttgagggaatagcggaacaactcttaatgtcaatctttgctaattacttagacgtgtccctagaagataatcatgttacagtaataaatgttggcggacgatatttttcccattttctttatctttttgatagtgaaaaagaaaatacaatacataaaaaggttgtttgtttaactgatagagatcctgaaagaaaagaaaaaccagatggaaaatataaaaagtgttacccttatgaattaaatatagaccgtgataattttgaatatcgtacaaatattcatgcagactcataccctaaaaacagtcatcctaatattactttctatagccaaccatctgatttaggaaaaacatttgaatatgaattggtttataataatccgtctttaaagttactaattaccgattcgattagtaataaagatgaaatagaacaattaatgatactctacaatacagaaggtaaaacttttgaagatttacttggtaaattagcagatggtgtaaaaaacaacgaaaataaaagaataaaagaaagtattatagctaatgtcgatttatcagatgaacaaaaaaagagagctattattgcttcaaggtatttaaattctattgggaaaggcgaaaatgctttagaattgtgttatgcacttcaagaaaatttaactaaaaaaggtactgctgagtatatagatataattattccaaaatatattaaagaagcaattgaagagttatgccaatag

SEQ ID NO: 79847 - DNA, 1731 bp, Myroides odoratimimus
atgccaatagaaagaatcacatcagataatattttatcagatatagatagacattttaaagtttcagcaggacctggggctgggaagactcattggttagttaaccatataaaaaatgttcttcatcactctgataaacttttcagaactagaaaaattgcatgtattacatatacaaatattgcagtagacacaatccttaaacgtctaggtacttcatcagaacaagttgaagtatcaaccattcatagttttttatatactaacgttataaaaccatatgcattttttatctctaaagaatttggattaaatatctctgaaatagatggtcatgatgaaataaatatttcacatggattgttaagacaatggacagaatcaactaatcaaatttatttaattaatgatagagattctgaggtagctaaacaaaaaagaacaaaggttttaaaggcattagagaatttacaatgggttattacaaatgataacattgatttgaaaatcaatcctaaaaaatcatatttaggtagaattacaccaactatttcaataagaaataatagcttaattgattttaaaaaaatttattgggaaaaaggaattctatctcatgacgatgttcttttctttagttatcatttaatccatagatttccttttattacagatgtattagtcgctaaatttccatatatatttattgatgagtttcaagatagtaatccaatccaagttgaaataataaagaaaatcgcaataaaaaacacaattattggtgtaattggagacgttgctcaatcaatctatgaattccaaggagcagattgcactcaatttcaattatttaatttaccaaatctaactaattatgttttagaagaaaatagaagaagtagtaacgaaataattgatgttctaaattttattagagaagatatatctcaaaccaaatttagaaatattaataaaggacagcctataatttttattggtgatatgacactagcattaagagaagctaaaagtatctgtgatagagaaaatgtatacactttatcaagaaataatatcacatctaatgcaatgaaaacagagatcagtggatataatttagataatacattattagaaagaattaaagaaattgattcaaatgcagttagaagtaaattaatttattcgtgtattaaagcaatttcgtatggaaaagaaaacaagtttaaagatgctattaaggtattagaaaagcaatttaattatagaaatgataaattaaaaggcagaaaaaaagcattaaaatatatcactacattactagaaaaatatgacgaatataaagattttactttaataaatttcgcgaactttattcgtgaaaacttagatagcactctatcaaatttccgagcaggtgcacctaaaacattctatgagacatatactttgaatcaactttcactatgtgtttccatacctgaagatttgagtctacataaaacaattcataaatctaaaggtgatgaatttaataacgtgctattagtattaaagcaagaaaatgatatgaactttttacttaacaaagacctgtctaatgatgaagaacatcgtgtaaattatgttggttgtagtagagcaaaaaacagattatttatatcagtgccagtattatcacaaacaaatcaagataaattaagacctttatttgaaattcaaaatgtataa

SEQ ID NO: 79848 - DNA, 1797 bp, Myroides odoratimimus
gtgtacttatctaatattaaactttggaattttagaaaattcggttctgaaaacgacatagacccagaaaaaccagatttggatttaaacctcactaaaggtttaaatgtgattattggtgaaaatgacagcgggaaaacagccattattgacgccataaaaattgtacttaaaacccacagctatgattatataagagttgatggtaaagatttttacgacaatgcaactcgctttagaattgagctaacatttgaaggcttgacaccggatgaagccaaaaatttcacggagtggttaggctggtcaggttcgggtgctgacacaaaaccatttttaaaggtaaattatgacgtaaaaagacaaggtgagaagatactaccctcagatataaaggcaggcgtagatgatgatggttatttacttacagcagaagctaaagaatatcttaaagcgacatatttgaagccattaagagatgcagaaaatgagcttattgcgaaacgaaactcaagactatcacaaattcttttaggcgatgaagcatttaagggcaaagaaacctcgaatgaattagtgcaaattttttcaacgcttaagacagatttagaaaagtatttcaaaggggaatttgaaataacggtttttaacgaaggtggtgcagaagaaatacaaaagccacaagatggtaagcacataaaagataaaattgatggttacataaagggcttctatgggaataattacgagactgaatttaatgcttcatcaaacgatattaaaagtattctcgaaaagctaacactatttttaaaagatgaaccatacccagggctaggaacattgaaccgattgtttatggctaccgaattacttcacctaaacaaatcaaattggagtggtctacggctagggttagttgaagaattggaagctcacctacatccacaagcgcagatgcaagtaatagaagctttccaaaaacaaaacaccatccaacttattcttaccactcacagccctaatttggcttctaaacttaaactagaaaatttaattatctgtaattgtacaaatgcttttcctatgggtgaaacccatactaaattgcataaagacaactataaattcttagaaaaatttcttgataccacaaagtcaaatctgttttttgctaaaggcgttattttcgttgagggatgggcggaagaaattcttataccgagcattgcaaaatcaattgggataaatctcaccgaaaaaggtgtttctattgtgaacatcggtcataccggatttgaacattatgctaaaatctatttgcgtaaagaagaaccgtttatgacaatccccgtagctgttattactgatgccgatgtaagaagttatgaaaaaattggtgatgactatattaagagggatgcagaaaccgttgaacaagaaacacagcgaaaagtagccgaaataaacgaacaagctgaacaaaatgtcaggtatttcgttgcacctaactggacattggaatattcattatttaattcagccagcttaacaaacgtttttcaagctgtgacaaaatcaattcataaccaaactaattgggatgactttgagaaagctctggctcaaaaacttattaacaaaggattgaagaaaactgaaatcgcttatcgaattgcgcattccattgatgaagatttgaaaaaacctgaaagaacaattcaaattccgactaatgatataaacgaaacggttaactacctaataaatgccatcaaatatgcgacaggagattaa

SEQ ID NO: 79849 - DNA, 2019 bp, Myroides odoratimimus
atgcgacaggagattaatataacggatgaagacattcgctatgccgaaaaaatacttttgccggagggtaaagaatttgatgaagagcgcaaacaatttattcgaaaccttgaaacaatcgacttacaagccgtacccggaagtgggaaaacgactgcacttttagcgaagttaataataattgaacggaaacttccttttgaagatggttcaggggttctcgtcatatctcatacgaatgctgcgattgacgagataaaggagaaaaatcaacagtattgtccgaaactgttctcctaccctaattttgtcggtacgatgcagggttttgtcgatacctttttagcggttccattttttaatttgggtttcaaaaagaagttgacatggattgacactgaaagatatcaagaagaactattaaagcttttcaatattattgcttggaacaaagattatgaccaacccacgaaatggttttatcaaaggcatatcgctcgggcaacagatgaggcaaatgggaataacaatcttataaaggaaatctgtaaaaagtacattgaaaacgaggttaaaggtttgttctacgatttcatcaccaatgaagtgaaaaatagtaataatgatgtcttgctgaaaaataacacaaacaaaaaatttctaggattaaaggggataataatcgagacgctgaaaaaaggtataatatcttatgactatgcatatcaccttggcgagtgttatctttcaaagaagccgatgattaaggaaattttacaaagacgcttcccaatggtctttgtagatgaaatgcaagatatggacactcatcaatatagtttgttagaaaaaatatttttcgacgataataacagtaggtcgataattcagcgaattggcgataaaaatcaggccatatataattcagtcaaaacctcagatgtatggttagatagggctaatgttctacgtttgacgggaagtcaaaggctaagcaagccaatagcagatattgtaaagaaatttgcattatatagtggtgataattttgatatagttggaatgaatgaatgcgctgtaaaacctcacatcttgatttttgaaaatgaaacaatcaacaatctaataccttgttttgcacaaatagtaaagacgtacaaagaaaatggcagtcttgctaacccggacaaagcggttaaggtaatttgttggaataccgattggaaggaagatgatatcagccgtcatgacgtttcaaaattaagattagaagactattataaagggtttaaaaaggagaaagccaaaccgaaacaggattacaattgccttaaaagttatttgattttttacgataagaataagaaaacattagagccattacgaaagaacattttaaacgcgctccttaaaattcttcgcttagaaaatatcaacacttctgataaccgaccacatacaaaaaagtctttgattgagtttattaaaagtaaagattttcaaaaatacgaacagcttaatcttaacctttatcgatggtcaatgggaataattacggggtcaacggttgatgtttggaatgacattaaggaatatacatctcatttctttgccatgttttcggaacttgaactttcaacaagcacctcttttattaataatgatacaacaggggtaccagtggcggcagctgaagaaatagagattacaaattgttacaaagaggacggaattgaaattgaaataacaagtgtccattccgtgaaaggccaaactcattgtgccactctatatttggagtcctactatcacagtagctacgaatctcagagactacaaagccaattcttaggtaaccattttaatgataatagggttcatcacaagagttcgattaaaatggcttatgtaggcttctcccgaccaacggacttgctttgtgtcgcaatacacaaaaacaggtttgatactcaactaaatgagattgacaccgacgtctgggaaatcataacagtttaa

SEQ ID NO: 79850 - DNA, 2139 bp, Pseudomonas aeruginosa; identical to SEQ ID NO: 79364

SEQ ID NO: 79851 - DNA, 1800 bp, Pseudomonas aeruginosa; identical to SEQ ID NO: 79365

SEQ ID NO: 79852 - DNA, 2151 bp, Elizabethkingia miricola
atgaaaataaattctatccagattcaaaatttcaggaaacttcaatcttgtacaatagatttctctgaaaaagaaacaatttttgtaggtgcaaataatagtggcaaaactaccgcaatggatgctttgatgattttcctaaaaacgaaaagtttcaaacctcaagattttacactttgtcattggaaaagtttaaataaggttggagaaaactggattaaagcagatgagttgaaggaagaagataagtctataaaactattagaagaatatcttccagtattagatttatggattgaagttgaagattcggagcttcattacgtaagtcatataattcctactttggattggaaaggaggtctgttaggaattaggttgcgatttgagcctaaggacatggatgaattaataaaagaattcataactctttataataaatcaaacaagctttcacaagaaaaagaaaaagatttcaagttatggccaaaaacattttgggatttttgtgaacgtaaacttagtgcttattttacaatcaaaacttatttgcttgatcctgataagtatgatgaaaagcaagaattgttagataataatatagcattagaggcagatgttttaaaaggtctaataaaaatagatattattaacgctcaaagaggattcagtgatgcaaattcagaaactgttgaaagcaatagtaggaatttatcttcacaattaagggcttattatgataaacatcttaatccaacattagagccaactgaaaaagatatagatgcattagagtcaatcaataatgctcaagatgattttgataagaatttaaaagaaagctttaaaacatctctttcagaacttgaaggattaaattatcccggatttgggaaccctcaaatccaattatcgactaaggtttcaacagctgatggtcttcagcatgattcagctgtaaaatattatcttggcaaagacttgtcgttgccggaaaagtataatggattaggatatcaaaatcttatatcaatcatattcaaattaatacgttttagagacgaatggatgagaatcggtaaaaatgcaataactgaagatgaagttatagaaccattacatttaattttaatagaagaaccagaagctcatctacatgcacaagtgcaacaggtttttattaaaaaggcatatgaggtacttcgaaataatgtgaatttaaaagataataaagattttacaacgcaattagtcattagtacacattctagctacattgctcaccaaaaatttgaaagcttaagatattttaaaagaaataattcattagctctccctacatcagaagtgattagtctaaaatcagtttttggcgaaaaaaataaagagacggaaaaatttgtaattcgatacttaaatacaactcacaacgatttgttttttgccgatgctgttattttagtagaaggccctgccgaacgaattctcgtaccacatttcataaagaatgaaaattgtttgttagatagttgttatgtgacaattttagagattggcggaagtcatgcgcatagattaaagcccttgattgaaaaattaggtttgatctgtttggttattactgatgttgattctattaatcctaacgataatggaaagaaatgtcaaccagagctaaagaaaaattataaaacgaataatgacacgctcaaaacttggcatccacaaaaagagcttttagacgaattgttgaatttaagctcagaggataaaataaaaaaagatttgccaattagagtagcttatcaaaaaccgattgaatttgataatggaaacaacaaaattattgtttatccttacacatttgaagacgcattagtcattgagaacaaggatagttttaaagctattaccgattctacaggtcttctgaaaaaaatggtggaagcttctaaaaaagaaaatttaattgaatttgtagaagaaacctacacaattattaatgataaacaagcaaaaaaagcagaatttgctttggatatcttgtattatgaagatcccaaaaagattaaaactcctacatatataaaagaaggtttagactggattgaagaacaattaaaaagtaacaaacaaggattaatcaactaa

SEQ ID NO: 79853 - DNA, 1884 bp, Elizabethkingia miricola
atggctgaatatactaatgagatagatgctccagttgatgatgtgatttatgaaagcattaaaccgtcatcaccccaaagcttttttctttttgctggtgcaggttcagggaaaacaagaacgcttgtaaatgtgctggatcgctttaaaaaagaatttggacaagagtataagttaagaaataaaagaatagcaatcattacatatacaaacgcagcagccgatgaaattactcataggttggaatatagttcaatatttaatgttagtacaattcatagtttctgttgggagttaataaaaaactttacacacgatattaaaaactggataaagcgtaatttaattgttgaaatagcagaattagaagtagaacaatctaaaagtagagatttaaataataaaacttctattggtagagcaaaaaaaatagagtctaaaaataaaagacttgcatcgcttaaaacaattcaaaagtttatttataatccaaatggggataatctaacgaaagattctttaaatcatacagaagtaatttctattactgctgattttattaaatcaaaagaattattcaaacaaatcctaataaacaaatatcctgttatccttatagatgaaagtcaggatactaaaaaggagttaattgattcattatttgaccttcaaagtcaatatgaagaaagactttcgttgggattgtttggggatacaatgcaaagaatttattcagatggaaaagaaaatctgggaatcggattaccagaaaaatgggttaagcctgcgaaaaaaatgaatcatcgttcaaaatcaagaataattgaccttataaacaaaattagagaagatatagatggtcaggaacaatttccacgtattgaaaataaaggtggaattgtcagattctttgctgtttcccgcacaaaaaataagtctgagacagaagaacaaattcgtcagaaaatgtacgaagcaacaaaagatgataaatggaatgggaataattctgaagtaatgactttaacattagagcatcatatggctgcaagtagaatggggttttccaactttttcgcacctctctatggtgttgataaattaaaaacaggtttgttagacggatcatcatcttcggttaatttatttacaaaaatagttttgcccttacataaggcctatattaagaagaataaatttgagattgctaatattgtaaagcagcattctcatttaatagataagcagacattacaaaatgatgataataaattagaattattacatattgtaaatggtaaggtcaatgaattattgtctttatggaatgaagataattgtcccttattaatcgagatactagaaaaaattcaagaaactaatttgttcaaaattccatctgtactaaaagtagttttgaaaagagctgatgttgattcagatgttgagattgaagaagatgaaacatcggaagatgatgacattttaaaagcttgggaagaatcattgaaagcaaattttgatgaaatcataaagtataatgaatatatcaacgaagagtcgaaatttggaacgcatcaaggtgtcaaaggattagaatttgaacgtgttatggttattattgatgatgaagagtccaaaggctttatgtttagctatgataaattatttggtttaaagccgctaacctccaatgataagaaaaatataaatgagggtaaagaaacaggaatagatagaacgatgcgactattttatgtagcttgtagtagagctaaagaaagcttggcagtggttggctatacagatttaccagaagaattaaaagagaatgtcattactaatggctggtttggcgatgctgaggtagaaattattttataa

SEQ ID NO: 79854 - DNA, 2364 bp, Herbaspirillum rubrisubalbicans M1
atgactatagaagatgccgcacggaaaatagttgtcgcatcagccgtcgccgcacaagtagttgcaacggcgcaagctgcagccaaatccgctgacataaagcaagaaccgccacttcggctagcgtgcgttgagatttgcaactttcgtcgtcttgccaagacgcgcgttgaactggatgaatccactaccatcctggtaggtgccaacaacagcggaaagacctctattctcactgcactcaagaatttcctctcagactcgccgggattcagagcatttgacatcagtctgtcgcactggggaacgctgcgagccctttgccagaagtgggaggcgctagccgaagacccgacgacggacaacaaagacgtcgagatgtgggatgaacagctggcgattctgcagtcctgcatgccagccattgacctatggtttgatgctcaagaaggggcatttagctatgtgcgcgcattcatgacatcgctgacttgggagggaggtccgattggcgtccgcgttcggttggagccccttgaggattcgaccgcgctacgaaagcttgcgtggaggtaccgcgaagctcgcgcaccggtcaaagggctgccggcagaaggtcactcatggcctacggacttgctggactactggctccgcaacccaggggaattgcgccgcatatcggcttatcgcctagacccagcacaaggcccattagtcaggcctgaaattcaagacccccaaccgcttctgaagacggccgcgccggtggagctagttcatctgagaaacctgattcgtgtcgacttcgtgccggcgcagcgagggctgggggccgaggacgacgaaatgcgtatagagggtgcgagtgcccgccctggcctgttctcgaaccaactcctgaaatttgcgaagcagtatctcaacgtggcgcccagcggccacggaaatagagaggacttggtcaaggccattggtaaagcacaattggagttggattcctctatttcagctgcgttgcggccggcgatgaaagaagtcgaggtgctgggttatccggggctgcatgatgccaagggcattcactttcgaacgcgcattcagaccgcagacttgcttgaccacgggacggcggttcaataccgactggacccggaagtggctgcagaatcattacctgaacattccattgggctgggatatcagaatctgcagtcattgagcttcatgctggtgtcattccgtgcggccagactgagtgctaagcaaggccttccagtgccaattcatctggtgatggtcgaggagcccgaggctcaccttcatgttcaggttcaacgaaatttctcgcttaacgctcatggcttgctttgttcaaaggatgaattgcaccgtggccttcgtagccagcttgtaatcagcacgcattccagtcatcttgcccacggtgatagtttcaccaggcttcggtacgtgaagcggattcctggtgatggcgctggaaagaagccgagtaccgacgtggtaaatctcggggatgcatttggcgacgacgatgaaacacgaacttttgcggagcgctacttccaggttcagcatacggacctgctttttgccgatgccgctatctttgtcgagggaacagctgagcgaatgctcgtgcccatgttcattaaacagaactttgaagcgctggcgaagaagtacatatcctttttggatataggaggcagccatgcgcacaggctgaggccgttggtagagcgcctcgggattccgacaacggtgattaccgatttagaccctgtgcttccaactaaggatacgaaaaatcgaaccatacgtgctgcggttcatatagctggccaggaaggcatcgagtgtggcaacgacacgcttacgtcctggcatccgatgctgccgatgttctatgactatggaaagccaaccgaatctcagcttgtctggacttcggcaacaggtgtaaaagtgaggttcgcatggcagttgcccgtggctgcggcgagcgcccaatggcctagttcgtttgaggactccttaatcctgtccaatattgattggttcaaagatttggaaaatgaagtgggtaaggacgggaagaaagttactcatcggggcgcgttggcgaaggtcatcggtaccgtcaaagaccatccagaccatggggaactgctggaggagctccaccgcatgctgaggagaagcttcagtaagggtgatttcgctgcttcggtcttcgagcgcatggaaaagggggcgcggttagtgtgcccggcttacatctcagacgcccttgcgtggctgcaggagcagttgacctcgaaacgtgaggagacgctgtga

SEQ ID NO: 79855 - DNA, 1956 bp, Herbaspirillum rubrisubalbicans M1
gtgagcggacttccagacgttggcggcaatgatagggatgcgcatgttgtcgaagacatctgccgctatgtgaccgcaaatccagcccagagcttttttctcttcgccggagctggttctggtaagacgcgaaccctggtggaggtgttgcgtcgagtgactggtgtggtcgagcacgaagcggggaagcagtatgccgagcgcctgcgggcgcgcggtcaggctgtgcgagtcatcacctatacaaaaaacgcgactgcagtggtaaccgggcgcttaggcgagaatgtgctgacagaggtctcgacgattcactccttttgctgggacctgattcaaggctttgacgcagatattaaagaggcactgctggcgcgcattgacaagaaactcgatgagttgaagcgggcagctagggcgaaggcacgaggtgaaagcgataccgaccgacgtaagtatgcggagttggaagacgacgccacgaaggttcgcgccaccgacagcttcatttaccatccggaccgcagaacttttggggccggcgcgcttacgcatagccaggtcattgattctgccgcttggctgctaaacgaacgcccgacgttgcgcagaatagtcgccgaccgtcatcctctgattctcatcgacgaatctcaagacacaatgcgggccatgctcgactccttgttcggattggcggcctccttcccaggaatggtaacgctcgggctgctgggtgaccatcgccagcgaatatacgccgatggacatgacgaccttccgtcccatatccctagaaactgggagcgccctgcgctgcagatgaatcaccgtagccagaagcgtatcgtggacctgataaacgatatatgggaagcagacctagaaggccggactcagccgaagacaggtgtgcgccaaacacctcgaacggagaaagaaggtggtgccgtgcgcatgttcatcggctcggctcacctgagtacagaagagaaaatggcgtctgaggggcgttgtgcggaagccatgaaagcccagaccgggattgatgcatggggcggggatgtgaagaaatacacgaccttagctctggagcataaattagctgcaatacgtggcggatttctaaatgcttacgtagctgtccacctactggacccggatgcatcagctccaagctcaagcggtgacaggtccggtcccgggatgctgcggccgctgctaggagccatttcggagctggctgaatgcgtgaacccggacgcgtcaatcaacgagtttgcagccatgaatgtgctacggcgagatggcctttttgcgaagctaccggacgatagcatcaaacgaggtaaggtcgttgccgacattcagcatacgttgaaccagtttgcgcagacggtcgtgcatcctgatgccacagtcgactccgttgtcggtccattgctggatttggagctgtttgatgtggatggccgcttctacaaggcatatcgggatgaaacacccgctccgccgcctccggcagttctatctcaagaagatgtcgaagataggcgtaagcgtggatgggaggcactgttcaggactccttggcaagagattcccaagtaccgagcttatttgaggggcgaaatggagctggccacccatcaagtcgtaaaaggctcggagttcgagcatgtgatggttgtgatggatgacaccgacgccggcgggtttcttttttcctatgacaaggtctttggcagccaagagctaagcaagagcgatttgaagaatatagaagaaggcagggagacttctatcgataggaccttgagacttctctacgtcacctgcagtcgggctgaagaaagccttgccttagttctttgggccgccaatccgggcgctgctatgggagcagttcaggccactggatggttccgtgaaggcgaagtccaagaagttaagtag

SEQ ID NO: 79856 - DNA, 1980 bp, Escherichia coli
atgaaaattacacaaatggagatcaaaggctttaagagctttgataatgtagggcaaactataaatataaattcattcaccagcttaattggagggaatggaacaggtaaaactgctgttctcctcgcattgacaaggatgtttggtgtcaaaagctccgatagaattgttcaagttgatgatttttatgttcctcctggagatgaaatcgatactcaagatgaaagagaattatcagttcgtgtgaaatttgaatttgcagatctacaagatggtgaggacgattcagtcgctgatttctttaagcatttggtctcaaatgaagcagaccagatcccatactgtatagcaaaattaaaagctaaatggacaaaaactaatcttgcagaaggggatatagatagtgatttagtatgggaaataggaaaatatgaaaaaaatattacagcatatgaaagatcaaaaatccatgttcattatgtccctgcttatcgcgatcctgctcaacaactgaagcaaacagccggaaccatcatgcaccgtttgataaatgcagttgaatggtctgaacagatgagttcaacggttgatgaggttgcagaatcaatcggaaaccagttccaagaagaaattggggttcagacaataacatcttcattgagcagaaattggaaaactctttttagcggagggtattttgaacagcttaaaattcagccagtaatgaatggaatagaagatgtattaaagcatatagatactgtttttatgcctactccggtgactcaaccattaccaactgaaagattaagtgatggtatgaagtcattgttttatctttcgttagtcaaatctgcatttgatattgaagatgagatcataaattcaggagaaaatgaattatcgatatcagtagaagcattagatcctccaaatttaacgataatattaatcgaagaaccagaaaatcatctttcaccccaatatttaggaagaatagttaaactatgtgaagatatatctgagaatgatcgagcacaggttgttttaacaacacacgcaccttcattactcaatagagtagaaccagaaaatataaggtattttcggctacatgataataaaaatactgttgtcaaaccaatattattaccaagcgaagatgaagacgatggagacaatgttgatactttcacttatgtaaaagaagcagtgaaggcatatccagaaatttattttgcaaaagttgtaatacttggtgaaggtgatagcgaagaaatagtaatacctaaaatagctcaagtaaacggtatagagcttgacacttcattgataacatttgcgccattaggtgggcgatatgttaaccatttctggaaacttttggatgagctttcaatccctcatgtgacacttcttgattatgaccatagaagaggtggtggaggctggggaagaattaaatatgcattaaagcaacttgtttccgttggtaaggataagaataaattattaataataaaaactggtgttttaagtgataaagaacttgaaaaaatgcatacatggggagaagacaaggataatgaaattgcatggatgaatcgtctaaaagagtataatgtatatttttcatacccctacgatttagattggctaatgcttaatgaattctatgaggattataagacttttgttccaaaaaaaggtgggccaaaattacctaaggatgatgaccctgaatataacgacaaagttagagccgcaattgcttcagtattgaaaaaagaagtaagtgatattgaaattgatgattttgatgatcatgataagtatttttggtaccgatatttatttttgggtagaggtaagccattatcacataattatgtattatcaaagctggaagacggtaaattaagagataatagccctgaaatacttgatgaacttatcgaaacagtgagggggttactttaa

SEQ ID NO: 79857 - DNA, 1848 bp, Escherichia coli
atgccaactattaaagatggagattgggtattaaaggatatccaagaagtcgaagatgaagcaatgaaagtgatacggaatagtacagagcataatctcgttcttgcaggtcccggttcaggtaaaactgaattattggctcaaaaagcatgttttttaattgaaacgggaaaatgtagtaagaaaaaaatcatcgcactatctttcaaaaaagatgcggcaaaaaacctacaagatcgagtcaactcacggcttgatttaaaatttaggaataagtttgaatccacgacatttgatgctttctgtaaaagtattgtagatagatttaaaggtactcttccgaggttttatcgtccttcagacgattatgaaattatttctcttaataaaaaagaagttatagcagaaataaaaagagaggcattaggttttgaggggttgacatcatttgaattgaataaaataaagcattcaaattttgaagaaaaatacattgtaattccttataaacaagaagaaaggcatacaattaatggaaggataagatattttgtatggactcatttattgaaagataagtcaagaatttcattcaaaatgataaattatcttgctaatagaattataaagaaaaatagtttcctatcaaatgccattaattcaacatatgaatatgccttcattgatgagtttcaagacactacatctaagcaatatgagatatttaaaagtattttctttgatcgagctataaaaataacagccgttggtgatacaaaacaaagaataatggggtgggcaggggcattgcctaatgcttttgatgtcttcaaaaaagattttgaagttggtgacaataatgaattgataagcaatagaaggtcattaaaaaatttgataagttatcaaagattgatggaatccttcatgaataaaactgaaaataagacagaaatcactttttataagggagaaggtttagccaggttaatgcagtttgaggaagttgaccaagaggcatcttatattgtttcacttattaaaaaatggattgatgaaggtattgaacaaagggatatctgcattttatccaaaagtgtggccggacagtactctcaaaaaataatctcagagttagacaagtctggtgtcaaatgccgtattgaaaatgaataccaagaattattaaacgatgcaatagtacaattagttttacagcttctaatgtttgtttgtaatagaaagtctatagaaggctgggcttctacaatggatcttttgtgcaacattagaggtgtaagtaaaagaggtgatgttactcgtttagaaaaagagttaagtaacttcatcaaggctaataaggaagttaaaagtgatgttgttgattatttaaagggcttactaacaatatttggtatccctgagttaaaatcttattttccgcaatatatgaatggtaatggcttagagcataatattaatactctatctaaatatctcgaagcattagatataaaaaataacatgtcaaatgctatagatatgttgagtggaaataaaactgtaccatttatgactatccataaaagtaaaggtttagaatttaaaaaggtcgttatagtaggacttgaaccggatgcttactttggtgatgaagaaggacagatagaaaatcaaaaaacagtttttgtagggttttcaagagctattgatgaagtgttcatgactcgttgtaaactaaggagggataattttggtaatgtctccagacaagactttaatagaataccgctgataaccgatatgctaacttattgtggtatcgaggctgagagctatccaggttga

SEQ ID NO: 79858 - DNA, 1785 bp, Burkholderia cenocepacia; identical to SEQ ID NO: 71894

SEQ ID NO: 79859 - DNA, 1338 bp, Burkholderia cenocepacia; identical to SEQ ID NO: 73899

SEQ ID NO: 79860 - DNA, 2001 bp, Streptomyces sp. 4F
atgggcctgcacatctcgcggatcgagatacggaacttccgcaacttccagcacctagtcatcgatgacttccctgcccacgcggtgatcgtcggtgagaacggggtcggcaagtcgaacctgctggaggcgatccgcctcgtcctggaccccttgctgcccgatgcacgccgcctgctgcgcgaggaagacatctgggaaggccacccggggggcctgagcggcagggcagaagtgaccatcgtggtggagctgcaggggtacgaccacgacgacgacgccaagggcatcctatcgatggccaccgtcgactacgccccgtacaccgcccgactgacctaccggtttgccccgcgtaccgagatcgagaccgctgccggtcccgcggtccaggtcaccggacggtcgctgaccgcccaggactacgacttcgtcgtcttcgccggcgtaagcgagaccaacgacgtgcgcaggatccgacgtgaagtggccgtgcgcgtcctgccggcgcttcgggacgccgaagccgacctgcataactggcgccgcagccctctgcgggacctgctcgagcggcttcccctggacccggccaacctcgaggccaccgtgtccgcgatcgccactgcggtcgaccagttgaccaaggacgccaacgtcgcgaagctcgagcagcatctgaccgaccggctgcaggccatgctgggcccccgcctggcggtcgagcccaccctcggcttcgcctcctcccagcccgacgaactcatccgcgccgtccgcctcttcctggacaccgcccgccacaggggcatctccgacaccagcctcggcagcgccaacgtcatctacctcggcctgctactggaagccctcagtcaacagcgccaagacgatcagttcgtcgccactctgatcgccgtcgaggaacccgaagcacacctccacgtcagcctccagcgccacctgttcggctatctgctgcgcagcggaccggccctcatcctcaccacccacagcccccacatcgccgcagtcgcccccatccgctccttcatcgtcctgcgcgccaccgagaccggtaccgtcggggccagcaccgccgccctccccgtcaccagcgatgaggcaacggacctcgagcgctacatcgacatcagccgtgccgaggtcctgttcgcctccgccgtcatcctggtcgaaggcctggccgagctgtacgtactgccggctctggccgccgccgcgggattcgacctcgacgcctatggaacggtcgtcgccagcgtccacggaaccgacttcaagccctatcgggccctgttggggccccgcggcctgaacaccccccacgtgatcatcacggacggcgacgctgcccccgacaagcgtggccgccgcgaggccggcctcatcaggggcgcgggcctgcaccacgaccccacccagatcgcaccgcttcttacccaggtcgtgcaattgcccgagcacggcacggccgcctaccacgccagccgtagccccctcgccgatgccctgcagagcatcggcgtttacgtcggcgttcagaccctggaaaccgacctgtgcgcccttttcggcgacgagattgtgcaggcatttacggaactcagcagcaacgccaacgcgctcgacgacgtgcgccgtggcatcgccaatgagcagagcaccaccgtggaccccgaggtccgcaaggacatgctggaccgcatctccgacctgggcaaaggccgcttcgcgcagcggcttgccgcgcacatccgcgccgttgacctgcaagcccgcatccgcacggcggcccagatcaccgactctggcacacccctcgacacccgggcactgcaccgcctgggcaccgcttcctacctcttcctcgccttggacgacatctcccacaaggcccgcggcacctcgctcttcgccgccccgcaggacaccaccgacaccagcgcaccgcggggaaccgatgctgcaggtcagtga

SEQ ID NO: 79861 - DNA, 1884 bp, Streptomyces sp. 4F
atgctgcaggtcagtgacgcgctgctgagcgaactcgaggaactccaccccacgcagcgcgccgccgttttgcaccccggcaacgtcgtcctacgcgccggcccgggcagcggcaagacccgcacactcgtcgcccgcgccgcctacctgctcgaaacccagatctccgccttccgcggcattgcttgcatcacctacaccaacgccgcagccgacgagatccgccgccgcgtccttcagcgcggtgtccgcaccgacggacggatcacctgctccaccgtccacgccttctgcctcaacgagatcttgcgcgccttcgccccgctcaccaaggaacccgcacctcaagcaggacaggtactcggcgacaaagccacccagatactcctgcagcactgcttcgaccgcgtcggcatcgccgagaccctcgcccagttccgcaccggcgagagcaccagaatccgccgcgcgctggcctgcgacgaaccccttgacgccttcgaccctcgtgaggtacaggcagcccgcctctacgaacaagaactcaccgccagggggcagaccgacttcgagtccatggtgacccgggccctgcgcatcgtgcgcgaacacgaaccagtgcgcgacctcctgcacgcgcgttttccccacctcatcgtcgacgaataccaagacctcgggggagtcctccacgaactcgtcgtggcactgcacgacctggccggcatcacggtcttcgccgtcggggacaccgaccagtccgtgtacgggttcagcggtgccgacgccaagtacctgaccgacttggccgaccgcggcgacttccgcgacctgcccctcgacgtcaactaccgcagcggacaaaaaatcatcgtcgccgccgaagcagctctcggcacatcccgcgagcgccgtgcacgcgacggggcacctcccggaagtgtcaacttccaccctgtcgaagaaggcctcgacgaccacgcacgcctagcctgcgaccttgcccaacaggcagagcagcagcaggtcaggccggaacgcatcgccatcctctacccgcaacgcggccgcctcctcgacgccctgcttgctgaactgacccgacgcgagatcgacttcctctacgaacgcgacgacaaaatccccgccggaaccctctcccggttcgtccaacgctgcgccagccgcgcggtgacgaactaccagatccacaccgccaccgccgacgcacgacccgacatgctccggcgggccgaagcacccccactcgcccagctggaacacgccctcaccaccctgcgcaccgaagcgcgactatccccgccgacctcccgcctggccctgctgcggacgctgcagacctgcctcgacccccagctgccctaccccttggacgcttccgcctacgactggctccagcggttgcgcgcccgcctcagactcgacgcgatcgccgaacagcatcccgacaaggacaacaacaccagcctcggcgagttggccgccctatgccggtccaagggcctcgcactgcaggacctggcccagggcgaagaggtcatcgggaagatcctcctcaccacctatcactcagccaagggccgcgagttcgacaccgtgatcctccccgggctcctcaatggcatcatcccgcggaacgttgcagaccgcgggaagtggcgtcagcccaccgcgaaggaactcgccgaacagcggcgcacgttttacgttgccttgactcgtgccgagagcacactgcacttgatctatggccctggctaccacaccaagaacggctattggcgtccggacggaccctcggacttcctgattgagatgtacaggcgccttccggcgacggactcgtcggagcaacagacgtga

SEQ ID NO: 79862 - DNA, 2001 bp, Streptomyces sp. 4F; identical to SEQ ID NO: 79860

SEQ ID NO: 79863 - DNA, 1884 bp, Streptomyces sp. 4F; identical to SEQ ID NO: 79861

SEQ ID NO: 79864 - DNA, 1881 bp, Streptomyces scabiei
gtgtccgaggtgctggtggagcggttccggtcgtgcgagcgggtgcagataccgctgaggccggaagtgacagtgctcgtcggggagaacaacgcgggcaagtccagtgtgatcgatgcactgcgcctgctcacggacccgctggacgggcgccgtgtgcggtatttcgaggagtccgacgtcctgaggaccacagccgatctgggtggtccgagcctgcagatggacctagccgacattcatgcggggcaaagcggcgcctaccttgaggcgctgctgcgcgaaggggctcccgacagccgcactgcgcggtggcaggtgtcctggactccgccgcagacgggcggccggcgcggaagcaccgcctggtcgcagggcgcgggccttccggtgacgggagagcctccggcgcgcggtggtgtgcggcacgtctatctgccggcgctgcgtgatgcggagcgggagcttgcctcggctggcggcgaccgggtgcgcatgatccttcgcggtctgctgggggacgacgaccaggtcgatgccttcgtggagcggatcggcaccgagctgaagaaggtggccgcggatggggacgtggtcaaggtcagcgagaagatcaacgagccgctgcgggacctgactgtcggcgcgcatccccaggagagcgaactggctctggccgagcccacgttcgcgtcgatcgcccgctcgctgcgtgtgctgctgggggatgcatctgtacagccgtttcccttggtggcgtcggggctgggctatgccaacaccctgttcatcgccacggtgatggcggagctggacgcggcggcggaggccgatctgaccgtgctgctggtggaggagcccgaggcgcacctacacccgcagctgcagactctgctgctgcgctatctgcagcggcgggcgaaggcctcgcgccgccggtctacgggggatccggcagagcctgccggacacctgcaggtggtggtcaccacgcactcccccatcttgtcggccgcggccagtgtggaggacctggtggtcatggccaggtggccgggtgagctgtccgaaggctggcaggcacggcctttgcccatcccccggctgcgtctgagtccggaccgggtgcggcatctggaccgctatctggatgccaccaagagtgccctgctgttcgcctcccgggcgatcctggtggagggcatctccgagcttcttctgctgcccgccctggccgggcgggtccttgccgccggtgagggcgccgatatcgaggcagaccgggaagcgttcgaagccctggagcggttcttcgggaccacccgggtgatcgtggacggtgtcggtttcgaggtctacctgcgggtgctgctggcgcccgtggacggcatgagcctggggcggcgggtggcgttgatcaccgatacggatgtggcgcccgatcagccggaaccaccccggctggagtcgctgcgggaacttccccgccgctggggttctcccggtgagctgcacctggctgcagcgccgcggacgctggagccggctctgtggtcgcaggacaacatcgccgccttgcgtgcggcgttcctgcgctgcgcgccgcgctcgcagaaacgctgggagcacgtcgtcaaggcggcggatcccgctctggcgttcggggaactgttcgtcacgaagaccagccggaccgtgacgagcacggacggagagcttgcaaagggcacaaagatctccaagggccggttcgcccaggaacttgccgacgttctggccgacccggcggtgacgttcaccgtgcctgcctacctgggggacgcgatccgcttcgtcgcggccacggaccgcaccggcgccgctgcgacgggcgcgccgtga

SEQ ID NO: 79865 - DNA, 1686 bp, Streptomyces scabiei
gtggccgtgccggcgcctgccttcattccggcctgcccgggcgccggcaagacgcatgtgatcaccagccgccatctgcagttgccccggcgacggctgcggcagggccgggcgctgatctcgttcacccgggtggcgcgggatcagatgatccgccgctgccgcaagacgggccgcgccgacctggtccaggcaccgcacttcatcggcaccctcgactcgttcctgtgggagttcctggtcaagccgctgcgtgcggccgatcccgtgccccggttgctggagtcgtgggcaagcgtcaaggctccggtcgaggacgtggaccgggtgatctccttgcaccgcttccccatgaccatcgatccctcgcagaaccctgcaggcgaggcagtggcctgggacaagctccgctacgagacccgccagctcatcgaggccagctcctacagccgccgcgcatgggaaaagaggatcttcgacacgcgcaagtcgtggtgcgaacaggggtaccacacagggcacgaggcgcggtttctggccctgtggaatctgcgcaacgccaaggccgccgccacgctgctgcctccgctgctttcccgattctcggaagtcatcgtggacgaggcgcaagactgctccgccgccgacctggcgatcctcgagctactgcacgacgccggcctgcccctggtcctcgtcggcgacccggaccaggccatctacgcctggcgcggggccgagccccatgcacttcggtctttcgcagcagggctctcacccaccactcatccgctgacgggcaactggcgcagctccccggtcatctgtggactggcttccaccctgcgcacggggcagcgcccgccggacacgtccgtcgtacgcgacgacgccaccccggtcctgctgctacctggccgattcgccgcttccggtggccgtcacctgcatgccccaagcggtgccagtctcttcgacaccttcggtgcgctcgccaatgagtacgccgtcccggcgcacgactgcctggtgaccgccttcaagtacgccacgttgccgggcatcaaccgggagaaacccgataccagcgccatcaccagcctggcctgggcccgcaccaccgtccacactccgggcgcctccggcgaggacctcgcgcgggcctgcttgatcgccgcccgtgtcctgttcggctactggtatccggagcaagccggcggccccgaccgcatcagcgccacccacagcctcccggccaaccaggtcaaccgcacggcgttcgctttcctgcacagcctgcccccgccccacaagaagtggggtccgcaggtgtggcaggccatgaaggcctggcctcctctgcccggggcggcgccgcagggcaagaaaggacgccccgccggagtccccaccgtggcacgtcgccaggtggccaccggcatgcgcaccaacatcgtccaccagctcaagggcgatgaggccgacggggttctgctgttgctgcccgatgctggaagcgtccagcgctgggccaccggcgatccggcaaccgacgaggtgctgcgggtgtggtacgtcgctgtcacccgtgcccgccgcttggccgccatcgccctgccggaagaggagaccgatgcactggcccggttgctgaccgagcgccaagtaccggtccgcgtcgtatga

SEQ ID NO: 79866 - DNA, 2004 bp, Streptomyces turgidiscabies; identical to SEQ ID NO: 73052

SEQ ID NO: 79867 - DNA, 1638 bp, Streptomyces turgidiscabies; identical to SEQ ID NO: 73053

SEQ ID NO: 79868 - DNA, 1857 bp, Oceanobacillus picturae
atgtatatctcagaaatccttattaaaaactatcgtaatttgggtaatgcaccttttaaaatggaattaaggaaattcacaacaatcataggtgctaataatgttggtaaaacgaacttactagaatctattggtttaatattaagccaggatatcacaatgtttaaaaaaagaatgctgcaaatagaagatataaattatacgactagattaaatttcaaaagggatgtgcttaacgattctatatcctatgaaaaaattgaatttccagaggtaactgttcaattaacttttgaagagatgaatagtaagcagttatctgtagtaggtgactggttttctactaaaacaatggagaaggcaaagttaacatatgaatttaagccttctaataactttgataaagaaacgtggataaaagaacaaagagaaaaaattaagcaacttaagagtgcaaaagaggacatcaaagaggatgaacttttacattttatagaatttccaataaaaagttatcaatatgtaatctacggaggtaatgaccgtactaatagagtagacccatactttctcagtatgttaaaactagaattacttgatgctcttcgggatgctaaaagggagttaattgcaaatggggattataagttattatatagaatcttaaaccaaggtaatgaaaatgcatacgaagatataaaagaagttttgaatactcttgatgaaaaaataaaaaataataaacaacttaaagagttaaagaagacattgataagtcaattgaataggatttcattacagggttccggagaaaacaatattgactttaattttactacgctggaaacaggtgagatattaaagaaacttagtttaatctatggccaagatccaataacaattgaacgaaatggacttggcaggaataaccttttatatatttccttaatactttctcatttagcccccgaagaaaatattgatgtttgctttagggttgttggaattgaagagcctgaggcacatcttcatcctcacttacaaaagcatcttgcgaataacattgagcaaataaatgcaagtagagatgatttgcagattatcttaacatcccattcaactcatataactagttctcttaatacagataatatggttattttatataaaaatggggcggatgttaaaaagcattatatcaccgatggatttaaggatgataaaaaaggaaaacatcatcgtcattacctagagaagtacctagatgccacaaattctagtatgttttatgctcgcagaataatattagttgagggtatagcagaacaaatccttgtaccggtattatttaatttaacatatggtagaacgttagatagcattggttgtaatgttattaatgtgaatggagttgcttttaaacattttttagaaataataaaaaacggatattttataaaatgtgcagtgttaactgacggtgatgaggggaagaaaacggaaaaccgtgctactaatttaaaaagagactatgagaagccttataggaatattaaagtgtctattaataaggaaacctttgaaaaggaattaattgaagcaaacaaagccggtaaaggaaagaatgtattactcaaggctcttaatagtacaaggcctaaactagggccagagtatagtgaaaagatatcaaataaagagataggtaatgaagaattctttagtatgatagaagagtataaatcggaatttgcattcaatctgggggatgaacttaaaaaaataggtaaaagcgattttaatgttcctacgtatatagaaaaggtatttgaattcataatggacatagaaggttaa

SEQ ID NO: 79869 - DNA, 1542 bp, Oceanobacillus picturae
atggcaaagaagttaaaacctactttagttcttgctggaccgggtgctggcaaaacccaccatataattaatagagttattgataaaataccattattagatccagaaagacatcttgtagtgattacatatacaaatgccgccactctcgaaataaaggaaagactatctcgaaaagttgatataccacctaatgtttttataggtacaatacatagttttttaattaggtttttcttaaaaccctatggaaaactacttggcctattaccggaagatgtaatatataaaggaatagatattatagccaaagatagaatagaagaaaatgttattaaggccaagatagttgaaaagggaatagtgccttatgaaaaagtagtttcactgtctaataatataatggaaaacaaagtaataagaaatcttgtttctaatagattacagtttttatttgtagatgaattccaagatgctgattcaggacagtataagatttttgagcaaatcaggattgctggatctacggagatatactatgtaggcgatcctgagcaaagtataatgtcttttcaaaataaaggccgtaaaatacctacaatggagaatagggtaatttcaaaggcaattaaaagtacgatgataaaaaaagagtatttacttggaaatcaccggtcaagtaagaccattatagactttataaatcacttccatacttcaataaaacaggagcaatcgaactctaaaaatgttactcaaaataaagtagcctttatctctgttgaggaagatatacgtgaaataatagaacaatttaatttattatgtaatgataagagttattgtcaaaatccccctaaaagtaggttctttctagcatatgagggtaaaacgtatagagcggttgctgatgaatttggattaatccagaaagaagataaagattataatgaaatcaatttactgaaagaaagttccaattttgtttgtgacatactaaataaagggaaaaatagcattaccgatgaattaggaatagaaaacttagagtatagacaactttgtttgaaattaattagcagtataagagaaaatccgtttatgaacagcgatgatttaattaatatagttaaaacgctatttaaacaaaatccttactcatcagtccacaggaaagcaaaacataatgcggaagaaattgcagaaggatttataaaaaaagtgaactcagagttacatgatagtaaaagtaaagaaaatgaagatttctaccttactattcataaatcaaagggtttagaggcggacgcagttcttataatagcaaaaacaaaaaatgagttaagaaaatggttggaacaagatgagcaaaataggatgttagacaaaatagacacttgtagaataggttatgttggatttagccgcgcaaaggaatttttatgtattgcttgtttagaaaaaattgataaggacctaaaggaaaaattaactaatctaaatgtaaatataatcccagtaaaacaaaaggaacttgcttaa

SEQ ID NO: 79870 - DNA, 1563 bp, Xanthomonas citri pv. citri; identical to SEQ ID NO: 75216

SEQ ID NO: 79871 - DNA, 1797 bp, Xanthomonas citri pv. citri; identical to SEQ ID NO: 75217

SEQ ID NO: 79872 - DNA, 1836 bp, Xanthomonas citri pv. citri
gtgtatttggcagagctgaccatcacgaacttccgcaaaatcaacaacgcagtcctgcacttccagagtggactgaacgtcctggtcggtgcaaacaacgcggggaagaccgccattgtcgatgcgttgaggtcgctccttgccgggcatgacgaaccttacccgcggttggactcggacgatatccatcggccgaagacaggatcgcctagcggaagtatcgttttcaagtacatattccgaggcttgtgctccgacgatgaggctgacttcatgagtgccctgaagcctgccaaagacgggcagatggaggcgcatatcaccatcagcttctccgaggcagacaagacagggcgactcagagcgaagcgctggtgtggagaccatgacgatgtcggcttgacagcggacatgatggagaatcttcgaggggtctatcttcaacccctacgcgacgcatctcaagcccttaggcccggccgcatgagccagctgtcgcgactgtttcagcttctcgttgatgacaatggcaagatcgagatcaatggggcactaaagctcctggatgatgagctcaaaaagaaggcgccaattgtgagcacccacaaggcgataaccacccggcactcggagatgctgggtccgcagctttctcagctgcttgagctcggggttagcgtcagtgattttcaacgcctggcttcgcgcctctctcttaccgttgatctgttcgagcttgagcagaacgggctcggattcaacaatctaatcttcatggcggtcgtgctcagcgagctgaccaagaacccacaagccagctatcgaggcctgatcattgaggagcccgaggcacatctacatccccaattgcaggctgtgctcttgggctactttgagaccatcaaggcagtggacaaggagaagcctgtccaactgttcgttaccagccactcacccaactttgccagcatcgccaatctcgacagtttgacttgcctagtcgacaccggcatcaaggtggagacgttctttccgcgagacatcaagtttgctgtcggaaagcgcgaaaagcttgagcgctatttggacgtaactcgggctgagctcttttttgcacgccgcgccatcctggttgaaggcgctgcggagttggttcttgtcagcgtgctcgcagagaagtgcggccacgatctacgcaagcatggtgtcagcctcatcagcgttgaaggcctcaacttcgactcgttcattccactgttcggagagaatgctctgaagattccggtctccgtgcttaccgatgcggacccaacgggtccgagcgaagaggatgaagaggcggggagtgacggtagcgtagtagcggacgaccttgcgtcgacagatgacgcctctggtggaaagaagaaggcggctcctgtctacccttcgattggtgacaaggtgcagctgtctgcaaacaccctgagtatgatcaagttcgaagattcatatctcaaggtcttccatgggctgaagacgcttgagtatgacttggccttatacgcctgcaaccgcaagatgatgcttgcggcgcttagcgagcttcacccgaagatatctgcaagcctggcgaagaaggtcgacgccgctacgggagagacagagaaggctcgcgtactattcagcggaatgttcgagaggaagaacggaaacgtccagaaggggcgctttgcacaagctttggcgcaccttatcgctaaagcgaaagccgaagatttcattgtccccgggtacatcaagtctgcagttgaacacgcttgccagcctggcccgaagaagggcgaggacgaatga

SEQ ID NO: 79873 - DNA, 1797 bp, Xanthomonas citri pv. citri; identical to SEQ ID NO: 75217

SEQ ID NO: 79874 - DNA, 1563 bp, Xanthomonas citri pv. citri; identical to SEQ ID NO: 75216

SEQ ID NO: 79875 - DNA, 1797 bp, Xanthomonas citri pv. citri; identical to SEQ ID NO: 75217

SEQ ID NO: 79876 - DNA, 1782 bp, Mycobacterium sp. IS-1590
atgaaactgacgcacatcaagctggccaacttccgaagcttccttgacgagcatgaatttgagctcgcagacggtgccaacttctttgtcggacctaataattgcgggaagtccaatttgatttcagcgctcgagctgtcgatggacccagagtcggtcttcgtcccggagcgggaccgtccagtcgctacccaaggaaagggtcccccgaagcacacccgcattacgttgaccttcaggaatactgacaagagcagcccccagaccacactccttcatcgcgcgcggaagtacgaactggcgctccgcacaaaacaaggtcgggatcccggacgaaaagcaaggacctacgccgacgatggggagatccgccgcgtcgtcacgttcggtgctcaaggtgcacgccaggtcagctaccaagccaaagggctaggtgcggtttccctccccatcgacagcccagagcacctcgcggtagaaagtcagtttcttaaggttgtccgttttggcgttgttcacagtggcgaagacctcgagtccgtgctgaacgggaagttcagagaggtactgcaactcgtcatcaacgaccacctgtcaacacaactagccgatacggagaagctgagagagaagtacgtcaaagggcttcgtacggtgctgctgagacccttacgcgaacgggtctttgagcgcgtctcctctgtgttctccgagataaagatcgtggatctgttaccagacgtgccgacgctgaacgacaccctgtcgtctgttggtatcacgctcgcggacgctgccagtacagagctgaagggcaaaggcacgggtcttcgcggggcggttcttatctcgatgctgcagtatctcgccgagcagagcagacgatctctggtgctcgccgtcgaggaaccggaggctttcctgcaccctggcgcgcaggagggcatagcactgcagttggaaaagctcgcagaacgtccagaagtaactctcctagtaactactcactcaccacacatcatctctcgacgagctgacgcgcgggtgaccgagctccgaaagagtaaagacggcaacactcatctagcggcgacggcacgcggaaatgaggaccgggcggaactacttggatcgctgttcactgaccgcggcctggcacgcgttctcgagcaggccacgtccgcgccggccggtacgcgggccatagtggtaacagagggctacaccgatggactgttccttcgctacggccttcaggcggccggacgcccagatctccttgaagggatccacttcatcagcgcgggaggcgccaaaaaggtcgtattccaagcggtcctggcggactcggcgactcacgtgccagttatcgccatcctggatcaggacgcacacggccgttcagcccgcgaccatctaaaagacttcggttggaccgccaacgaccacatcatctatctcgggtcatggcccaaggcatgcaatataggggagcatcctgtcgagatcgaagacctgattccgcccggcgcggcgagtgcgataagtcaggtgctaggcgatgacgcccacgatgcgacgcagaaatgtaaaggaagaactcactacagctacagcaaggcatggaaggagctagcgatcatgcagcttcccaaagaactccgcggggaaaacctggatgatttcgtctggctcggtgaggagattgccaaacgcattgccaagatcaccgagcgcccatcgcgtgttacgagtgtcaacgacccagcagcatccaaatga

SEQ ID NO: 79877 - DNA, 2772 bp, Mycobacterium sp. IS-1590
atgacgaaatacacgccgtctcagcaagaagccatcagatgcatagatgagactctgcagatcattgcttgcgcgggatccggtaagacccaagtcatttcgcagcgcatcgcaaaaattctcggtgaatccggggtggagccacggaacatcatcgcctttacatttactgagaaggccgctgcggagctgaaggaccgagttctgcgcctcgtcgaggaacagcacggtgaagtcgtgggtatggccgagatgtacatcggcaccatgcacggttactgcctagaccttctacagcgtctcgttccggacaccttcaagttttctgtgctcacagagataaccgcgcgcctgctcgttgaccgcaacagcaggaagtccggcctgacggcctgccctacatcttcggcgaagacacctacacttcgacgcttcgtacactctcggctctaccttcagatcgccagcatcttgcgcgaagacatcgtcgacgaagacctcgtcgaccagcgcgtttgggagtgtttggattcgtacctccgccttctcgtcgagaaggcagagttcgacttcaccgaaatgatcaacctcgcagtgtcgttccttgaagcagatcctgacgaggacgaggacgcccgcactatccacgaccatatccagagcgacgtcaagtatgtcgtcgtcgatgaataccaggacgtcaacgcgctccaggagcgcctagtcgtcggcctcgtcaagtacggtgccaacctttgcgtcgttggtgacgatgatcaaaccatctaccaatggcgcggcagccaggtggcgaacatcatcaacttctcggggcgccatcagggtgtccgccaagtcactcttgctgagaactttcgctccagcagaggcatcgttgagttgggacgttctgtcgccgagaggattccgtcagccgaccgcctagcgaaaaccatggtatcggccgaaagtcagcagtgggatcgaggcgacatacttgccctgatattcgacgacgagcaggctgaggcatcgtggatctgcgaccgcatcgaagagatgcgcggcgtgccattcatcgatgctccgggtagcgtcgctcgaggactgtcatggtccgatttcgcggttctgttccgctcagtggcgaaggacgccggaccgctggttgaggaactgcagcgccgtgggattccttacatagtcaaagggctgaacaggctcttcgagagtgccgagatcatcgcagtcgttggcctattccgattcatgacacgtgagatcgacgccgacaccttgagtcagctttgggacgtcgccgaccttgtgcctgacttcgaactctggcccggtgcggtagcgatcctcgaagagggtcgaaattttggccgcggtgataggtggggtgtttacaacatccagcgtgtctacctcgattttcttgcagctctggagcttcgagaagagtcggtgcctgggttaccagcccgtggtgaacttgtcttctaccaacttggtaagttcagccaggtcatctccgacttcgagcagatctacttcaactccgcacccgcacagaagtacgaatccttcgtcgggtggctcacacaccaggcgcccgactattacgcagagtctgacgccgatgtcgggtacgcctcgcctgatgccgtcaccttatcgacagtgcatcaggctaagggcatgcagtggccagcagtgttcgtcccgtgtctgcgtcggaatcggtttccgtcgaagcgccagggcgggctgagtgtttttcatgtcatccccgaggaagcggtcgcggatgctgaccgttatcgcggcacagttgaagatgagacgagactcttctacgtagccattacgcgcgcgcaaaagtacctttggctgagctactctcccggccctaacaagttgtataagaaccgatcagagtttttcgaccactgcaccggccagacttgggtgtctacgcggccgagcacaaaccctctgccagctcgaatggagccgcaaccgcgccacgaagttccagaggtgaccttctcgttctcagagctgaagtacctcttcgagtgcccttactccttcaagctccgcttcttgtacggcttcaatccgcccctgcacgaggcgctcggttacggcaaaggtttgcatgatgccctgtccgaagtgcataagaaggctgttgccggcgagatcctcgatgaatccgttgcccaggatttggttgatcgccacctctttaccccgttcgcctaccccgagcttcgggagactctcgagcgatcggctgtcgcggccatcaagcggtacttcgccacacacggggacgatatcccgcgaactgtacattcggaaaaacagattcaggtacacgtagcgccgggcatcacggtcgacggacgaattgacctcatccggaggctcgacactgacgaactctcgatcgtcgacttcaagtccaccgaccgtgctcagccagaagaagtcactcgagatcaattgcatgtgtacgcagtcgggtatgaagaactaactggcgagaacgcagacttgattgaggtacttaatctcgacgaagccggaaagagcacacgtgaggaagttgagacgggcctgcttaccgacgttcgtgagcgaattcgcgaggccggggaatcgttacgagacaaccaactaaaccgtctcgcttcatggtgcacgcaatgtgagcgctgcgacctcgccggtatatgtcgcgatcgtacgaacgtgtga

SEQ ID NO: 79878 - DNA, 1962 bp, Vibrio sp. MEBiC08052
atgaaaatagagaagataaagctacagaattttcgttgtttcgggcatgaggtggtcgagctaaatttcgaggaagagctgacaatacttgtcggcggaaacggctccggaaagaccgcggtgctgcaagctgtgtccaggttgtttggtacatcatcatcgcaacggtcggtacagcgtcgggattttcacatacctattgaccggcaggagctgcagtctggcgatagtttgtttatcgaagcggtacttgccttccctgaactggaagagcaagacgcttctcctcttgatgccgttccggagttctttaatcagatggcggcttccggtgagggagagccccttaaggcccggatacgactaaaagcaacatggacggatgacggtacgccggaaggagcaattgaagaggatatacgctggataagaaccctggatgataattttgaatgggatgactgttccagggttcaggctgtagagcgctcttcaatccagtttatttacttaccggcaaatcgtgatgcgacgactcaggtgaccgcccttctaaaagggcggttatggcaggctgccaagtggtcgacagcatttagggatgcaagctctgataatgccggtcagatccagagcagttttgaggaggaggagccgttaagggtcttgctggggcgtctttcaagacggtggcaacaggtccatgaagccgatacagacagtcagccgcgtttaaggcttatcgaaaaccgttttgaggagcttgttcgtaaagccgaatttacctttacgcctgatgaagaaggtcaggagcgccgtttgtccgagctgagtgacggtcagcgctctttgttccatattgcccttacagcggcaacgctcgaaaccgagcgggaagctttttctttgcctgctgatgatagctcatttgaacaggataagttacgccgtattcacctgacgattcttgccatcgaagaaccagaaaacagtctgtcaccattctttttgtctcgcatcatcaagcaggcgagagagatcggcgcactgccttccgcccaggttctgctatccagccattccccggctatcctgagccggatagagccggaggaagtgagatattttcgtatggaccggagcacccggtgctcatcaatccgagaactgatcctgcctgaggatgatgttgaggccagcgtgtatgtcagactggccgtaaaggcatatcccgaactttattttgcgcgatttgtaatcctgggtgagggagactctgagcgagtcgttattccgaaaattgcggaggaaatgggtgttccccttgatccatcattcgttcccgtcgttccgctcggtgggcgattcgtagcgcatttttggcggctgcttaataatcttgagattccacatgccacattgctcgatcttgatctggggcgcaggcatggtggggcgaacgccatgaggagttgtcttcagaatctagcagatattgggaacgattgggggaacagaagtcgtgcgaatgctgttcagcttaccgaccaacagctttataacgaaggttcgcaaggtcaatggcttcaagctttcaatgagcagggtgttttcttttccgctcccattgatctcgactttgccatgttgctcgcctttccaaccgcttatcaggttgccaatccaggtggtaatggaccccagagtagtgctgctgctattcaagccaaaaaggtcagcacgctgaaaacaggtggtaatcctgccttgtatactgctcattttgatgatgcattcaaatggtatccctatctgttcctgagtcgcagtaagcccgaaactcacctagcggctttttcccgcatcgcggacggcggtgttgctgcatccgctccagcagagcttagggcgctcattgagtacgttacggataagctccatctgtcaggagagaatgaatga

SEQ ID NO: 79879 - DNA, 1866 bp, Vibrio sp. MEBiC08052
atgacccgtgtaagcagagacgaatgggtacctctgggtgtcggtggtctggaaggcagagcgtgggaggccttacgtgaaaccgatagcagcatccttgtgaccgctggtgctggtgccggaaaaactgagtttctggcacagaaggcgacctatcttctgcagacaggtatttgtccggcacccaaacgtattcttgccatcagctttaaaaaagatgccgcccgaaacatcgccgaaagggttgcaaagcgttgcccgagagatcaggcgcggcgctttgattcgatgacttttgatgcctttaccaaggggcttctggaccggtttcgtccggctttacctgagccgttcaatgcgcccggtacgtatcagattgttaatccgtttcgcagggattatgacgattttattgagcgacatggctatcacgaagtgggtgctcaacagcttgagagaagactgcttctgacagacctgccaattgacttgtcaaatggatctgaagtacatcgtgcgttagcagattactggcatgaacaattcttcgggggcgacgagatatccctgtccttcccgatgataaacaggcttgtaaaactgttgcttcaggaaaattcatatatccgccgggccttacaggcaacatatcccatcgtctttcttgatgaatatcaggataccacctatgcccagtacgacatgctgctaacggcatttgatggcagtgacgctgtctttacggcagtcggcgatgataagcagcgcatcatgggatgggcgggagccatggatgacgccttcgaccagtttgaaaacgactttggtgcgaggcgcatcacattgctttcaaactggcggtcacatgcggatctggttcgtattcagcacgagattgcccgccggatagacggcaatgtggaagcggtgcaggcacaagggacccgtgaaattgaaggtgaggtttctgctatctggcaattccggaacgcagatgacgagaacaattatctagcagaatgggtgagccgtgaggttcagtcagggcgtgttgcgccacatgatgtagcaattctgatcagaatgcgggcagatcaggtggagggtgagatagcccctgcttttgcggcacgaggtctcaggatcagaaatgcggcccggtcagtcggtgaaattcagatacaggatctgcttggtgaagagctgaccagcatattcgttcctttgctccgcctgggagcgacggaccgaagcccagaaaactgggagcaggcccagcagaactatctgtttctggaggctgccgatccggataacgatctcacgcaggaacggttactggttaagcttgaagcattcgtccgtcaattaagagcagagttggcgcgtcgccagcctgatccggatgcagcggaagagattgcagagatgcttcttgaatttgtagggacccctaggcttcggcaatcctttcccgcttacctgcgtgcaagggattttgagagggtgtggagtggatttgtcactctcctgaaagagtgtgcagaacacagcagcagctggacggaagcgctggatgagttcgaaggtcttggccaggtagctctgatgaccatccataaaagcaaaggtcttgagttccatacgatgatattttatgggctcgacaatcagacttggtggagccttacgccgcaacggggtgaagagctaaacactttttttgttgcctttaccagagcaaagcagcgtgcgtttttctcccagtgcgttgagcgagggcatgctattggctggatacagcaattattggccccggcgggagtcgaaaccatagatggtacgactatattgggtactacgtga

SEQ ID NO: 79880 - DNA, 1860 bp, Stenotrophomonas maltophilia
atgcgcctgctccgatttgaaatctgtaatttcaagtgcatagagcacgtggtcttggaatgggaggacctgcttgtcctcatcggggaaaacaacgcaggcaagtcttccgtgctgtccgccattgccgtgtttcttagcggcagttccatcagggactcatcgctctttcgccgacaccagaccgatgatggcaatgccatagagctgatcggctacttcgactgcctcacagatgacgagaaagcccaggttgctgttcgtggtcgcatggatggtgaccagtgggtgcttaaaaagcgctactggttcgagccaggcgaggacggtgatgcgggcggttggaaggaacagttgttctccttctccggcgttgagcggttcgtgggctggcctgaccctgatacgacttgggctgcgttcccggcggaatatcagccgattattgatgcgctgtccaataagggcgcgcgccccaacgccggctcaagggagtcgctcaaggctgccgtgcgtgatcagcgccccgatctggttgtggttggtgcggcagcctggttacccaaccccggcggtggcggcaactggaagagcaacgcaaactccatcctgcctcgtcccattctggttagggcagtccaggaagtaagcgacgagacaaatgcgaaggatggctcgacatatggcaagttggtcaatctcatcgttgagcgcagtctggcgcagcgtcccgagatggctgcgctccaaaccgctctggatgatgttttggcgctcttccgtccagatcccaccaatccgctgcggcaggctcaagaagttcgagacctgcaggaccgcattaatcagagcctcaatgaagtcatcggaggtcaagcgctgatcagtacagaggcaccggagctgcgaacgatggttctaccgtcgacctcgctcgttatccgcgatgcccaggcaggcatcgacacagaagttggccatcaaggccatggtctgcaacgcacgctggtcatcacgctactccagcttctcgctgacgcgcaatctcaaagttatcaagctgccggtaccggtcttcagcgcagcaccatactgctaatcgaggagcctgagctctatctacatccccagatggagcgcttgatgcgggacgtgctgcaccggcttgctgcgcagccgaacacgcaggtggcttgctgtacccactcgccggtcttcctggacatcgcgaacaggtaccgtgctatcgtgcgtatgttcaagacagcgcaaggcgatgccgcctgctatcaggtcagtcaggacttgtttcccggggtggtccatcaagcagacaagcagcgcctgcaaacggtggcaagatttcaccccacagtcaacgaactcttcttcgctaagaatgtggtgctgctagaggaaggcagcgcaattgcggccttcgagcgaggcgctgacttgatgggccttttccaaaggcacgtccgcttgcgtcgggaagtcacgttggtcgactgcaacggcaagaggaatattcctgccttccagcgcatgctaaacgcattcggcattccctaccgagtggtgcacgatggagacactaacaacccgcaggcctttgcggacaacgccccgattgctgcggcactccccgcgggtggtgcccatctaatccacaaggtgctgcccgacgatctggagggattgctggggtatacggccgccaagggaagcagcaagccctacatcgcggtttgcaccgtggaaaacctgcacgcgcaggcgcaattgccgacggctttccagcaagcagtgtgcatgacttactttggccagcttactgaaccgcagcctgggccctga

SEQ ID NO: 79881 - DNA, 2724 bp, Stenotrophomonas maltophilia
ttgctgaagttaaatgcaaactccaggagctatgaagccagaatcacaagatcatcccccatcgaaatcaatgagggcatcttctggaccgacctcaccctaagggtgaagggccaagacagcatcagagtggatggaattcccaacgcacacggccgggccatccggcaggccatcgcagcggtcgtagaagagaagcgtgtagccgccgctcggctagaactcgaaaccagactcaagtctcggcgcgaacgattcatcgcggccatagagccaattttgagttggcattacgaaatcctgcgggatgttgcccgccaccgccaggagcgcaggtggattacttccgaatccctgcgccgctatatggacagcaagccagttcctttggtaaccacgtctgagctcatccagatgctcgccgaggctgatatacaagcgttcctaggtgacaaactcaaagtagctcaaacagccaccaagttgtggagcgccaatctcaagggagctgtggctaggcgcaacgaggaacacgtgaaagccgagttggtggcttgcaagaacctgttcgacagcatcgagaagatgccactgactgaggagcaggcaagagctgtcatctgctttgacaaccgggtgcaagtcatcgcctctgcgggctcaggcaagacctccacgatggtggctaaggccgcttatgcggtggaccgcgggctcatagcgccagagcgcatatgcatgttggccttcaatgactccgcttccaaggagctacagaaacgtattgagttgggattgaagcgcatcggcagggaagacgtgaaggttgccgcgatgacctttcataagtttggcctggacgtcatcggcaaagccaccggcaggaagccacgcatcgccagctgggtggaacaagaaagggacgcagagaagctcgaggatctcattgatggcttgaaggatcggagcaagaccttcagaacccaatgggacctgttccgcgtcgttttcagtcgagacatcccaaaatttggcgtggaaacggatcatgaggactacgacaagatttcgggaaagacgggctttagcaccctgaaaggtgatgtcgtcaaaagcgagcaggaacgaacgttagcggattggctgttctacaacggcattccctacatttacgaacgtccctacgagcaccccacagctactgctgaccacagccaatatcatcccgacttctactaccctactatggcgctttaccacgagcatcaggcgctcgatggcgaggggaagccaccggataaatttccccgctacatggagaaggtcatctgggcaagggagcaacacgcgcacttccagaccgactgcatcgaaacgacctcggcccagatgtgggacggatcggcctttgaccacctggaggctgagttcaagaagcgtggtgtgacgcttgaccccgatcccaaccgcccggttgcaggccgagagccgttgaaacacggagacttggtgaggcttttccgtagtttcatcacccatgccaagagcaactgcctatccgtggccgaactgcgtaagcgcatcaaagctgaagactttgatgctttcacctaccgtcacaagctcttcttggccctgtacggccccattaggaatgcatgggatgaagccctgaccgatgccgatgcgatcgacttcgaagacatgctcaacatggccggcgagcatttggaagcgggtaactggaactcgccctatgagctgatcatggtcgatgaattccaggacgcttcatgggcgcgggcgaggatgtcgcaagctctagtaaagcagcctggtcgattcttgtttgtggtgggcgatgactggcaaagtatcaaccgctttgcgggtgctgatatctcggtgatgactggctttcgggactggtgtggagacgcccaagtgctcaagctggaacgcacattccgttgcccacaagccttgtgcgatgcatccagtgcattcgtcatgaaaaacgaaaagcaaatccctaagaaggttcggtctgaaacactacagattggcccggtgctacaagccttccaggtgctagacagaactcgcatccgaggcgctgtccggttgcacctgcaatccatctacgagcagcttcgcgatggctcgcatccactgggaaagaacggaaaggtgtcggtctacgtcctgggccgctacaacgccgatgagcattacgtacctcccagctggaagagcgacttcggcgacaagatggcagtggagttccataccatccacaaatcgaaaggctcggaggctgactacatcgttcttccccacttggccaagcatggttttcctagtcgcaaggaggacgatccggtgctacgcctggcgatgccagctgaagacccctaccccaagtcagaagaacgtcggctgttctatgtagcgttgactcgtgccagacgctcggtggcgatgttcaccgtgcaaggccgcgagtctcccttcctcattgaactgatgaagggcggctgggttgaagtactagacgccgatggcgagccgtcaaccgccatcgtctgcccaaggtgtcggaatggagtaatggtgcagaagtccggccgtaatggtccttttatgtcatgcaccaacttcccaccctgcaagaagacaatgaacatcccccatatgccgacatctgggcaacggacagtctga

SEQ ID NO: 79882 - DNA, 1788 bp, Flavobacteriaceae bacterium CRH
atgtatctatctgaattaaaactttggaattttagaaaatatggatcagaaaagccatttgatttgagtaaacctaatttaattgttccttttaataaagggttaaacgttttaattggtgagaatgattcaggaaaaacttctattatagatgcaattaaactagttttaaaaactcatgcctacgaatggattaaagttgaagaatctgatttttatcgaggttctgataaattaagaattgaacttgaatttaaagatataaaaccaaacgaggctaaaaattttattgaatggcttggatgggaaggtactggtaaagatgcaatacctattttaagattgatttatcaagtcgaaataaaacaggatagaattcaagtaacagatgttaaagcgggtatggatgaaataggttattcattaaatgctgaagcaagagagtatttgaaaaccacttatttaaaagcattaagagatgccgataatgatttaacagcaaaaaagaattcaagattatctcaaattctcaaagaacacgaattttttaaaaagaaatcaaaagatgaagagcatccttttgagtctaaatttaaaaaattgaatttagagattgaaaaatggtttaaagctgatggaaatgaaaaattgaaaaagattattgatgattttttagtatcatttacacataaagataaaacatctaatatctctcttggagatagtgatattaaaagtattctggaaaaagtgtcacttggaatattaaatgagcaaaaccttggtttaggaacaatgaatcgtctatacatggcagccgaattgttacatttaaagaaagaaaattgggatggtttgaaattgtgtatgattgaagaattagaagcacatttacatccacaagcacaaatgaaaattattgaagcgctccaaaaggaaacagaagttcaattcatattatctactcatagtccaaatttagcatcgaaagttaaacttcataatttgatattttgtaataacaatatggcattgcctttaggagaagtaccaaatgaggaaaacgaaagaactaataaagataaatataccaaattagataaatacgattataaatttttagaacgatttttagatgttacgaaagctaatttattttttgcaaaaggtattattttagttgaaggctggtcggaagaaataattttacctgttattgctaaaagattaggatatgacttaacagaaaaagaaatatcgatcgtaaatgtaggttctacagcttacttaaagtttgcaaaaatatttttaagacaaaatgcaactgagaaattaaatattcctgtagcaataataacagatttagataatagaccagaagctaaagacaattcattttgtgcagttaaaaaagaaaaaaaagaagaaaaaataaaagaattagaaaagagcttcaataatacaaatgtattactatcctacacaagtgattggactttagaatggtgtttgtataactcagagacgctctctaaatcttttaaagaatctgtttctgaagttcattctggtacagatgaattcaaaggagagaagtttgaagaaactaaatttatatcaaaattaagaaaggataaaggacatagtccaatcgataaagttgaagttgcttctttattagcagaaaaaatcgaaaaaaattatttaatcacaaaagagaatttagcgaaagacaaaaaaatagaatacattattaaagctataaaatatgcttgcgatgaaaattga

SEQ ID NO: 79883 - DNA, 2235 bp, Flavobacteriaceae bacterium CRH
atgaaaattgaaataaatgatattcacattaaggaggctgagaatatttttatacgaggaaacgaatttgataaaaaagaaaggattccatttattaagaatcttgaaacttgcgatttgttagcagttccaggtagcggaaaaacaaccgctttaatggcaaaactttattgtttgtctaaacaacttccatttaaagatggttcaggaattttagtattagcacatacgaattcaacagttaatgagattgagaaagaattaaaaagacattgtcctaatctatttgagtatccaaactttataggaactatccaaagttttgtaaataagtttttagctaatcctgcaaatttcataaagtatgagaactatttatataaagtggatgatgaaattgcaaataaaaaaattgttgattctgtaaaaaaacttgagtttaccaattctttaaagacttattttttctttcagatttatggacaaaatactcttgtttcaaaaaaggaattagttgaaaattatcaagtagtagatattaaagctaaagaatatattaaggtattaaaagatcaaaaaattttgaccaaaaatggtttgtcttatactaaagtcaaaaataaacatgctatatcaattttgaaaattgatgaaagattgaaagaaattttaaaatctattcacgataaagcaaaaaagatagttgatattgagaaaaatgaaagagcaattatttatagtttagatctaattaacaagaagtttttatatggaaactctccttttcgatttgattcagattcaggtaaagaattattaaaaattattgaatcacaatttaaagatggcattgttagatttaaagattgttattctcttgcgtcttggtatttacataattttccaaatgtcaaagaacaacttcaaaatcgtttcaaatatgtttttattgatgaaatgcaagatttagaaaaatatcaaattgatattattgacgatatatttaaaaaaggaaactctaaaacaataatgcaaaggattggtgacccaaatcagtctatttacaatcgagtaaaagacgattgtgattggaaaccaagaaaaattaaatatttaaatggttcaaaccgtttaagtcccaaaaatgctgaattagtaaattactttacatatagaaatgaagaagagaattttaaagttgtgggtgaaagaaaattattagatgatgaaaaagaaatctatcctcatttagttttatttactaaagaaactaaagaacagttaaaaagtaaatttgaagaaataataaaaaatcataatcttcataatattgaagaaaagaaaaaaggttttaaaattatcggctggacaggagaaagaacaaatgtaggcgatggtaatttatgtcttaatactgtttttggatataataaattaagtaaagcaaaaaaggaagattttgattcattgagtaaatatttacaactttttaatcaagaaaaagaaactttagaaagcgccagaaaaacaatactgaatgctttaattacaatattgagatttgaagataaaaaaatagtaaagaaaattagaggtaaaagtgttgagcgtttttataccaaaagtgatttaatagagtacattaaggaatattctaaaaatgaaatttatgaagattttaaagataaattatattcttggtgttttgatttagtttcttcaaagaactatacacttatttttgactcaattaaaagtttcattgagaatcaattaaaagattggtttgatttagaaataaatcataaaacgcagttttttatttttgaatttaatgatgaaaataaaattaaaaataaaaaaatagttgaagatgatttaggtattgaagttgcgacagttcatgctgtaaaaggtcaaacacattgtgcaacaatgtatgttgaaacagcatataaaaagcctatttatgaaactttaaaattaaaagaagctagttcaaataaatcgattaagaaacagcaatcaaaaacaatcccactatataagcaaaaacaaagttgtgaaacgccaactgggattgaagcgttgaaaatgatgtatgttggtttttctcgtcctactcatttattatgttttgcagttttagaggaaaatgtaaaagatgatttagataagtttaaaagtgctgattggattattaatgatgatttaataaaaaaaaataaattatga

SEQ ID NO: 79884 - DNA, 1767 bp, Bacillus licheniformis LMG 7559; identical to SEQ ID NO: 74898

SEQ ID NO: 79885 - DNA, 1377 bp, Bacillus licheniformis LMG 7559; identical to SEQ ID NO: 74899

SEQ ID NO: 79886 - DNA, 1428 bp, Methanocalculus sp. 52_23
atgtgcgccgtattacaatctagtgggattaaaatcatagaagtacgaattcgtaactttcgttcccttaaggaagtcgacgtccctctagattggctgactgttcttatcggcgagaataatgcaggaaaaacgagctttcttgatgcgctttttgtggcaattggtgcaggacgacgtagcatctccatagatgatatatacttagcaaaatctgaaaaaaccgtccctaaagatcgagacgttattattgacttgctcattcgaccaacagacgatagcggaaatataactgatgctttccaggcaggtgaatattggatcgaactttatggagaaggaatctcacaagatgataatgatagggactttattgcgattcgtactcaaatgaaatggaatgcaaccgaaggggaatatgaagttgagaggaaattcttgggagattggcaggatcctggacgattagaccaatcaaaaactaaaaaaactgtttcagccaaccaaataaaacctttatctctctatttgttggatgccaaacgtgatatcaaggaggaatttcaaagtcgtagttccttttggtataaattaatatctgatttaggtcttgaaaatgaattgatagacgaaattgagtacgagcttgataagatcaacgaaggtatcatctctggcagtggtgtcttaaatcatattcaagaacatttgaatggtttatacaaaacaataggaggtgatagagaaagtgtctctattacacccattacacgccacctaagagacctcagtaagggtatggatgtaaattattcgacaaagggtgctcagtcttttccgcttgctcggcatggtatgggcacacgaagtcttgctgcagtactgaccttcagagcatatatgacatggaaacaaagaaactcagatggcaggaatatccatccgatgttggctttagaggagccagaatctcacctccatccacaggcacaacgagcgcttttctttcaaattgaagagatccctgggcaaagaattatcagtactcactcaccatatattgcgggtcagacagatgtgtcaaaatttcgccactttagaaaagttggagataatactgtggtaactctgatggatatagctggacttgatcaggatgatatccataagattgaccgcatggttatgaatacacgaggtgaaattatttatgcaaatgcccttgtacttttcgaaggtgagcagactgaagaccaagcacttccgatctttgcagagaaatactggggacaacatcccaatgctttagggatctccatggttggtgtgggtggcgatgggctttatcttccatttatccgtcttgcgaagagtttccaaattccctggtatatctttttcagatggagaaaatgtcacggttactaa

SEQ ID NO: 79887 - DNA, 1893 bp, Methanocalculus sp. 52_23
atgaacattcaactttctaaaacacaatgtagaattgtccaacatggcgaaggcccgttgcttgttgttgctggacctggttctgggaagacccgagttctaactgaacgtattcgaagactattgaatgaagataaaggccattttcgtatattggcgctgacctttacgaataaggccgcaaatgagatgaaagaccggctatcggagacgcctaatatcgatcaacgcgcgtttatcggcacactacatagtttttgcatggaagttttggctaatagaggaaaacctgtagggatcgaaaagttacccagtatcttcgaatcataccaagatcgcaagcaagtcctatcccaagccgttatggaagatccctatctcaggcataaattgaacattattctggatgcaaagagtcaagacaggcgtctcaatagctggcttgatatgatctcggcagcaaagaataatttatatcttccggaaatgttggacgatgaaactgaaaggcaggtgtatgaagcatacaataatggtcttcgcgtatcaggtgctgtagattttgacgacctattgttgctcacatatcgcttgtttcaagaacgtcctaagatagctgatttttatcggcggcaatatcgttatatttgcatcgatgagggacaggatttaaacgaagcacagtatcaagttatccgcgctctttgtggtcttgaacatcggaatgttatgatagtaggtgacaaaaaacaggctatctttgtttggaatggggctaatccaaaatatctcgatcaatttgagcaagattttggtgcgaaaaagatcttcatgaatgacaacttccgatcttctcaggtggtcgtcaatgtagcaaaatccttagtttcagagtacgaagttgaagggcaactaccaattgtcggatctatcgagttaattgagggcatggatgagcaacatgaggcaagtcttgttctcgattatattcaaaaactccttaatgaaggacatagggatgttgagggtcccataaccttggaacgttgtgcattactaggcagaaatagatatgcattatctgcggtcgaagatgaattaaataagcgccagtggccttactacaaacagctttcagcacaacatgaaagtgaatcggacttaattcaggattttgaaatcggtttgcgtcttgttgtaaatccatttgatcgcttacatctcagtatgctgctcaagcgttggaatatgcgcgaagggatctcttattttaaccaacgtgctgatgacggcttaagcttattatccgctttaaagaaacgagtatctaatgacgatcaaatagctgtgattcaggctattgagtcgatggagtggaccgaacaaaacttcaagtttataaacgcgataaaatatctcgatgattatgccaataatataataaatcaagacgagcgcgctttgattctggaagatataaaaatttggcaaaaacattgggattactatctgcgtttgcagcctggcggatcccacacgcttacatcttttttgggacaagttgcattggggacaacgcagcagccaagacaagaaggattagccttgcttacggttcattcagcaaagggactggaattcgatgtggttgttgtgatgggtatggcagagggaacctttccagactatcgtgctagaaacgctgcggcgttggaagaggaaaaaagagatgcttttgtagcagttacacgttcaaagcgcttgctagcattttcctatcctaaaaccaaagtaatgccctggggcagtaaacgtaaacagaatccctcaatatatttagaaacagttggtctaattaaacacgataaatcaaaaaaaaccaacgccagctaa

SEQ ID NO: 79888 - DNA, 2097 bp, Flavobacterium psychrophilum
atgaagataaataaaataaaaattgaaaattttaggcttttaaaaaactttcaattagacctcgaaaatgaactttcattagttattggtaaaaataattgtggcaagacttctttattggctgtattagataaatttttaaatcagtccgataaaactaaattttcattcgatgattttaatatggattttaagaatgagattaaaacattagttgagaatcctccagtagatgatgaagtatttgagcaaaaaggtatcaaattaaaactatttattgagtataatgaagacgatgatttgtcaaatatttcaagggtaatgatggatttagatccaaataataactttattgttttagggtttgaatacgttctggatttagaaaaattaaataaattaagaattgattataatgaatttgcaaaaaaagaagcaataaaaactaaaaagaaaaaggacgatgaacccaagttggtgaaagatttaatttattttttgaaagcgaaccaccaagattattttttgttcgccaaaaaatctattgagtttgatttaagtaccaatgaagaaaatgaattgaattttatcgatttgataaaagaaaaaatcaacattaaggaaataattaattttaaatttattagtgctaaacgtgaggtttctaacaaagaagttgataaaactttatcaattcagacttcaaaaatttacaaaaagacagaagcaagtgatgagcaacaagaggcaattgatgattttaaagacaaattaagtgataccgattttgtgttaagtgatatttattcaaatctatttaaaaatgttattgaaaaagtcaaaacatttggcggtatcaaaaaagacgattcaattattgaaatagtttcaacattgcaacatcgcgagttacttgaaggaaatacaactgttatgtacaatcataatgaaagttcattgccagaacattacaatggtcttgggtatatgaatttaataagtatgatatttgaaattgaaatacttattcaagattttaaaaatagtaaagatgaaaaaccttcggatataaatttactatttattgaagaaccggaagcgcacactcatccacatatgcaatatgtatttattaaaaacatcaaggaattattaaaacaaggaattaaaagagatgatggtcaaagtggagaattgcaatcaataattagtacacattcttctcatattgtttctgaaagtaattttgatgatattaaatacttaaagaaaaacgacaacaattctgtaatcgcaaaaaacttaaaagaattaaaagaagagtataaagcaaatactaaacagtatgaatttctaaaacaatacctcacaatcaatagagccgagatattttttgctgacaaagtaattttaattgaaggagatacagaaaggattttgtttccaactttgatgaaaaaatatgatattgatgaagaaaaaaaatataaaaacctcggaaccgttgatgattcacttcctcttctttctcaaaatatttcaattatagaagttggagcatattctcaaatttttgagaaattcatagaatttataggcataaaaacattaattattactgatttagatactgttggactagatgataaaaaatgtgaaccatcaattggagttagctattctaacgatgctttaagctttttctttaatgatccgacattaactgatttaaaaggttttactattcaaaataagatttttagtaatactaatggtttatggaatgttgatgctaatggtaaattatgtgttgtttaccaaatactagaaaatggatttaattctcgcagttttgaagattcctttattcatttaaatagagaatttatcactccattaaaagatgagtttaaaggcttacaaaatcgcacaaattttgataatacagctaataacgcttatctattagctgaacattgtattaagaaaaaaactcattttgctttggatatactatataatagcaacgatgattttagtaattggcaaataccaggatatataaatgaaggattgttatggttaaaacaggattag

SEQ ID NO: 79889 - DNA, 1902 bp, Flavobacterium psychrophilum; identical to SEQ ID NO: 71913

SEQ ID NO: 79890 - DNA, 2097 bp, Flavobacterium psychrophilum; identical to SEQ ID NO: 71912

SEQ ID NO: 79891 - DNA, 1902 bp, Flavobacterium psychrophilum; identical to SEQ ID NO: 71913

SEQ ID NO: 79892 - DNA, 2097 bp, Flavobacterium psychrophilum; identical to SEQ ID NO: 71912

SEQ ID NO: 79893 - DNA, 1902 bp, Flavobacterium psychrophilum; identical to SEQ ID NO: 71913

SEQ ID NO: 79894 - DNA, 825 bp, Pseudomonas sp. EpSL25
atgcggccctccagcccctcatggtgccaattctactcgctcggatttttcgtacagagcctaggtctgagcgtggacgagttggggctcagtgtcatcaacatccgtagcaccgggttcaaaaacgtcgcggttctgttccacgacatccggatcagaaagaggtgcgcgatcgtcacagacatggacacagtgttcttcgacaccacgccgaatctggcggacagcgacgcctgggctgccagaaagcgcaaggcgatcggatcacaaacggccggagcgcatcgaaagatcgatctggacgcatttggagctggcaacgtttgggtgcgtagcttctacgcaacgcatacattcgaggtggattttgttggggcgggcaaccatgaagtgatcgtgcgtaccgtcgataaagtctacaaggcgccagcgacgatcacgcaggcaacgaccgagcttcgctctggcctccttcatcagagtggctttcgcaccctgacgatggccgagcaggaaggcaagggatggttcgcggtcttagtcgcccaaactctggatcaccagctcgtggtgccgccatacatccgagaagcggtgctgttcgcgcacggctcgttttcgcgcccgctgattattcgaattctccaataccggatcagttgcctgtggcgcatagatgtcgcttcgcatgcgcgtctgagcgcgtttgctttggagctggagcggttccgtgagcaggagatcgatttgcccgcgctgcgagcggcaactgtagcagcgttgccaggtgatgtggtccatgcgttcctggccggtatgaactga

SEQ ID NO: 79895 - DNA, 1779 bp, Pseudomonas sp. EpSL25
atgttcgtctgggatgccaccgagcttaaccccgaacaagcggctgccgtcgaggaaccgtcgagcgtttttcttgtcgcctgtccgggcagcgggaagacacgcacgctgacctacaaaattgcttatgagctgtcccgacgtacggacaagcgcatcgtcgcagccatcacgtatacgcaccgggccgctgacgagattcaggagcgcatcgaggcccttggtgttgacaccactgccctgtggatcgggacgatccatgcgttctgtctcgaatggatcatcaagccttacggaatctacgtcccggaactggcacgcgggtacacggtgttggatcggcacgaccgagagaagatgcttgagcggctttgcgaaccgtaccgcggcgtgaccttgtatgactgcgactattacttcgaagaagacagttaccggctggggtgtgccgacacgtggaagcacgacacgatccacaaggtgctggcggcctactttcgagaactggcggacgcgagacgaatcgatttcgagttgatcctctggtactcccaggtgctgatccgaaatcggccggatatcgcggtgctactctcccaagtcttctcctatgtcctcgtcgatgagtaccaggatacgaagcggatccaatacaacttggtgggggctatcctgcgggcaggtgccggccgcaccaaggcgttcatcgtgggagatcccaaccaagcgatctacggctcgcttggcggttatgccatttcggtgtcggattttcgcgcgctcacgggcatccccattcaggagatggcgttgcgtttgaactaccgctcaagcgcaagaatcatcgggcacttctccaacttcaatgtgcacgccacggatattgagggcgccgggaagatgatcggctttccgagccaagtctcttacaaccgactcattgcgcacgaagaccttcacgatgaactggtcaggctcattcaaaagaacttggcggaaggacatgcgcccgaagagatttgcgtgctggcgccgtggtggatcttgctggcatcgaccacccgcaaacttgtggcgatgctccctgagcagcagttcgacggtccgggattggtgccgttcagtaatgataccgacaacttttggttcaagctctccaagatattgctgacggagtcgtcgccccagatgctggtgcgacgcatgcgatgggccagggacgtcattgccgacctgcgagattttggcgtcgacacggcgaggattacgcagagatcgctgctgcgggagtccaactccctcgccattaccgaaacagacggcttggcttatctggaccaggcgttcgtcgcgttgctcactcgcctgggaatcgagctgcgtgctttccccgctctggtagagcatcgtgaggcattctttgcgagttccctggcgcggctggagaagctgcagaaatccggcgccggctacatcaccgatctgtcgttcttcaagaaggtgttccgtgaacggactgggattaccgtgtcgacgattcacggggtcaagggcgcggagtttgacgtggtcatcgcatttggtcttctccagggcatggtgccccacttcagcgaatccgacggtgatgtctcagccagcaagctgctgtatgtcttggcctcgcgcgctcgaaagcacttgcatctcatctcggaggccggtcgctcacgcggaagacatcggagctacgagcccaccgaggttctggttcgctgtaaattcgattacaacgggtag

SEQ ID NO: 79896 - DNA, 1884 bp, Streptomyces phaeopurpureus
gtgtacgtggccgaggtgctggtggagcggttccggtcgtgcgagcgggtacagattccgctgcggccggaagtgacggtgttggtcggggagaacaacgcgggcaagtcgtccgtgatcgacgcgctccggctgctcacggaccccctggacgggcggcgcgtgcggtatttcgaggagtccgatgtcctcaccaccgcggccgcacagggcggccccagcctgcagctggacgtggcccgcatcggcccgcaggaaagcggcgcgtatctggaggcgctgctgccccagggggctcctgacagccgtaccgcccggtggcaggtgtcctggacgccgccgcaaacgggcgggcggcgtggaagcaccgtctgggcgcagggcgcgggccttccggtcacgggggatcctccggcgcggggcggtgtgcggcatgtctatctgccggcgctgcgcgatgccgagcgggaactggcctcggcgggcggggatcgggtacggatgatccttcgcgggctgttgggcgatgacgagcggggcgatgccttcgtggaacggatcggcaccgagctgaagaaggtggctgcggacccggacgtggtccaggtcagcgagaagatcaacgagccgctgcgggatctgacggtcggcgtgcatccccaggcgagtgaactggccctggccgagccgacgttcgcgtcgatcgcccggtcgctgcgcatgctgctgggtgatgtctccgccgagccgttcccgttgtcggcctcggggctgggttacgccaacaccctgttcatcgccacggtgatggccgagctggacgcggcggcggaggcggatctgaccgtgctgctggtcgaggagcccgaggcgcacctgcatccgcagctgcagaccctgctgctgcgttacctgcagcggcgggcgcgcgcctcgcgtcggcggccgtcgggggacccggctgagccggccgggcatctgcaggtggtggtcaccacccactcccccatcctgtcggccgcggcgagcgttcaggacctggtggtcatggcgcgctgcccgggtgggttgtcggacggctggcaggcgcggcctttgcccattccccggctggggttgagcccggagcgggtgcggcatctggaccgctatctcgatgccaccaagagtgctctgctgttcgcgtcgcgggcgatcctcgtggagggtatttccgagcttctgctgctgccggctctggccgagcgggtcctcgccgcagacgagggcgccgatgcgccggcgaagcgggaggcgttcgaggcggtggaacggttcttcggcaccacccgggtgatcgtggacggggtcgggttcgaggtctatctgcgggtgctgctggcgcccgttgacggcatctgtctgggccggcgggttgccttgatcaccgacacggacgtggcgcccgatcagccggaaccaccccggctgcagtcgctgcggaagctgccgcgcggctggcattctcctggcgagctgcacctggccgcggcgccgaggacgctggagccggccctgtggtcgcacaacaacatcaccgccttgcgggcggcgttcctgcgctgtgcgccgcactcgcaggaccgctgggagcaggtcgttcaggcgacggatcccgccctggcgttcggggagctgttcgtcccgaagaccagccggaccgtcaccggcacggacggagacatcctgaagggcgccgagatctccaagggccggttcgcgcaggaactcgccgacgtgctggccgaccgggtggtgccgttcacggtgcccgagtacctggcgggtgccatccgtttcatcaccgcccaggacacgagcacgccggcagtgggcgcgccatga

SEQ ID NO: 79897 - DNA, 1749 bp, Streptomyces phaeopurpureus
atgacgacgcctcagcagacggatccggtgcgggccgacgccgagaagcagcagcaggccgctatggccgtggccgcgcctgcctacgtggccgcctgcccgggtgcgggcaagacacatgtgatcaccaaccggcatctgcagtcgccccggcagcggctgcggaaggggcgggcactgatctcgttcacgcgggtggcgcgggaccagatggcccgccgctgccgctcggcgggccgcgccgatctggtccaggcgccgcacttcatcggcacgctcgactcgttcctgtgggaattcctggtcaagccgcggcgggcggccgagccggcgccccgtctgctggaatcctgggcgagcatcaaggccccggtgcagggcacggaccgggagatcaacctgcaccgcttcctcatgacgatagatccctcccacaacgaggcgcgcgaggcggttgcctgggacaagctcgactacgacacccgccagctcctcaaggacagttcctacagccgcgcgcagtgggagaagaagatcttcgagacccgcaagtcgtggtgcgacgaaggctatttgaccgggcacgaggcgcgggtcctggccctgtggaacctgcgccactccaagaccgccgccgctctgctgcccccgctgctctcccggttcgcggaagtcgtcgtcgatgaggcgcaggactgctccgcagccgacctggcgatccttcagctgctgcacgacgccggcttgccgctggtcctcgtcggtgacccggaccaggccatctacgcctggcgcggcgccgaaccccaggctctccagtccttcgccgctcagctctctcccgccccgcaccgcctgaccggtaactggcgcagctcccccgtcatctgccggctcgcgtccaccctgcgcacggggcagcggccgccggacacctccgtggtgcgcgacgacgacatccccgtcctcgtgctgcccacccggttcgccgactccggcagccggcacctgcacgccccgaccggtgccggcatcgtcgacaccttccgcacgctggcccaggagtacgccgtcccggccaaggactgcctggtgaccgcctacaagtacgccaccttgccgggcatcacccgggagaagcccaacaccaaagccatcaccagcctggcctgggcccgcaccgtcacccacaccccggacgccagcggcgacgacctcgcccgggcctgcgcggtcgccgtgcgcgtcctgttcggctactggtacccgggccagagcggcggccccgaccgcatcatgaccggccaccgtctctcggccggacaggtcaaccgcacggcgttcgccttcctgcacagcctgcctgcgccccaccgggaatgggggccgcaggtctggcaggccatgaaggcctggccccctctgcccggggctgctccgcaaggcggcaagggccgcctcgccggaaaacccaccgtgtcgcgcctccaggcggccaccggtatccgcaccaacatcgtccaccagctcaagggcgatgaagcagacggcgtcctgctgttgctgcccgatgccggaagcgtccagcgctgggccaccgtggacccggccaccgacgaggtcctgcgtgtctggtacgtcgccgtcacccgcgcccgccggctggccgccgtcgccctgcccgaagaggagagtgacgcgctggcccggctgctgaccgagcgccaggtcccggtccgcgtcgcatga

SEQ ID NO: 79898 - DNA, 2025 bp, Streptomyces ciscaucasicus
atgcacgtcacccacgccaaagtggctaacttccgcgcattacgtgacgcggagatccagatcgacgcgtcgacgacactggtcgtgggccggaacaacagcggaaagacatcattcgtcaatctgttcgagaaattcttcagcccgagcgacgacgtcaagttcgtccttgaggacttcaccacaagtcgcattgccgacctggagcacgctcgccgacagttcaccgacgccgcgcagctggacactgcgggcgaccaagaggccgctggagccctgcggagcaaggcgcttgagctggtgccggccattcgtctcgcgatcacggtcgaatacgacgaggaggacgatctcgcccccatcagcgccgcgatcctcgatctcgacgagacctgccgcagtgtccgcatcgttgccacgctggctgccggcgacccggtgaagctcgttgcggacttcagcgaagccgctcgccgtgctgggagccagttcgacagctacaagtggctgcgtcggaaattcaacgagtacttcacggcgacgtaccgtgcggtgagccccgtcgatgactcggtcagccgtgaactcaaaccgactgccgcgcggtcgatactcgccgtccgcttcatctacgcgcagaacaagttcgacgacactcccgcggacaagacccggaccctgtcgaagacgttcgaggcctactaccgggcctcaagcagtgatgacaaccgtgggcagaatgtcgaccggatcgaagaggcgctcgcgctggcatcgaaggagctggactccaactacgacgaactcttcgagccgttcctcgacgacctgagtcgcttcggcctggagctgatgtctccactgcacccgccccggatcgtcgctctgatcgagggcgctgccgtcctgcgtgggagcacccggatccagtatccctccggggatgatcagtacccgctgcctgaaggccacaacggcctcggctacagcaagctcatcttcactattttgcagattaggggcttcatcgagagttgcagcaaggccagcccacagcctgcgctgcagatccttttcatcgaggaacctgaggcccacctgcatccccagatgcaggagacgttcatcaagaacatcgaggagtacatccgcagcaagaccgaccggaaggtgcaggtcgtcatcaccacgcactcttcccacatggtcgccaggagcggtttctccaagatccgctacttcgacgccgcggagcaccacgtcaccatcaaggacatgtccacgttccaggccagcgtcaagaagaggagcgacggcagagagactctgcggttcctggagcagtacatggaactgcaccgctgcgacatgttcttcgcagacaagatcatcctcatcgaggggacggccgaacgtctcctcctgccgaagatgatcgcccggtgcgcagcgcgtctgcagcgccagtacgtctcggtcatcgaagtaggcgacgcctacgcggtccgcttccgcagcctactggagttcctcaacgtcaagaccctcatcatcacggacatcgactccgtcgacccgtcccataagaagcgcctcggctgtcatcccgccaccccgggtgcctgcacctccaactccaccctgaagcactggcttccgggcaaggaagtcatcgccgacctgctctccacaccagacgaagacaagctgagcaagaacgttcgagtcgcctatcaggtgcccgaacagccaggcggatccttcggccgcagcttcgaggacgccttcatcatcgccaacgcccttgtcctcgccgaaaacatctccggcctcgcgctgaaggggcacttcgaccgcacggtgggcgagcaccccagcgaggcagcaatcgcgacgcaggcttaccagatcgcggagaacctccgtgaccacaagacagacttcgccttcgacgccatgcttctggacggctggaaggtgccccggtacatcgacgagggcctgcagtggctgacactcccgtga

SEQ ID NO: 79899 - DNA, 1632 bp, Streptomyces ciscaucasicus
gtgaagacaacgatcgacaaggtcatcggtgaactggaagcacggcgcagcttcctggtggaggccggtgccggcgctggcaaaacgacgacactggtcgaggctctggagcacagcctccgcagccagggtgcggaattggcgagcaagggccgtcgcatcgcatgcatcactttcaccaacgtggccaaacgcaagatcaccgaccggatccacgaccacccgctcgtgacggtggcaaccatccatgagtttctctgggagatcatcaagggcttcggagccgagctgtggcagcagatcattgaatataacgatgcactggcgacacccgaggatctcagcgagctcaccggccctctgccgcctgtccagtacgtcgatcggcgacggcgcctggaccggggggagatatcccacgacgaggtcatcgacctcgcgctgcgcatggtgacccggcatcccaaactcacgcgtctcatcgccgactgctaccccgtcgtcttcgtggatgagtaccaggacacctcccccaagacgatccgcctgctgctcgaccaccttgccggggccggccgccagtcatgcgtcgttggactgttcggcgactcgatgcagaagatctacgccacggggcagggcgccgttgttcactccaagctgaccgtcatcaccaagcacgagaactaccgctgctctcccccggtcgtcgccgttctcaacaagatccgtcccgagctgcagcaggaagcggtgggcgggcacacagacggggaagtgcacctcttcctcaactccgccctgccccctggcccggcacgcctggatgcggctcgccggcacctcgccgaactgggctggagcgacgacacgaccagctacctgatgctcacccaccgagggatcgcgggagccctgtcctacggtgcccttctgcagcagtaccagatcctcggctctcgaggtcgcgacaaactcctggacaacgacgagccctacatcgaatacttcagccgggtcgaagctctctgtcgcgccttccacgcactcgactacgcagagctcaccagccttttggtggcaggacggaccaccatcacaagtcacaccgacaagcagcggatcgcagccgacatcagacaaatgaccacggtgcgagagtccggaacaatcggtgacgtactcgaccacatggctcgccagcaccttctgtcagtgccccgcaagctcagcgacctcgaacgccgacggaagtctgaaaacctcgaaggctacgacgcaaaactggccgaattctccaacgccctgcgggaagtcccctacaaggaagtcatccgcttcatcgagtaccgagagcagctcaccccgttccacacccagcatggagtcaagggcgacgagttcgacaacgtcatcgtgatcatcgacgacgggtcgtggacccagtacaacatgggcaagatgctcaccggccgtgacctcgagaaacgactggagcgatcacgtaacctcttctacgtctcgtgctccagagcccgccgtggcctcgcggtcgtcttcctcaccgacgtccccgacgaagccctgcccaacgcctacgactggttcgcgtcaggcaccgtgcacccttga

SEQ ID NO: 79900 - DNA, 2016 bp, Streptomyces corchorusii
atgcagctcagccgtgtacgggtcaagaacttccgcaacttcgaggacttgacgatcgccccgttcccctctcccgctgtcatcgtcggtgagaacggggtaggaaagagcaacctactggccgctctgcgcctcgtgctggaccctgagttgctagatcggtaccgcgtcctggatgccgacgacgtctacgatggcagtctcggcatcgccggcggtgccgaggtcagcgtggaggtagagctttccggttttgacgccgacgcagacgcacgcgccgtcctcgacggtgccatcgtcagtctcgctccgctcacggcccgtctcacctacttgttccgtccccggcagcgtgcaatcgacgccgacaccagcggcgccgacagcgacgcgcctgagggagagctgaccgcggcagactacgaatggacgatcttcggcggcactgatcctggcaacagcatgcgggacgtcaagcgctacgcggcattttctgtgctgcctgcgctgcgggacaccgagcaggatctcgcccgtcctgaccgcagtcccttgacccggctgttgcgcgagctgccgccggccgccgagaacctggagagaacgctcgcggtgatgcggcaggcacgcgccgagctcgccaaggacgacaacgtacagaagctgacacagcaactcacgaagcggatcaccgcgctggctggtccccgcatgagcatgtccccgacgctggatttcgctggacgcgaagaggacctgctgcggcgcgtgcagttgtacatcgacgcggctaacacgcgcaccatcgatcggacctccaccggcatggccaacgtgctgtatttggcgatgttgttggaacgcctggagatccggcgtgtgaccgaggatggtgaagacactctgctagccgtggaggagcctgaagcccacctgcacccgacactgcaacgtcatctcttcttccatctgctgcgtaacctgagccgactgatgctgaccacccacagccctcacatcgctgcggtcacccctctgaccagcctcgtgctgatgtacgaggagaatggtcagatccaggcccggtcggtgcccaaggcgctgctggaggagcgggagcgcaaagacctggagcggtatctgaatgtcagtcgtgcagagatgctcttcgcgcgcggcattgttctggtcgagggcatcgccgaggcctaccttgttccggcgttggcaagcgcagcaggactggatcttgacgcacacggcatcgtggtcgccaacatagaaggcaccgacttcgttccctacgcacgtctgctggggccaaccggactggagcggtcattttggattctcaccgacggtgaccagaccgatctcgaccctcagcagcatgcgcacctgagggaaggcgggctgacacgcgccgtcgacgtcctggacgtcctgtcacctgctgatggtgagcggatgcggacaacactggaaacgatgcgtctggcggaactgcctgaggatggcagcgctcgtgaaggacgcgatgacttggtcgccgccgcggcacagcaccgggtcttcgtaggcgaacataccctggagatcgatctggcccgcctgttggacgaggagatgcgggccgcgttcgacgagttggttgcggggcccgtggcgcgcgggaacttcgcagatgccctgcgggcggccttgtccacgaccacgccgcaacagcgcagggacgtgctcagtcggatcgaaaagaaagaggtcagcaaggggcggtacgcccagaggctggccgctcatgtcgagcaagtcggcgacctggccgcgcgtgtgcgcgctctcgtgggagtcgcccccgatcagccggtgacccagacgatgctgatgcagatgggcggctgcggtccgttgctggcgctgcttgatcagctctgtggcaactgccttggccgtcccctagcccccggtgtggaaatggacgcccagccggccgtcgatgtgcttgacgccggatga

SEQ ID NO: 79901 - DNA, 1869 bp, Streptomyces corchorusii
atgcaccacgaccagctgcccgcgatggaagaacgactgcctgctgcgctagcggccgagttcgccgaactcactgacgaacagcgggaagcagcctcacaccagggaagtctggtgttgcgcgccggtcccggcgccggcaagacccgaaccctcgtggcccgcgtcggatacttgctcgccaccacgtcacgtcaccgctcagtcgccgccatcaccttcaccgacgcagccgcgaccgaggtcacgcaacggctgcggcatcttggcttgcccggcggtcgtcgcatatccagcagcacgatccacagcttttgtatgcggcacatcctgctgccctatgcccacttcaccgacacaccgctacccgacgacttcaccgtgtgcactgaggctcaaagcagcaaatggtgggacgaagctgcatacgacgccgggctgggcgagctgaaaagtaaagaccgcaccgaactgagcaaacagcgcaggctgctggctgccggaaccgactctgcgtccttcaacctgctctaccgcgccacgatcacccgttaccgggagctgctcaccgagcgccaggttctcgacttcgacgccatacccgagcaggcgctgaacgtcctgcgaagcacccatgaagtgcggaagatgatcgccgcacgctttccgcatatcgtcgtcgacgagtaccaagacctcggtccggtcctgcacgccattgtcctcgagctccttgcctgtggagttgagttcaccgtcgtcggggacccggaccagaccatgttcggcttccagggagccagcccccactacctaacggaactggaacaactccacgggttcgtcacccggcagctgaacgtgaactggcgtagcggcagccacctaatcacggccggtttgcgcgttcttgacgccgaccgcccctaccgagccgcacccagccgcaatgaacccggactggtcaccgaggaaatcatcgttggccatcgtgacctcgacgaacacgcgtcccgtgccgtcaccatcgtgcaggaccgcatccgcgccggaacgcagcccgaagagatcgcagtgctctacccgagtcagggaccgctgctgaccgaactccacactgccttcgagcaggcccaaatcgcctatgacgccgagaaagcccgcaagatcccgcctgggcacctggccgacttcatctccgactgcaccagccgctacctcgcaggacctctgccaggtggcgcgagcgcattgcccggcgccgcaaaagcccgcaccttgatggaactcgccacgttgtggcaccggcggcgcgtggcagccggcctggccatcgaagaggacaccccacgtcgtctggcacgcacgctcacccagctcttggacgccagtccccgaccgcagccagccgacgacgccaccgactttctcgagcgcctcatctcggagctcgatctcagtaccctggccgcagcaagcgaagacagccgcgaccataccgccatccagcagtgccggggcgctgcagccgctggcctgtccttggccgaaatggccggcgcacgggcgccgggccgcatcgtgatgaccacctatcacagttccaagggccgcgagttcgacatcgtcgtactgcccggcctggtcaataagcacatcccgtactacggctggtccggcccgacccaacgggagatgcgcaatgcgcgacgcaacttctatgtggccttcacccgggcccgccacgaggtcgtcctgatcacaggcaagtaccacactgaccggtggggcgagcctcataccacccgacgttccgtattcgtcgatgacatcctcggcacccaccccgagcacaacgaggacaggtaa

SEQ ID NO: 79902 - DNA, 1992 bp, Streptomyces longwoodensis
atgttcatcgagaagctcgtgctggagaacttcaagtgcttcgggccggggcgcactatccttcgccttgaccggggcatgactgccttcatcggcgccaacggctcgggcaagaccgcagcctgcgaggcattgctgcgtttgttcgggatatccgggcaggagcggtccgtacgtgtggacgacttccacgtgcccgccggcgagaccgacctgcccgccagccgcgagctgaccatcgaagcggtgctcgctttccccgaactcgacggcagcggggagaacgacgaagtcggagaagacgacgatggtgatgccgcggaggatgcggagcaccagcaggccggagtatcccgagcagtcccggagttcttccggcgcatggccgccacggaggatggcgacctgaaggtccgggtggcgcttcgggccgaatgggtcgatgacggcacggtggagggggcgatcaccgagtcacgcgtgatcgtcaacacccttgtcgaggagtatggcgaggacgactacgtgcagctgactgctgcagagcgcagccgtatccagatgatctacatcccggcctcccgtgacggtgtgcgccaggtgacggcctttctccgcagccggctatggcgagccgcgcagtggtcaaccggcctgcgtgacctcgtcagcggccacgcggctgaagtcgcccagaacttcaccgaggagcccgtggtccaagcggtcgagggcgccctgacggcccgatggcaggaactgcacgacgcagggatgcactcggatcccaaactgcggctcctcgacggcgacttcaaccaactggtccgcgattccgaactcgtcttcgagcccgatcacaacggtcggcccaggccggcccgcatgctgagcgacgggcagcggtcgctgctgcacctcgccttggcggcggctgctatagacgtcgaggccgcggtttgcgccggccagcacagcgatgacttcacgctgcaagccgctcaactgcctcacctgaccctgatcgcggtcgaagaacccgagaacagcctttcgccgttcttcctgtcccggatcgttggccagctgcaagatctgagcagcaaaacggcaacgcagacgatcctctccagccactccgccagtgtcatgccccgcatccgtcccgaagacgtccgatacttccgcgcggagccggccaccgcgaccgcatcagtccgcgaaatcaccctccccggcgacaccaccgaggcgggcaagtacctacgggaggcggtgcgtgcccacccggagctgtatttcgccaagttcgtggtgctcggggaaggcgacaccgagcagctcgtcatcccccggatcgcccaggcccacggggtgcagctagacccctcgttcgtagcgatggtgccgctcgacggcaggcacaccaaccacatgtggaagctgctccacgacctggacattcctcacgccaccctgctggacctcgattacggcaaagtcggcgcgggcccggcccgactccgtgatgcgtgcaaccgcctcgtggacaatgggctcgacccactagaagatctcgacggctatgacgacgtcgacgacatccacgacggcctcctcctcaagcacatcaggccgatcctggaacacctgcgcacgttcgccgtcttctactccgagccgctcgacctcgattacgccatgttgtgcgcgttcgagaacgcctacagacacctcgaaggcaaacagcgcgggcctgactccactgaccccaccaccacggtcctgggagagaaggggaccaggccgcgctactggaacggcacacgggccgagtggctgggctggtatcgatacctgttcctgacgcggtcgaagccgagcacccatttgcgcgcgctcggccgcctcagtgacgaggaactccgactgaacgcgccggaggtcctcgtggccctcgtggaacacatccgcaaggaggtcgcgctgtga

SEQ ID NO: 79903 - DNA, 1932 bp, Streptomyces longwoodensis
gtgagcgcctccgaccgcctcgcctcgaccaccgttccgacgctgcgcccaacggccctggtcccggtggaggattggcgcccggcgggtatcgatgatctggagccagccgcgtgggaggctctgcgggacacgggcaatgtggcagtcgtggccgggcccggcgcgggcaagacggagttcctcgctcagcgcgccgcctatctcctccagaccgggctgtgcccgtggccgcagcacattctggcgatctccttcaagcgggacgctgccgccaacctcgggcgtcgggttgccgcccgggttccggaacactccagccgcttcgcgtcgatgaccttcgacgcattcaccaagggactggtggatcgtttcgcgccggcccttccgccggactggcggatgagtcacgggtacgacatccgcacggcacccgaccgggaggtgagtgccttcctcaataccatcgccttctcggcgccccggacgctgtccgggaaggtcgggttccagcccgggcgtttcgtctccgacatcgtcgggggatggaatctgcccgtgagcgtaccgacggacgacgaggtcgacgccgtctcctacgccggacgcgagtggtggcgtgcgcgctacctgcggccgggaaaggcggaagtcgacttcgtcatgctcaaccggctcgccgagttgctggtccgtgcggtgccgaaaatccgacgcgccctgcggatgacctaccccattgtgttcgtcgacgaattccaggacacgaccagcgcgcagttctccttcctcacgtcagtgttcggcgaggagaccgcggtgaccacggtcggagacagcaaacagcggatcatgggctgggccggcgctgtgcccgaggccgtccagcgcttcaccagcacgtttgacgccaccacctaccggctggcgtggaacttccgttccagcgacgccctggtcgaactgcaacacgtgatcgccagcaaactcgatccgaccacggtgcgggctacctcaaaggcgactgccgaggacgggcacgagccggccgtgctgtggacgttctccggcggagacagggaggcgaggttcatcgccgactggatcgcccgggacatcgccggctcggaccgcaagccggcagacttcgcgctcatcgcacgacagaaaatcaaagacttcgagccgctgtttcgggcacgcctcgccgcgcacggcattcgagttcgcaatgacgacgcgagggtgggcaagatgaccctccaagatctgttgaagagcgagaccgctcgcctgttcgtggggctgttccgactggcgcaccagccccgtggcctcgtcgcagtgtggcaggaggtatcggcgactctggagcgtgtgtacggcgcaaccgatgacgaggcagcccagcagcgtgtcggcgaggacttgagcgacttgaccacccgactccgtgcctggcttcactcccaccctccgtcgaccacgtcagcggccgacgccgtccgaaggatgctcgatctcgcggacagcgcagccctgcgccgctacgtgaaggccacggcacccggtgaggagttcgatctcgtcaccggcgcattcgaggcacgccttgagacagtgcttggcggggcggccgactggggtgtggtgctcgacgagttcgagtccgccgatgccgtcgtcttgctcaccacccaccgcagcaagggcctcgaataccacaccgtgttcttcctcggtatccacggcaggcagtggtgggcgctcggaagcgacccccgtgaagggacgtcgaccttcttcgtgggtttgtcaagggctgctcaacggctgatcttcaccacggaccggtccgaacgtgctggccccatctcggccttcttcgcgatgctcgccgaggcgggcgtgcccgagatcgaccaaggatag

SEQ ID NO: 79904 - DNA, 1998 bp, Streptomyces canus
atgggcctgcacatctcgcggatcgagattcggaacttccgcaacttccggcacctggtcatcgatgacttccctgcccacgcggtgatcgtcggtgagaacggggtcggcaagtcgaacctgctggaggcgatccgcctggtcctggacccctcactgcccgacgcacgccgtctgctgcgcgaggaggacatctgggaagaccacccgggcggtctgagcgtcagggccgaggtgaccatcgtggtggagctgcaggggtacgacaccgacgacgacgccaagggcatcctctcggcggccaccgtcgactacgccccctacaccgcgcgactgacctaccggttcgccccgcgtaccgagatcgccaccgctgccggtcccgcggtccaggtcaccggacggccgctgaccgcccaggactacgacttcgtcgtcttcgccggggcgagcgagaccaacgacgtgcgcaggatccgacgcgaagtggccctgcgcgtcctgccggcgctccgggacgccgaagccgacctgcacaactggcgccgcagcccgctgcgggacctgctcgagcggcttcctctggacccagccaaccttcaggccaccgcttccgcgatcgccactgcggtcgaccagctgaccaaggacgccaacgtcgccaggctcgagcagcacctgaccgaccggctgcaggccatgctcggcccgcgcctggccgttgagcccaccctcggcttcgcctcctcccagcccgacgaactcatccgcgccgtccgcctcttcctggacgccgcccgccgcagaggcatttccgacaccagcctcggcagcgccaatgtcatctacctcggcctgctgctggaagccctcagtcaacagcgccgggacgatcagttcgtcgccaccctgatcgccgtcgaggaacccgaagcacacctccacgtcagcctccagcgccacctgttcggctatctgctgcgcagcggaccggccctcatcctcaccacacacagcccccacatcgccgcggtcgcccccatccgctccttcatcgtcctgcgcgccacggagaccggcaccgtcggggccagcaccgccgccctccccgtcaccagcgaagaagccgcggacctcgagcgctacatcgacatcagccgcgccgaggttctgttcgcctccgccgtcatcctggtcgaaggactggccgagctgtacgtcctgccggccctggccgccgctgcgggattcgacctcgacgcctatggcacggtcgtcgccagcgtccacggaaccgacttcaagccctaccgggccctgctgggatcccacggcctgaacaccccccacgtgatcatcacggacggcgacgccgcccctgacaagcgaggccggcgcgaggccggcctcatcaggggcgcgggcctccaccccgaccccacccagaccgcagcgctcctcactcaggttctgcaactgcccgagcacggtacggccgcctacaccgccagccgcggtcccctcgccgacgccctgcagagcatcggcgtgtacgtcggcgcccagaccctggaaaccgatctgtgcgccctcttcggcgacgagatcgtgcaggcattcacggaactcagcagcaacaccaacgcgagcgacgacgtgcgccgtggcgtcgccaacgagcagaacccgaccgtggatgccgacgtccgcaaggacatgctggaccgcatctccgacgtgggcaaaggccgcttcgcgcagcggcttgccgcgcacatccgcgccgttgacctgcaagcccgcatccgcacggccgcccagatcaccaccccggacacactcctggacaccccgaccctgcacagcctgggcaccgcttcctacctcttcctcgccctggacgacatctcctacaaggtccgcggcacctcgctctttatcgacccacaggacaccaacaacaccgagtcgcgggacaccgatgctgcaggtcagtga

SEQ ID NO: 79905 - DNA, 1884 bp, Streptomyces canus
atgctgcaggtcagtgacgcactgctgagcgaactcaaggaactccaccccacacagcgcgccgccgtggtgcaccccggcagcgtcgtcctgcgcgccggcccgggcagcggcaagacccgcactctcgtcgcccgcgccgcctacctgctcgaaacccagatctccgccttccgcggcgtcgcctgcatcacttacaccaacgctgcagccgacgagatccgccgccgcgtcctcaaacgcggcgtccgggccgacgggcggatcacctgctccaccgtccacgccttctgcctcaacgagatcctgcgcgctttcgccccgctcaccaaggaacccgcaccccaagcaggacaggtactgggcgacaaagacgcccagatactcctgcagcactgcttcgaccgcattggcatcgccgagaccctcgcccagttccgcaccggcgagagcaccaggatccgccgcgctctggcctgtggcgaactgctcgacgccttcgatcctcgtgaggtagcggcagcccgcctctacgaagaagaactcaccacccggggacagaccgacttcgagtccatggtgacccgggccctgcgcatcgtgcgcgagcacgaacctgtgcgcgacctcctgcacgcacgctttccccacctcatcgtcgacgaatatcaagacctcgggggagtgctccacgaactggtcgtggcactgcatgacctggctggcatcacggtcttcgccgtcggggacaccgaccagtccgtatacgggttcagcggagccgacgccaagtacctgaccgccctggccgagcgcggcgacttccgcgacctgcctctcgacgtcaactaccgcagcggacaacaaatcatcgtcgccgccgaagcagctctcggcacatcccgcgagcgccgtgcacgcgaaggggcccctcccggaaacgtcaacctccaccccgtcgaagcaggcctcgacgaccacgcacgcctcgcctgcgacctcacccaacaggcagagcaacagcaggtccgaccagaacgcatcgccatcctctacccgcaacgcggccccctcctcgacgccctgctcgacgaactgacccgacgcgaaatcaactttctctacgaacgcgacgacaaactccccaccggaaccctctcccggttcatccaacgctgcgccagccgcgcggtgaccaactaccagatccacaccgccaccgcagacgaacgacccgacatgctccgccgggccgaagcgcccccgctcgcgcagctggagcacgctcttaccgccctgcgcacagaagcccaactacccccgtccgcctcccgcctggccctgttgcgctccctgcagatctgcctcgacccccagccgccctaccccctggacgctcccgcccacgaatggctccagcaattgcgcgatgccctcacgctcgacgcgatcgctcaactgcacccggacaaggacaacaacaccagcctcgacaaactggctgacctgtgccaggccaagagcctcgccctggaggacctggctcagggcgaagaggtcatcgggaaggtcctcctgaccacctaccactcagccaagggccgggagttcgacaccgtgatcctgcccgggctgctcaacggcatcattccgcgcaacgttccagaacggggcaggtggcgtccggccaccgcaaaggaactcgccgagcaacagcgcacgttctatgttgccctgacccgcgccgagagcaccctgcacctgatctacggcccgggctaccacaccaggagcggatactggcgttcggacggaccgtccgacttcctgatcgagatgtaccaacgcctgccgtcaacgggctcgtcggagcaacagacctga

SEQ ID NO: 79906 - DNA, 1995 bp, Streptomyces bungoensis
atgttcatcgagaagctcgtgctggagaacttcaagtgctttgggccggggcgcacttccctccgcctggaccggggcatgactgccttcataggcgccaatggttcgggcaaaaccgcggcctgcgaggcgctactgcggttgttcgggatatccgggcaggagcggtccgtacgtgtagacgactttcacgtgcccgtcaacgagaccgacctgcccgccagccgcgagctcacgatcgaagcagtgctcgccttccccgaactcgacggcaccggggagaacgacgaagtcggagaagacgacgatggtgatgccgcggtgaatgcggaacgccagcaacaggccagcgcatcccaagcggtaccggagttcttccgtcgcatggccgccacggaggacggcgacctgaaggtccgggtggcgctccgggccgaatgggtcgatgacggcacggtggagggggcgatcaccgagtcacgcgtgatcgtcaacacccttgccgaggagtacgacgaggacgactacgtgcagctgactgctgcggagcgcagtcgtatccagatgatctacatcccggcgtcccgtgacggcgtgcgtcaggtgacggccttcctccgcagccggctgtggcgcgctgcgcagtggtcaactggcctgcgtgacctcgtcagtggccacgcggctgaagtcgccgagaagttcactgaagagcccgtggtccaggcggtcgaaggcgcgctgacggcccggtggcaggagctgcacgacgcgggaatgcacgcggatccgaagctgcgactcctcgacggcgacttcaaccagctggtccgcgattccgaactcgtcttcgagcccgaccacaacagtcggcccaggccagcccgcatgctgagcgacgggcagcggtcgcttctgcacctcgccctagtggcggcagctatcgacgtcgagtccgcagtctgtgccggccagcacatcgatgacttcacactgcaagccgctcacctgccgcacctgaccctgatcgcggtcgaggaacccgagaacagcctttcgccgttctacctgtcccggatcgtcagtcagttgcaagacctgagcggcaccacggcgacacagacgatcctctccagccactccgccagcgtcatgccccgcatccggcccgaagacgtccgatacttccgcacggagccagccaccgcgaccacatcggtccgcgagattaccctccccggcgacaccaccgaggcgggaaagtacgtacgcgaagcagtgcgcgcccacccggagctgtacttcgccaagttcgtggtgctcggcgaaggcgacaccgagcaactcgtcatcccccggatcgcccaggctcacggtgtccaactggacccatcgttcatcgcgatggtgccgctcgatggccgacacaccaaccacatgtggaggctgctcaatgacctggacatcccccatgccaccctgctggacctcgactatggcaaagtcggcgcgggcccggcccggctacgtgatgcctgcaaccgcctcatggacaacgggttcgacccactggaaggtctcaccgactacgacgaggtcgacgacatccacgacggcctccatctcaagcacatcaagccgatcctgaaacacctgcgcgcattcgccgtcttctactccgagccgctcgacctcgactacgccatgttgtgcgcgttcgaaaacgcctacagacaccttgaagccaaccagcgcgggccggattccagtgatccgaccaccacggtcctgggagagaaggggaccagaccgctctactggaatgagacacgggccgagtggttgcggtggtaccgctacctgttcctgtcgcgttcgaaaccgagcacccatttgagcgcactcggccgcctgagtgacgaggagctccggctgaacgcgccggaggtgctcgtggccatcgtggagcacatccggaagaaggtgtcattgtga

SEQ ID NO: 79907 - DNA, 1932 bp, Streptomyces bungoensis
gtgagcgcttccgaccgcctcgtcccgacgagaaggccgacgctgcgcccaacaaccctgatcccggtcgaggattggcgcccggccggtatcgaggatctggagccggccgcgtggcaggccctgcgggacaccgggaatgtggcggtcgtggccgggccgggcgcgggcaagacggagttcctcgctcagcgcgccgcctatctcctgcagaccggactgtgcccgtggccgcagcacattctggcgatctccttcaagcgggacgctgccgccaacctcgggcgccgcgtcgccgcccgcgtcccggaacacgccagccgcttcgcgtcgatgaccttcgacgcattcaccaagggactggtggatcggttcgcgccggcccttccgccggactggcggatgagccacgggtacgacatccgcatggcgcccgactccgaggtgagggccttcctcaacaccgtcgccttctcggcgccacaggcgctagccaggcaggtcgggttccaaccgggacgcttcgtctccgacatcgtcgggggatggagcctgcccgagagtgtgccgacggacgatgccgtcgacgccgtctcctacgccgcacgcgagtggtggcgcgcccgctacctgcggccggggaaggcggaagtcgacttcgtcatgctcaaccggctcgccgagctgctggtccgtgcggtgccgaggctccgccgcgccctacggatgacctatcccatagtgttcgtcgacgaattccaggacacgaccagcgcgcagttctccttcctcgcatcagtgttcggcgaggaggccgcggtgaccacggtcggagacagcaaacaacggatcatgggctgggccggcgctgtgcccgaggccgtccagcgcttcaccagcacgttccaagccaccgcctactggctggcgtggaacttccgctccagcgacgccctggtcgaactccagcacgtgatcgccagcaaactcgatccgaccacagtgcgggccacctcgaaggcgactgccgaggacgggcacgagccggccgtgctgtggacgttctccggcggagatagggaggcgaggttcatcgccgactggatcgcccgcgacatcgccggctcggaccgtatgccggcggacttcgcgctcatcgcacggcagaaagtcaaagacttcgagccgctgtttcgtgctcgcctcgccgcgcacggcatccgagtccgcaacgatgacgcgcgggtcggcaagataaccctccaagacctgctgaagagcgatacgactcgcctgttcgtggggctgctccggctggcgcaccagcctcgtggcctcgccgcactgtggcaggaggtatcggcgactctggagcgtgtacacggcgcagccgatgacgagacggcccagcagcgtgtcggcgaggacttgagcgacctgaccacccggctccgtgcctggcttcaggcccaccctccgtcgaccacgtccgctgccgacgccgtccgaaaggtgctcgatctcgtggacagcgcggctctgcgccgctacatgaaggccacggcacccggtgaggagttcgatctcgtcaccggcgcattcgaggcgcgccttgagacggtgcttgacggggcagacgactggggtgtggtgctcgacgagttcgagtccgccgatgccgtcgtcttgctcaccacccaccgcagcaagggcctcgaataccacaccgtgttcttccttggtattcacggcaggcagtggtgggcgctcggaagcgacccgcgtgaagggacatcgaccttcttcgtgggtctgtccagggcagctcaacggctggtcttcaccacggaccggtccgagcgcaccggccccatcgcggccttcttcgcgatgctcaccgaggcgggagtgcccgaagtcgatcaaggatag

SEQ ID NO: 79908 - DNA, 1884 bp, Streptomyces sp. DSM 15324
gtgtacgtggccgaggtgctggtggagcggttccggtcgtgtgagcgggtacagattccgctgcggccggaagtgacggtgttggtcggggagaacaacgcgggcaagtcgtccgtgatcgacgcgctccggctgctcacggaccccctggacgggcggcgcgtgcggtatttcgaggagtccgatgtcctcaccaccgcggccgcgcagggcggccccagcctgcagctggacgtggccggcatcggcccgcgggaaagcggcgcgtatttggaggcgctgctgcccctgggggctcctgacagccggaccgcccggtggcaggtgtcctggacaccgccgcaaacgggcgggcggcgtggaagcaccgtctgggcgcagggcgcgggccttccggtcacgggggaccctccggcgcggggtggtgtgcggcatgtctatctgccagcgctgcgcgatgccgagcgggagctggcttcggcgggcggggatcgggtgcggatgatccttcgcgggctgctgggcgatgacgagcaggtcgatgccttcgtggagcggatcggcaccgagctgaagaaggtggctgcggactcggacgtggtcaaggtcagcgagaagatcaacgagccgctgcaggatctgacggtcggcgcgcatccccaggcgagtgaactggccctggccgagccgacattcgcgtcgatcgcccggtcgctgcgcatgctgctgggtgatgtctccgccgcgccgttcccgttgtcggcctcggggctgggttacgccaacaccctgttcatcgccacggtgatggccgagctggacgcggcggcggaggcggatctgaccgtgctgctggtcgaggagcccgaggcgcacctgcatccgcagctgcagaccctgctgctgcgttacctgcagcggcgggcgcgcgcctcgcgccggcagccgtcgggggacccggctgagccggccgggcatctgcaggtggtggtcaccacccactcccccatcctgtcggccgcggcgagcgttcaggacctggtggtcatggcgcgctgcccgggtgagttgtcggacggctggcaggcgcggcctttgcccattccccggctgcagttgagcccggaccgggtgcggcatctggaccgctatctcgatgccacgaagagtgctctgctgttcgcgtcgcgggcgatcctcgtggagggtatttccgagcttctgctgctgccggctctggccgagcgggtcctcgccgcagacgagggcgccgatgcgccggcgaagcgggaggcgttcgaggcggtggaacggttcttcggcaccacccgggtgatcgtggacggggtcgggttcgaggtctatctgcgggtgctgctggcgcccgttgacggcatctgtctgggccggcgggttgccttgatcaccgacacggacgtggcgcccgatcagccggaaccaccccggctgcagtcgctgcggaagctgccgcgcggctggcattctcctggcgagctgcacctggccgcggcgccgaggacgctggagccggccctgtgggcggagaacaacatcaccgccttgcgggcggcgttcctgcgctgcgcgccgcactcgcaggaccgctgggagcaggtcgttgaggcgacggatcccgccctggcgttcggggagctgttcgtcccgaagaccagccggaccgtcaccggaacggacggagaaatcctgaagggcaccgagatctccaagggccggttcgcgcaggaactcgccgacgtgctggccgatcgggtggtgccgttcacggtgcccgagtacctggcgggtgccatccgttttatcaccgcccaggacacgagcacgcctgcagtgggcgcgccatga

SEQ ID NO: 79909 - DNA, 1722 bp, Streptomyces sp. DSM 15324
gtgcgggccgacgccgagaagcagcagcaggccgccatggccgtggccgcgcctgcctacgtggccgcctgcccgggtgcgggcaagacgcatgtgatcaccaaccggcatctgcagtcgccccggcggcggctgcgtaaggggcgggcactgatctcgttcacgcgggtggcgcgggatcagatggcccggcgctgccgctcggcgggccgcgccgatctggtccaggcgccgcacttcatcggcacgctcgactcgttcctgtgggaattcctggtcaagccgcggcgggcggccgagccggcgccccgtctgctggaatcctgggcgagcatcaaggccccggtgcagggcacggaccgggagatcaacctgcaccgcttccccatgacgatagatccctcccacaacgaggcgcgcgaggcggttgcctgggacaagctcgactacgacacccgccagctcctcaaggacagctcctacagccgcgcgcagtgggagaagaagatcttcgagacccgcaagtcgtggtgcgacgaaggctatttgaccgggcacgaggcgcgggtcctggccctgtggaacctgcgccacgccaagaccgccgccgctctgctgcccccgctgctctcccggttcgcggaagtcgtcgtcgatgaggcgcaggactgctccgccgccgacctggcgatccttcagctgctgcacgacgccggcttgccgctggtcctcgtcggtgacccggaccaggccatctacgcctggcgcggcgccgaaccccaggctctccagtccttcgccgctcagctctctcccgccccgcaccgcctgaccggtaactggcgcagctcccccgtcatctgccggctcgcgtccaccctgcgcacggggcagcggccgccggacacctccgtggtgcgcgacgacgacatccccgtcctcgtgctgcccacccggttcgccgactccggcagccggcacctgcacgccccgaccggtgccggcatcgtcgacgccttccgcacgctggccgaggagtacgccgtcccggccaaggactgcctggtgaccgcctacaagtacgccaccttgccgggcatcacccgggagaagcccaacaccaaagccatcaccagcctggcctgggcccgcaccgtcacccacaccccggacgccagcggcgacgacctcgcccgggcctgcgcggtcgccgtgcgcgtcctgttcggctactggtacccgggccagagcggcggccccgaccgcatcatgaccggccaccgtctctcggccggacaggtcaaccgcacggcgttcgccttcctgcacagcctgcctgcgccccaccgggaatgggggccgcaggtctggcaggccatgaaggcctggccccctctgcccggggctgctccgcaaggcggcaggggccgccccgccggaaaacccaccgtgtcgcgcctccaggcggccaccggtatccacaccaacatcgtccaccagctcaagggcgatgaggcagacggcgtcctgctgttgctgcccgatgccagaagcgtccagcgctgggccaccgcagacccggccaccgacgaggtcctgcgcgtctggtacgtcgccgtcacccgcgcccgccgcctggccgccatcgccctgccccaggaggagaccgatgcactggcccaactcctggccgggtaccacgtgccgctccgcgtcgcgtga

SEQ ID NO: 79910 - DNA, 2310 bp, Pseudomonas putida
atgcagatccagtacctggagatcgcgaacttccgcaagctcctgtctgttcgaatcgacctggcaagcaccactagccttctggtcggcgctaacaacagcggtaagtcatccgctatgttagcgctacgcaagttcctgctttcaaaagcgacggtattccgtctccaggatctgacgctttcccacctcgcagttattgacgccattggcgccgattgggaggcttcggatgaaacccttgagacacccacggctaatgagtggtcccactggttacccaccctcgatctctgggtggaagcttcgcaaggcgaattgcactacatccgtgaccttatccctaatttcgcctggaaaggcggtcatgtgggaatgcgcttccgactcgagccaaaggacatggccaagctctttaccgactaccggaaggagcgaacccgcgtgaagatgctgcagcaggagatagcgaagcagaccgaggaaggaaagactccgcctaccctgcccctttggccgcaaagtcttcacgattacctcaacaggcgcctgggagcaatgttcacagtttgttggtatcgcctagacccatcgaagctcgatgcgccagataccaaaacgcgccatgccaatctgcaaccactgtccgcgactgcggtgccgctggaggccaacccgctgactgacctgatacgcgtgcacgaaatcaacgcccagcggggctttggagatagcgcggaagaatctgtcactgaaggcagaggtggctctgggaaacgactgacagaacaattacgcgcttactacaaccgccaccttgatccgggcgacagccctgatttatccgacctcgaggcgctgacagctattcaggctgcgcagtctgcgttcgattcccggctcacctcaagctttgctcctgctctcattgagctcgcgggcctggggtacccgaatcactctgaccccgccattagggtggagacgcggctgtcgcctactgacgggatgaaccatgaggcagcggtgttgttcgagttggactcagtcgccggcgcgccaggcgcacctctcatgcgcttgcccgaaacctcaaacggactgggttaccagaacctgatctcgatgattttccagttgatggcgtttcgggacgactggctgaaaaagtacaaaaataccgaggagcaaactgacgtaggggttgagccaatccacctggtgctgattgaagagcctgaagctcaccttcacgtccaggtgcagcaggcatttatcaagcatgcgtatcatgtcctgtgtaacgacccgctactgacgaggtatccaaggctgaaaacccagatggtcgtcagctctcactcgagtcacgttgcccatgagacggagtatgcgaatttacgctacttccgtcggctgccagcggggatggccggtgtgccggtgccggtatcgactgtctccaatctgagcacggtgttcggtcagcggaacccgcataggcagacgaaggagtttgtaacccgatacctcagggctcaacatgctgacctcttcttcgccgacgccgtcatcctggttgaaggtgctgcggagagaatgatgctgccgcatttcctgcgcaaccacttccctttccttgatcgttgctacattaccatcctggatatcggaggcagtcatgcgcatcgcctgcggcctttggtcgatgcgctgggtattgtgacattggtgatcacagatcttgacgccggcctcaagaaatcagcagtaccggttaaacgcaaagcaaaacaggaaaccaacaaccctaccctgcgcaactgggccaaggcccagaagattgggcacgacgtcgacacgttgttggatctggatgatgagacaaagtcccaacagatagacgacctgttcgggatccggatcgcgtaccagactccaattgccgttcgattgcccagcaacgaaaccgaagctgaggcgctgcccaatacctttgaggacagcctggtactgagcaatgttcagcacttcgcaaaaaagaagggtcaagggttgaccaaagctttcgcggcagccctgcgacagtcgcagaccgcagatgacctcggcaaagccttgttcgacgcgctcagggatggcgacaaagcgaagttcgccttgcaggtgttaggtgacccggatttcgcgaaactgacggttccagaatacattcgtgaagggctcttctggttggaaaccaagctcaagaagaaaagtaaagagctgttgattgtcccaacagccagcatcgaggtgacagagggatga

SEQ ID NO: 79911 - DNA, 1872 bp, Pseudomonas putida
atgagcatcacgaccgagatacctgatgatccgaagccgactgctgacgatgttattcaggagtgcttaaacctcgagtacccccgtagtttctttctgtacgcgggtgctggctctggaaaaacccattcgcttgtggttgccgtgaggtcgctgaaggaacgagagcgggaacgcctgacctttgaggggcggcagatcgcgatcattacctacaccaatgcggcttgtgaggaaattgctcgtcgactcgagcacgaccccttggttgaagtttctacaatccatgcgttctcttggcgaatgatcaaaggattcaacgacgacatacgtgattggttgcgcatcaagctcgccgcagacatcgaagcgttggatgacaggatcagccgtgcgaggggtgttaacaaaacctctttggcgaaccaggccagtcgcgacagtaaggccgggcgcctggccagcctggatgacataccggtcttcacctatagcccaaccggtgacaaccggagtaggcagtcattgaatcatagcgaggtcattcagatggccgcggcgttcatccctaagccgccgttacttgacgtcatggcggatcggcacccggtgctgcttatcgatgaaagccaagacacgaatggcgatctcatggatgcttttctggaagcgcaagcagcaattcctaagcgtttctgcctgggattgctgggcgacacgatgcaacggatctacaacgacgggaaggttgggctggatgaagcgattccgtcagactgggccaagcctgaaaagcgtgtgaaccgtcgttgcccgacgcgaatcgttgaactgatcaacgtgatccgcgccagcgtagatgatcatgagcagatacccaagccgggcgccactcaaggtaccgtgcggatgttctgcactcagcaggttgcaggcctggactttaatctggaagagcagatcgcaaagcagatggctgacgtcactggggactcacaatgggcatcaggtgcaaaaggccggaagaccctcatcttggagcacaagatggccgggcgccgtatggggtttgagggcgttttctcgccgctgtatgaagtcgagcacctgagtacggggcttctggacggaacgctccccatacttaaactgttcttcgagcgtgtgggcccgattcttgaagcagcgaaagcagatgaattcgcgttgatggaggccgtgcgactacgatctcctctgctcgatcctcagcacctacagtcggtacccaatcagcttgacttgcttgagtctgtcggcgaagcgactcaaaggctatgtgaattgttaaggaacaacgacccgctgattgaggaggtcgctcatgtccttcagcggactggcctacttgagctgccggaacggtttatggaggctttgactcagggagcaacggcagatgacgcacccgatactgcagatcgggatgcgcttgaggtgcatgcgtatcgggtcgtccttggacgcccttattcggagatggccgcattcgcggattatgcaaatgggctttcgccgtttgacacccatcagggtgtaaagggtttggagttcccgcgagttatggtggtgttgaacgacgaggaagccggcggttttctgttcagctatgaaaagctgttaggcgtggtgcctgcatcttctaccgacgtgaaaaaccagctggccggcaaggacaacgccctatctcgaacgcggcgacttctgtacgtcacgtgcagccgcgctgaggaaagtctggccatcgtggtctataccgctcagccagaggttgccaaggcaagtgtcatcagtgctggctggttgaaagctgatgagattgtggtgctttga

SEQ ID NO: 79912 - DNA, 2190 bp, Staphylococcus aureus subsp. aureus; identical to SEQ ID NO: 71904

SEQ ID NO: 79913 - DNA, 1794 bp, Staphylococcus aureus subsp. aureus; identical to SEQ ID NO: 71697

SEQ ID NO: 79914 - DNA, 2190 bp, Staphylococcus aureus subsp. aureus; identical to SEQ ID NO: 71904

SEQ ID NO: 79915 - DNA, 1794 bp, Staphylococcus aureus subsp. aureus; identical to SEQ ID NO: 71697

SEQ ID NO: 79916 - DNA, 2190 bp, Staphylococcus aureus subsp. aureus; identical to SEQ ID NO: 71904

SEQ ID NO: 79917 - DNA, 1794 bp, Staphylococcus aureus subsp. aureus; identical to SEQ ID NO: 71697

SEQ ID NO: 79918 - DNA, 2190 bp, Staphylococcus aureus subsp. aureus; identical to SEQ ID NO: 71904

SEQ ID NO: 79919 - DNA, 1794 bp, Staphylococcus aureus subsp. aureus; identical to SEQ ID NO: 71697

SEQ ID NO: 79920 - DNA, 2190 bp, Staphylococcus aureus subsp. aureus; identical to SEQ ID NO: 71904

SEQ ID NO: 79921 - DNA, 1794 bp, Staphylococcus aureus subsp. aureus; identical to SEQ ID NO: 71697

SEQ ID NO: 79922 - DNA, 1821 bp, Desulfitibacter sp. BRH_c19
atgaaaattcgtcgtctcagaatgaagaactttcggagtgttgcgaacggagagattctctttaccggtcatactgcgataatcggtggaaatagcgtcggaaaatcgacaatgtgtgaagcattggatttatgtcttggcccagatcgtttatcacgttccaatcctatcaacgaacacgatttttatcgacgacgatacattggtgccgataatacgccaattacaattgaactagaggtggttctgacagacttaacggctgatcttgaaacaaaattcagagcgcatcgtgagtattggaacactgaaaccaattccttgctggatgagaatgcagtgcctgaggatattgaacctgataccgttatccctgcccttaggataaagtttgaaggtttttatgacgaagaggaggacgaatttagggcggaatcattttttgcaagtccgccacctgaagatgatgcaagcaaagcgaaagtaagtcgttctgtaaaacgcagctttggttttatctatttgcgtgctttgcgcacaggatcacgtgcactcagtctcgaacgtggctccctactagatataattctccgtctcaaagatgatgatcgctccgctatgtgggaacagactttaaatgctcttgaaggccttgatccaccgatcgacagtattcctcagctccaagacgtgcttgatgagattgatggtagggttcgccgttttgttaacatgtcagaggatgatcgagcatttcagctatacccatcatcgctaacccgtgatgatttacgtaaatccattactctattcgggacgtccgcccggtcaaacgcacgtgttccgtactggcgtttagggtcaggtgtgattaatgcgatggttttctcactactcacttttattgctgaactaaaagtaaatgtgatcttcgcgatggaagaaccggagatagcaatacctccgcatacacaaaggcgaattgtccaatttctgaaaaagaatatggatcagtcaattctgacgacacattcaccctttgttctcgaacagtttagtcctgagaacgttgtattgctggaacgtgacacaaacggttcacttgaaggccgccagattgaagttagcggcatcaaaggtaaaacctatcaaggtaatctacggcgtattcttgcagaatcaatgctaggtaacggcgttatttgtgttgagggagtgtctgacgcagaagtgttatatgcggcttcaaatgtgttggagagttacgatgatgaattatcgtacacgcctttggatttatcgggtgtgactgtagtccattgtgaaggagatggaggcattcttcgttatggacagtttttcaaagaactcggattgaaaacttatgctttctatgattttcaaaaaaatgcggaaatcaaaaacgaaattgaagccctttttgatggtgcatgggagcttgagcatacggggatagagtatctcttggccgaagaaatagatattgatgcagttcgcgcttttttagaggaagccattaattgggatgattacccgaccaatagaaaaaggccggaactctacgagtacgacgaaaatctcgacgacgatgatatacgagccatcaccaaacgggttttaaagcagagaaaaggttcaggatacgccgaaaaattggtggagatgtgtagagacgaagatttgccggagattatcagcaccgcacttaattccattagcgaagacctaccaaatgccatgatgggtgacgatgcaaacgaaggcgatgaagccaccgaagacgtgggtgatgatgtatga

SEQ ID NO: 79923 - DNA, 1755 bp, Desulfitibacter sp. BRH_c19
atgagggaatgcaatccagaagatagtttcgacatttgcgaaaagcgacgtgccatcctggaaggcgatgggcatatgttggttattggcggtcctggatctggaaaaacaactatagcattacttaaagcaagacgttacgtattagaaaacttgacagcggagcagagcattctatttctcagtttctcgaatgcagcaatccgtaggattatagagagtgcaggcggcatattgacatcagatactgccaagcgagttgatattaaaacctatcattcctttgcatgggagatcttgaaatctcacggatatctgacatcaaaaaagagacgactaagtattgtttcagcacaagatgcagctgtaagaaaagcgggcttaaataaagacttatggcttactgagcaggagcggatgtatattgaagatggattagcgacctatgaccagtttgcccctcgtgctgctgaaatcttaaatcgttcagacactgcgaaatcctgttttaacgcagcctatccattaatccttgtggacgagttccaggatacagatgaagcccaatggacccttatccgatcattgagtacaggatcaagcgtcattgcacttggtgacagtgaacagcgaatatatgaatggcgtgacggtgtttcggagaatcgtttgtctgagtttcgtgatgagttgaatgccccagtatttgactttcagaatgaaaacaatcgcagtcccgcgactggtattgctgggtatgcccgctctctcttgtcgcccgatgttgtgcaaaaacttccagatgatatcgaaagaagagcgtttcaacccggtatgttctctattggagttagactatgcgttattagaacgtggaatgaaacaaaaaagagagccaaaaaaacagagaaaaatgatatcaaaattgccgttgcggcacgtagcaaacagatggtgagaaaaatatctgatgtgcttgcaaaccctatcataattaaagatagagaacacaaaccaatccatcatgatgtcttggttgatcagatgcaaatcgttttatcagcacgtgttatcgcgaatgttatgggaagttctcatctcccattcgaccaacgtatatcgcaatgtctttgtagagtagcggatatgttacgtgctgctaacaacgctacaaatattaaaaaatctgatacgttacaaaactgggcgcaaaaatgtgatgatggtaaacgtcctaagaacaactgtgttaaggcgctcatcggagttattgaagcacttgagaatgatggatttttaggctctccgaccaaagactggctaatggtccgaaaggcatttgaaagggcgggcgttgaacacttgacgaagacggctgagttcgcgcggtatctgcgactgcttcggcgcggctcgttgatagaagaagagctgacaagtttatggcggaccagtggtaattatgtaggagctgaggaagctttggatcgcgcgattcagcaagatcagctacttgattccagtaaagagtcagcgagcatttctgttatgaacatgcaccaattgaaaggccgagaatatgacggagtgttgcttgttgaagaccaatatcagaactttaggggacgggaggcgaaacctccttacatggaaacccgccgtctcttacaggtttctttaacgcgggccaagcattacgctttggttctatcagcaacgaaaaatgcgactttggatgtaatctttgataattga

SEQ ID NO: 79924 - DNA, 2205 bp, Clostridia bacterium BRH_c25
atgaggatttcgtctatatatattcagaactttcgaaagttgcggcagtgccgtattgattttagcaaaaagacaactctgtttgttggtgcaaataacagtggaaaaacgtctgctatggatgcattgggtaaatttttggcaggacgaagctttgtttttaacgatcttaccatatccaaccgtaccttaatcaacgcgaatggtgaggaatgggttgacaatgaatgcaaaataccggaggatttattgaaatgggaagcccttttgccaatgatggacgtttggttagaggtagagcgtagcgagattcattacgttgccagcattatccctaccctgaagtggcgtggtggaaaactcggaattcgcttagcttttcagcctaaagatgtttcaaagttatttgcggaatatcgagaggcatattctgcagcacgtactaccgaagtggctggaaacagagcggggacatccactatacatttataccctaaggatttgtgcgatttccttgatagaaagttaaatacttacttctctattaagtcgtatgtgcttgatccaaagcattcagaaatggaaccgccacagtcaactccatatgggatggagtgctttactgataatcctttaaaaggaattattagaatagatttgattgatgcacagcgtggcttttctgacccggattcttccgatgacagtgaaaggtcacgaaaacagttgtccacccagatgcgtagctattacgacaaacacttagatccagagaagctccctacccctaaggatttggaaatactagaagttaccgagcaagcgaaaggtgtctttgataaaagtttagccgagaaatttgcccccgcaattcaggagttggaaggcttaggttatcccggagtaactgatcctaaaattacaattacaactaaagttagtactagtgaaacattgaagcatgattctgctgtacagtatgctctcagcaaaaataacaagacactgaaactgccggaaaaatataatggtttgggataccaaaaccttatttcaatggtttttaatcttatgagtttccgagacagctggatgaaggtaggaaaagcccggcaagaacaagatgcttcggtcgatataattgaaccattgcatctggttctagtagaagagccggaagcgcatctacatattcaggtgcaacaggtctttattcggaaagcctactccgtgttacgtaataataagtttcttaaggacgatgagaattttgccacacagcttgtgattagtacacattctagccatattgcacgtgaaactgatttttctgatttgcgttattttaagcgccttcctgaatgtgttgattgtgatattgcgacagcaaaagtaattaatctatctgatgtattcggtaaggaggatgaaaccagtaaatttgtaacgaggtatctccaaacaactcattgcgacatgttcttcgctgatgccaccatattagttgaaggctcggctgaaagcatgttagtgcctcattttattcggaatcagtatcctgagttacatcagcggtatatctctatacttagcatcaacggtcgacattcgcatcgtttgagtcccttgattaataaactatgtttgccgacgcttattatttcggatttggactctgtggaacaagacggtcatcataaggcggcttgccctgagcgaaacaaagggctactcagtggaaattacgctataactgattggttgattaaagaaaagaatttggacaagcttcttgatctaccagcagaacaaaaagtattttcatatgaaacggctcataaatattctatacgtattgcctaccagaccccagtaacaattgctttcgatgggacaccgagagaagcattatcaagtacatttgaagactgcttggtttatacaaattatgaactatttaaaacccttgatgaaagcgatgtagggagccttgttaagaaagtaaatagtgaaatcaatgctgcaagattatttgaacaactccataagggaatatatagtgcgcttcgagatggaaaatccgatcaaaaggctgaatttgctttggatttaatttatgccgttgatccaagccgacttgcaatccctacatatatcgcagagggactagaatggctacaaaccctgctgcatccagaggagtga

SEQ ID NO: 79925 - DNA, 1863 bp, Clostridia bacterium BRH_c25
atgatgaaagatttaagtacctcgttgcaattgtctgacaatcacgtagatgaccatgtcgacgaggaaataaaactgtgtttctcggaagataatcccaagagcttttttatgtttgctggagcaggcgctggcaaaactcgcagtttaatcaatgctctttcttttttagacaaagatatgggagtaaagctttccgcacacgctaaacaagttgcagttataacttatacaaatgccgcttgtgacgaaatatctaaaagacttcattacaagcctatttttgcggtgtcaaccattcatagttttctatgggaattgattaaaaattttcagagcgatataaaagtttgggttattgagtccattaaaaacgatattgccgagctgaatgaaaaacaagcaaaaggacggagcggtgacgctgccgctaaaagagcagaagaaattaataagaaaactactcgactttctaaaattgaaagcgtaaagaagttttcctacaaccccaatggagataacgtgggctatgactccctaaaccatagcgaagttgttaaaatggggtctgagtttatagctactgaagaaacaatgcaggaaatcttagttaataaatatccgattctactcattgatgagagccaggatacaaaaaaagaacttgttgatgccttgcttgttgtttatgaaaaatacaagaccagattcattattggcatgtttggcgatacaatgcagagaatatatatggatggtaaagataatctggcaagttgcatccctgatgaatgggaaaaaccagaaaaggtaatgaatcaccgcagcgctatgcggatagtgaaattagctaatacaatacgaaacactattgacaaacagcagcagcggccacgctctgatgccgaaacgggaacggtgcgtctatttatagccaacacttcgtctgataaggaagagatagaacaccgagcagcgcaaattatggctaagaagtctaacgatgataactggcttgatgcatccaagtataaaagcctaatactggagcatcacatggctgccagtagatttgggttttccaacttgtatttaccgctaaatgaatcaaagtcctttgatacatctttgcgcgatggatcgatatccgagctatcatttttgtttaatatggtctctccgctggtaaatgcaaacaaaaatgacaatgatttcgaggtttcgaaaattgtgcgtcagtactctcctcttctagacaaaaaagcatttcggaaatgtcctgaagaccaagctaagttgcttcaagtggctgaaaatgcggttgaggacttgctaactctatggaaagatggagctatccctacctgcgtcgatgtattaaagaccattaaaaagaatagcctttttaatctcaatgatcgtgtagataatattctattcgatgaagataaagacgaagataaaaaagtcacagcattacgaaaagcactatctgtgccttttgatgcactcgaacgatattctgcctatgtaacaggcaatactcaatttgctacgcatcaaggagttaagggactagagtttcccagagtcatggttattatggatgatgttgaagcaaaaggatttttgtttagctatgaaaaactttttggtgcgaagtccaaaactgatgcagacataaaaaacgaacgtgaaggcaaggatacaggaattatgcgaacggcaagactcttctatgttgcgtgtacaagagctgaaaaaagcttagcagttgtagcttatacagaggatacagaagccgttaaaaacactgcaattttaaatggctggtttacaaaagccgaaattgatgttttataa

SEQ ID NO: 79926 - DNA, 2022 bp, bacterium BRH_c32
atgtacttaaagacaattcagattaataactttcgtctgttgaaagaagttaaattaagcttgcaaaaagatacaaccgtaattgttggaagaaacaattcaggaaaaacagcattaacagaaatatttaaaagatttttttcaggcaaagcatccccatttcatttggaagattttaatctctcatcagtagacaagtttgtagaagcatacaaagctaaattagataaaaaagatgaagatgttttgcgaggtttaattccttcgattgatttgatattaacaatagattatggtgctgataaactaagttatggacaattaggtgaatttataattgatttagaagaagatttgtctgaagcaattattaaagttagttaccaattaaaggatgggaaaattgatgctttatttgaagatgtagctgattcaatcaaaggtgatttatttgaaaagcttaaagaaagaattcctcatctatttgagattgttgtatcagcaattgatcctaccgattctaataattattcaaaaaaggatttaactaagctaactaattgtgtgggagttgatttcattaatgctcaacgcgggcttgatgatgcgactcaaaccgagcgagatgtattagggaaagttcttggaagtatattcaaaaatgcatctagcgaatcagctcctgaggacatgaagaataaaactaaggaactggaaaaagttgtcggtgaaatacaaactaaaatagatacggatttcaaagatagattgaatgctttattgccagcattaaatctttttggctatcctggcctatccgatccaaacctaagtactgaaaccaagcttgatataaaaaatattttagagtcgaatacaataataaaatatcaacaagcaaatggtatatccttaccggagacatataacggattgggatcaagaaatttaatttatatcttatttaggttatatgacttctttaagaaataccaatcaaacccgataaattatcagaaccatattatttttattgaagaaccggaagcacatctacaccctcaaatgcaagaagtatttattcgaaagctatatgaaatagctaataagttttctaaagaattgaatgaagaaaaacgatggccagttcaatttgtggtcagtactcatagtacacatatagcaaatgaatcttcttttgaatcaataagatattttttcactaaaccagaacataaatgtcaggcttttataaaggacttaaatgaagaatttgttaaagacgacaggaaagaagaccgagaattcatccaaaagtatttaacattgactaaatgtgatctatattttgccgataaagctatgttaatcgagggcccgactgaaagaataattatgccagcattaattagaaaatatgatgctttatcaaatagtaatgttttgtcaagtcaatatatatcagtagttgaaattggcggggcctatgcgcatcatttttttaagttcttggattttcttgaattaaagactttaataataacagacttggattctgtagataaaaacgattctaataaatcgtgtatggttagtaagggaacacataccagtaatgccggaattaaaaattggtttagagagaaagatgatttaattgacttagatacaattaataaaaagaaaaatgaagataagattaatggttttagacgaatagcttatcagattccagaagagggaaaaataataatcggtcgtagttttgaagatgcttttatccttgcgaacccaaaattgtttgatgttgataatgcagatgaaacaatacttgaagctgccgtatacaacaaggcagcagaatataaaagtaaaaagactgattttgctattcaatatgcctttactgacgccgcatggattattcctaagtatattaaagaaggattaggttggttgtctgaaaatatgaatgaggttattgtaaaaaaaaacgaaatcggggtaaaagaaaatgagtaa

SEQ ID NO: 79927 - DNA, 1740 bp, bacterium BRH_c32
atgagtaatccggcaatacaagcatcaaaagaagcacttataaaattatataaagtaattgataacaaccaaagctttcggtttgaagctggagctggcgcgggaaaaacctattctttgattaaagccctccattatttaatgcaaataaaatctttatcactttcaaaaaacaatcaacaaatagcgtgtataacttatactaatgttgctgtaaaagaaatcagtagtcgaacagataatcatccaataatatttgccggtactattcattcattttgttggagtataataaaagatttacagaaacaaatgcgcattattattccaacgcttagtgataattggaaaaatcgagttgaagaatctggtggaattaaggaacaggttgtaaaatatgatcttggatatccaagttgttctgaaaaagaaattagtctatatcatgatgatgtaattagaatattttcaacattattagcgaatgctaaattcaaggcgcttttatatagtaaatatcctatgatattcatagacgagtatcaggatactaataagttgttagccgaatcaattgttaccaaattaattgtaaatgatagtcgctttatggttggattttttggtgatcattggcaaaaaatttatggtactggtacttttgctttttttgatacagccaaagataaaattactgaaattagtaaaaatgctaattttagatctgacaataacattgtacaatcattaaataagattagaacagaattacctcaaaatccacaagaccctgattcgttaggtgaaataaatatttttattacgaattcatggagaggtaatcgaagaacaggcggacattggcagggagatttaccagctgatattgctcataattatttaatagatgtaagagcaagacttgagaagtcaggttgggattttgatccattaaaaaccaaaatattaatgttgaccaataacgtattagccgaagaacagggatatagaaatcttgcttcaatctttacgaatacagatgactatttaaagaaaaatgataattacatttcttttcttatagatgttgttgaacctatatgtgaatcattcgagaataaaaaatatggagagatgtttaaatatattactgctggtacggtaagcataaataaacatgatgataagaaagtttggaataatgcaattaaaagacttattgagattcgaaaaagcggaaccataggcgatgttattgattacttaaaaataaccgaaaaacccaaagtatcaataaatcttgaatctatcgagattagatatgggcaattgaaatctgttgcggaaatggaggaggaaaacaaatctttttatgataaaattacccaaataagatcgactccctattctgaacttatagcattgtctaaatatttagatgatgagactccattttcaaccaaacatggtgtaaaaggagcagagtttgaaaatgttttagttgtccttggaagaggttggaacaattataactggaatgattttttagaatggtctaattccggtgttgtaaaaggaagagaagaagcttatgaaagaaacagaaatctgttctatgtttcaataacaaggtcacaaaaacgattggctttattatttactcaatcattatcaacttcagctttgacgatacttaaaacatggtttggagaagataatattaaagatatttctttatga

SEQ ID NO: 79928 - DNA, 2145 bp, Desulfosporosinus sp. BRH_c37
atgtacttgaaatacattcaaatcatcaatttcaaaaacctgaaatctgctcgctttgagtttgcaaagggtgccaatacgataattggcgaaaatgattctggcaagtcgaacgccctaaccgctatgcggatactcttggatgacagctattactacaacacaaaacgactcaaggaaacggatttttcttatgcactcggcgattggaaagggcattggataataatctctgctttttttgatgagatatctgatgaagacaagcataacgaattttgtgctgaattgactcccgacaaagaaaatgccgattttttaaaatcgtatatccgttgcgaggacaaaggttacggaacggtctctttgtttatccgcccttgtaaatccaaaaggctggaattggaagaagcttctcaaagtggcagatttgaaacagttcgttctcaaattaaactcagtgattacgaattttattatacgtcacgctcgcaagctgactttactaatgaaaatttgtataagtctatcgtaggcgatatttcagctggcgaatatgccaaccccgaaaacgatgacagctccgtcctaggcacaaaaattgatattatgaatgtctggcaacatgtttcgacggttttcattgatgccttgcgtgatgttgagaatgaacttcgaaaacccaaaaatccaatccggcaaatcattgacaccatcgaaggcgaaattgctgtaacagatatcgatgacattaaaaaaagaatcactgaactcaacacaaaaatctccaatgtccctcagatttcttatatcgggaatcaagtgaaccgaaaactgcttgaaatgatcggaacggtttattctcctgacatcaggttggaatcccgcctgaaagaggattttgcgacgcttgccagatacctaacgatggctccttccgatcagaacgatatcgacttgctcggattgggtcatcttaatattttgtatattgccttgaagctggttgagtttgaagccaatcgcaaccgggagcttctcaatatcatgatcatcgaagagccggaggcccatatccatacacacattcagaaaacattgtttgataatcttcaagtcgtgcaaacttatacgcaagtcgtgatgtccacgcactcaacgcaactttcagaggttgcggatattgagaaagtgaacatcatgaagaaggttaatgagcagctatcgcttgtaatgaaacccacaaacggattggacaactttggagccgacgtcctgaagcacagaggtatggcgtttacgcagattctatccagatatctggacgcaaaacggagcgttctattattttcaaaaggtgttattctcgttgagggggatggcgaggaaattctgattccagctttggtcaagaaggtgcttggggtttcactcgatgaaatgggaatcgggctcattaacgttggaagcgtcgcgtttgaaaatgtcgcttgcatttttgatgaaacccgcttgcaaaggcgatgcgccatagtgactgatttggatgcaattgttgacggtgcaactaagggcagccaagaggcgatggacattggagtcgcaaggaaagcccggttgacaagcctttttgattcaaacccttatgtcgagtccttctatgctccgcatacgcttgaggtcgattttgccagcatagaaaataataaggagttcatatgttctgtcataagccatacatacaagcaaaaggctgcgagagaaaagcatatcgcggcaatcaaatcgggagcagttgctgcaagatatgacgctgtccttaccgtcgcgcaaaacatccagaagggatggtatgccaccttactcgcttctgaaattagagcaaacgcggttattccaacatatatacttgatgcgattgcttttgccgcaaaggatgttgtatcacaaaaactgttgtggaaaatggtaaaatattcttttggcgaatacgatttgagcagtaagtatgatgacatgaaaaaagaatttgccgaagttgaaacatctgaacagatagccgatttgatttcagatttctgcagtgagtttcctgacgacatggtcaccgcgtttatcgctaaggtaggtgggttaagtgcctga

SEQ ID NO: 79929 - DNA, 1740 bp, Desulfosporosinus sp. BRH_c37
gtgcctgattttctcgatatattgagaggcctttccttcgaacaggaagctgcgtgtaaagcccccgaaaatgtcctgcttactgcttgccccggcagcggcaaaactcgaacactcacccgaaggttggcgtatcaggcggctcaagagccatcatcaaaaaggtggaatatagcgataacgtatacaaaccgagccgctgatgagatcaccagccggcttgatgatatgggcatagctttgacaaacatttggacaggcacaattcatcagttctgtatgcagtttatcattcgcccttacgccatgtattccggcagactgagcaaaggttatacaattatagatgaatatactaagaaggaatatggaagaagctttgctaaagaattgggaataagtctaaattactatgacgatcctttccaatattcgactgttgttaaagaatatgaggctttgcttgctgcgaacaaagaaattgattttgaaatgattcttcgtttttcggaggacctttcaagtcgctgcccttttatttgtgcaaatatagcctctttgataaacagcattttgatcgatgaatttcaagacacaaacgagcttcaatactctatccttgcaaaaatctataaagtaaacaaatcaattagcctcatgtttgtgggcgacgtgaatcaggctatatatggctctcttggcggcgtcgccaagtgcaagacagaactggacgctctttatgaaacgatattcaaggaaatgtcgctcacagggtgttatcgttctaccgagcgagtggtaaatctgtacagtaattttgaggtttcgaaaacgggtgtgtgctcggtagcggagataaaagatgttaccgggacgataaactactgtaaatcggtttctaaggaatacttaacagccgaaattgcagcgattataagctccgagttggcatccggaacgaaatcggaggagatttgtgttcttgccccgcaatggccaatgttgttcaatctgtcgagagacctccattcacggcttccagacgtcttgcttgacgcaccagatatttccccgataaagtatgaccccttgaaccctttgtttctgctggcaaagctgttatttatgccttcaggcgaaaatgtttctgtaagaaaacgaattgcaaccgagtttatttcaatcgttcgggatgacttgaaaatcgtggtgtccgaccgtattcagaactatgacattctttccgctgttaattactgccgagccatggacaatgacggcattgtctgcttgaaggctgtaatcgaacgggtttttggtctgctgagaatcgacgtaaacaaagagaaagccctctctggcttaatcgagtgtttttttgctaaaatcgattcgcgtgtgatgcaatattcactctccacggattacaattcgatcagcaagtatttccgggacaaaagaggcgttgttatctcttcgatccatggcgtcaaaggtgaagaatatactacggttattgctgtatgcttgctcaacggttatttgccacactgggattatattatgaagccagaaaaaagacatcttcgaaaaatagaaacatcaaaactgctctatgtcctctgctcaagagcaaagcaaaatttatacttgttcagcgaaaccgggcgcaagacaaatagaggatcagagtatacgtcaacagatgaactgtctttgatcgcccatgccttatcttaa

SEQ ID NO: 79930 - DNA, 2073 bp, Desulfosporosinus sp. BRH_c37
atgaaaattagaaaactaaagatatgtagatttcgttgtttcggtgatgaagaagagaccatccaatttgatgaattaactagtttaatcggaaataatagttcaggaaaaactgcggcgttacaggctttactaaaattattttctgataactctggagatagaagttttcaaagaagtgatttttatttgccaaaaaacttaaagtctgctgagatgacggagcagaacctttatattgaagctgtgttcaatttccctgagttaaaggctgagggagaagaagggaaatatgttgtacctgtattctttgaacattttgtagtagaagaaccgggtggtgtaccatatttgagaataagggttgaagcctcctgggaaaaaggaaataatgctgaaggttcaattgaaaataaaatctattacatactctgtgcagaagatgaagaaataaaagaagaaaacaaacggagtgcaaatcgtcatgatttagataagatcataatggtatatgttcctgctgtacgagatccatctaagcagttaaggaatgtttcaggaaccatgatgtatcgtattatggaaagcataaattggagtgaggagattaaaacatccgttgatacaaaagttggagaattaaatgaagcttttattcaagaatcaggtgtttcaatattaaaaagtgcaattcatactcaatggaagaactatgatgctgattataggtatacaaatgcagaaatgagatttaacaatactgatatgaactctatattgaagaaatcggaagtagtgttttctccatctgttacaggaaaaaaatatggtatagatgatatgggtgacggcttacgatcacttttttatatctcaatggttgatagcattcttgaagtggaaaatgaaatcagaaaagaaattgcagaaggaaaagaaaagcggtcgtttaacatcactccacctgttctgactattgttgcagttgaggaacctgaaaatcatatctctccacatttagtaggcaaactaatcaataaattcaaagatatttctaaaagagaaaatgcacaaacaataattgcgactcattctcctgctatagttaaaaggatagatcccgaaaacattagatatttaagaatgaacatcgatgatctatcaacaaaagttaagatcataaagtttccatcaaaagaaaaacatgaggataagtataaatatgtaaaagaagccgtacaagcttatccagaactttactttgcaaagcttgttgttctgggcgaaggagatagcgaggaaatactgattcctaaattactagaattatgtggtagtaatattgacagcagtggtatttctgtcgttcctcttggaggaagacatgtaaatcatttttggcgattattgaatgatttagagattccgttcgttactttgcttgatcttgatatggaacgagttggaggcggctggggcagaataaaatatgttctttctcagcttatggatattggagtgccaagggataacttgctacaagttacctttacagatgatcaatttaaagaaatgcatacatggaaattagtaaagggtgatacaaatcttcttgcatggactaatttcttggaagggtttaatgtctttttctcttcgccattagatctggattttatgatgcttgagtgcttcagtcattgctacaaggatatcttagaaggtaatgaaggtccttatatccaaggaaaaggaggtaaagaaaaaggaaaagaaaaaggtaagatttcttatattgaagttaacgttccctctgataaagaatacgtagctagagttgcaaatgatgtgcattgtacattgaaagagaatggcggtgatggtgttacatatagtgatgctcaaaagcagttgatggtttggtacaactattttttcttgaacagaggaaagcctagcacacatattcttgctctatcaaaaataaacgatgcggagttaaaagataatgcaccggaagtcctgaagagaatgatatcgagaatcgaaaaatttctggtaactattgaataa

SEQ ID NO: 79931 - DNA, 1878 bp, Desulfosporosinus sp. BRH_c37
atgatcaataagatagttagtgatacagaatggaagccgattgatggaatgaaattggaagaaagtgcattgagcacagttagagaaaataataatgtactggttactgccggacctggagccggaaagactgaattgttagctcaaaaggcatgttatttattgcagacagataaatgctctaacccgagaaaaattcttgcaataagccttaagacagatgccgccgataatttaaagcagagagtagaaaaacgtagtgcaaaagaaacatctggaagatttatttccatgacatacgatgcctttgctaaaggattattagatcgttttagaaagggattgtcaagaaaatactgcccagaaccagattatttaatcggcgaagatgcagatatacacataccgttagcatttgaaaaagttgggtttataaacaggacaagattgtcgcctagtaaactgaagtcttattttcacaatcaacttgcagcggtaacgttaccaataacaagtgatactataagagaaaaggcatggctcttattaataaagggtgatgctaatataagaccgtgtctaacatttcaaatggtctcaagattagctgagtatataattagaactaacccgaatttgaaatattcaatattgttaacctattcccatgtttttttagatgaatttcaagacactacggaaattcaatatgaattagtaaaaacttgctttatgaatacaaaaacaaatattactgcagttggcgacaataagcaaagaatcatgatatgggctggcgcgttggaaacagcctttaacgattatcgttcagatttttcatcaatagacaaaactttattgatgaaccataggtctgctccaaaacttgtcgaattgcaaaggatgatgtatgcatctttacaagatgatcctaaagaaatatattgctctgataagtggaatcaagatgatggcgaagtaaggctttataaatttgacaatacatttaatgaagctgaaataattgctacagatattattaatttgcataccaagggcgttgaattgaaagatatttgtattcttacaaaacaacaacccgaaaaatatactgtggatttgattaatacattagctgaaaatggcattagggcaagagtagagactgaatatcaggatctgttgaaagagccaatttcgtcacttattattaattcactatatttgattgttaaaaagaaaaaccctgacagctgggagatagtaacaaattatctcaacaaagcgtattcaggacaaataagttgtaattttgattatcttatcgataaacaaaatgagttgacttctatatttaaaggtcataaagaagacttgcttcaatgtgaagaagataaattatttgcagatataattgatagcatattggacttctttaatgtagatattattaagtctatgtaccccgcttacgctcaaggagtctattttgaaaagactaagaagaaatttataaatttgttatggaatgaatatgaagggacaaatcacgagtgggaaattgcattggaaaactttgaaggaatacattccataccgataatgactatccataagagtaaggggctagagtatgataccgtttactttataggattagaagatagtgcgttttggaacttcaaaaaccagccaatggaagatagatgtgctttttttgttgcactttctagggcaaaaagaaatgttaattttacgtttagcgaagatagaaaagttggatttaacgatgttcaagctcatattgttataaacgagttctatgaattattagaaaagtcaaaaatagttgatgtaatagaaccatggagtatgtaa

SEQ ID NO: 79932 - DNA, 2076 bp, Sphingomonadales bacterium BRH_c42
atgcgaatcaaacatgtcgagatcgaaaacttcaggcttctgcggcatgtcgcgatagggctggaagagcgaacgacgctcatcgtcgggcgcaacaacagcggcaagacctcaatcgcagagcttttccggcggctcctttccgagcggaccttggcgttcaagctcgaggatttttctctgggatgtcatgagtgcttctggatcgctttcgatgcattccgcagcggcgctgcgcagctcgacgttcgagcgcacctcccatcgatcaccatcacgcttgatatcgcctacgatgtggatgctcctgatctgggaccactcagcgagtgcatcatcgatctcaatcccgattgctcggacgctcgtctggttcttacgttcggaccgcgagcgacagctgtcgaaacgcttttcgcggggatagtagcgccgggcgacgatgtcgccgccgatcgtctcggtttgtttcgcgctcttggaagccgtctgccggcggcctacgcctcgtcgctcgaagccgtggatcccaacgaccctaccaatcggaaagccctggaacccaaaactcttaccacgctcatccacggcggcttcatcaacgcccagcgcgggctggatgacgacacgcatcgcgaacgtgatgtgctgggcaaggtcgtggaggtgctgtttcagtcagcgttgaccgatccgctggatccggagaaacgcaccaccgccgaacagctgaaggcggccgtagagcagatacagggtgatctgcacgccggcttcaatgcgaagctgacctcgttgctgcctacgttcgatctcttcggctatccgggtctggcggatcccggactcgtcacggagaccagcttcgatgtcgacaagctcctgaatgaccacaccaaggtccgctatgtcggcgtaaacggcatcacgcttcccgagacatataatggcttgggcgtccgcaatctcgtttacatgcttttgcagctgctgcgcttcttccgggagtaccaggctacgccggccgcggccggggtgcatttggtcttcattgaggagcctgaggcccacctgcacccccagatgcaggaagttttcatacggcagctcgatcagatcacgagcgcattcgtgtcgcagctcaacgagaaccgcccttggccagtgcagttcgtcgtgaccacgcattcgccgcacatggcgaacgaagcccgcttcgaggcgatgcggtatttcctgtctgtcggagatggcgacggcatccgtcgttcagtcgtcaaggatctgcgacagggcatgggcagcgcgccagcgcctgatcgagagtttctgcatcaatacctgacccttacgcgctgcgacctgttcttcgcggacaaggccgtcctgattgagggcacgtccgagagactcctgcttccggcgatgatccgtaagaccgacacggccgccgtcggtgagccgcagctcggcagccagtatctgacggtgatggaagtgggcggtgcctatgcacaccggtttttcgatcttctcgccttccttgagttgcgcgcgctgatcatcaccgaaatcgacgccgtgaagcctaatgacaaagggaagcatgtggcggttcctgtcgcggacggtcagttcaccagcaacggctgcatcaaagcctggttcggaaatgcagtgtcgccggctgcgttgttggcgaagacgtcgcccgacaagatggctgacagtcgccggcttgcctatcagatcccggaggcagacggcgggccgtgcgcacgtagctttgaagatgcgttcattcttgcaaatcccgagcgcttcccactgggcgatggggatgccgccgcactcgcctatgagcgcgcggccgagcagaaaaagtcgacgttcgcattggagcacgcgatcgaacacacggactggaatgtgccgcgctacatttcggagggcttgcgctggttggcccagggtaaccccgcgcctttggagccgccgcccgctgtcgctgtcgagatcgttgcgggagtggccggcgtcgccgtgaatgtcgctgaggttggcgacaatggctga

SEQ ID NO: 79933 - DNA, 1764 bp, Sphingomonadales bacterium BRH_c42
atggctgatggcgccgaaagtcccgccgacgccgccggccgcgtcgcgcttgaacggatgttcgcatgcctcgacgaagggagaagctttcgtctggaagcgggcgccggagcgggcaaaacctattcgctcgacaaggcgcttcgccgtctcatcgaccggcgcggcacagagctacttcgccagcgccagcaggttggctgcatcacatacactaacgtcgccaaagacgagataatctcgcgtatcgaagctcatccggcggtgcggcctgaaaccgtccatggcttttgctggtcgatcctacaggatttccagacgacgttgcgtgcgctcgtgcccgaattgcccagttgggccgagaggctggagcccgctggcggcatcggtgcgcgtcgggtgcactatgagcttggctatcccagtgtcggcgagcaacaggtcacgatccggcacgaggacgtgctggcgttgatgattcaggccatggcgcttcccaagtttcgcgcggtgctgaccgcgcgctatccggtgctgctgatcgacgaatatcaggacaccgacgcagcgtttgtcgatgcccttaaggtctggtttctcgatcatggcgaaggcccattaatcgggcttttcggcgaccattggcagaagatctatggcgatgggtgcggctccgttgagcacgcagcgcttgtggtgatcgacaagaacgccaacttccgatcggcgaacccgatcgtgcaggtgctaaaccgtatgcgccccgatctgccgcagatggtgagcgaccctgatgcgcccggcgaagcgcgcgtctaccacaccaatgcgtggccgggcgtgaggcgtactggacagggaggccattggaccggcgacaccagtgccgatgcggcccgagcatatttcagtcacatcaagcaacggctcggcggcgaaggctgggatttcgcagtcgggaagaccaagatactcatgctcagccacagcgtgctggcgcgcgaacagggctacgcgagcatcccgccgatctatggtcaattcaacgacccgtggctgaagaaagatgacccccatatcaagttcctgaccgaccagctcgagccggcctgtgcggcgttcgaagcaaagcgttacggcgagatgttcgactgcttcggcacgggtatgccgcgcattcgcaagcacctggacaaggtcgcatgggttgatgcgatggcgacgttaatcgcgctacggctctcagggtcgattggtgaggtgatcgatttcattgctgcgcaggcgcacatgcagctccccgaagcggtggaggaacgcgagggaaggctagcggaaacgggtgctgagcccgttgatggagaggcgcggcgtgtcacgcagcttcgcaagctgcggactgtcccgtacgcggaagttatagcgctcgatcaattcattgatggccatacgccgttcgcgacgaagcatggcgtgaaaggcgccgagtttgaaaatgtgctcgtgatcgtcggtaggggctggaacaagtataattttgcccagatgctcgaatggatcgacgccggtccaccgaacgacaagttggagtttttcgagaataatcggaatctgttctacgtcgcttgctcacggcccaaggtgcgcttagcgctgcttttcactcagatcctgacagcaaacgcgatggcgaaactgacggcatggttcggtgcggaaaacgtcgtagcactgcccggccagcctgatgaggtgcaggcgtga

SEQ ID NO: 79934 - DNA, 2337 bp, Pseudomonas aeruginosa; identical to SEQ ID NO: 73776

SEQ ID NO: 79935 - DNA, 1878 bp, Pseudomonas aeruginosa; identical to SEQ ID NO: 73777

SEQ ID NO: 79936 - DNA, 2070 bp, Pseudomonas aeruginosa; identical to SEQ ID NO: 73876

SEQ ID NO: 79937 - DNA, 1740 bp, Pseudomonas aeruginosa; identical to SEQ ID NO: 73877

SEQ ID NO: 79938 - DNA, 1851 bp, Pseudomonas aeruginosa; identical to SEQ ID NO: 74440

SEQ ID NO: 79939 - DNA, 1809 bp, Pseudomonas aeruginosa
atgatgaagctctctgagaagcaaaaggaagtcctcgtagccgaaggtcatctcctggtgatcggcggcccgggggcaggcaagacaactatctccattctcaaggcggccaagctagcggcaaccctgcagcctggtcaggaggtcctgtttcttagcttcgcgcgcgctacgattagccgcgtcattgaggccatcgagaatgaacatgacatcccgaaagccatcaagtcacggatcagagtcgagacctatcactcgttcttttggcgcatccttcagacccacggatatttactcggcctaccgaggccgctaacgatcctgactcctgccaacgaggcaatcgcgctatcggctgtccgaagtgagtacaaagccgaaggcaagctgagtgaggcggataaggccgaaaagaaggccaaagagcaagccgaacgacttcggcaggccaaggtcgaggggcgcgtgtgcttcgacctatttgcctgccatgtcgccgaacttctcgagcgaagcaagcggcttcgtgagctgattgctgctcgctaccccgtcatcatccttgatgagttccaagatacgaacgccgatcaatggcgagtcgtacaacagcttggctgcgaaggagtgttggtcgctctggcggatccggagcagcgtatctatgactggatcggtgccgacccggcccggcttgaccagttctgcgcaacgttcgagcacacggaaatcgtgctgcaaggcgagaaccatcgcagcgccggaacagagatccttctcttcggagatgaggtcttgacggggaggttttcgaagaagaagtacctcggcatcgagctcgaaacctatcccgcgaacgagaacgaagcctttaccgcgctgatcacccagacgtatgccgctcgcaaaaggctcgtcgactcaaagaagaaggactggtcgctcgctatcctcgttcctacgaagaaaatgacgcgagcagtctcgaatgtgtttaggcagccgcttgcgaagatgccaccgattcgtcactcagccgcggtcgacctcaatgcagccattctgggagctgagatcgtctcattcatgctgcagccgctgtgtctgttccacctcgatggggtgatcgacctcttgtgcaattacttccaggggaagggcggtgactctccggcgaaatccgacctgcagcaggcagcaagcattcgtaaggccttcgccctctacgcggagaagaaggctgccgataagccggtgcccaagaacagccttatggttccgctcttgcagacatacgaacaactgagagcaatccccttcacgggcgatccggatgaagactggcgcgctgtcaggaagaccatggagaacggtgcttgcctccgcttgagagaggttgccattgaagtcaagaacatccgtctgctggagcgcgggactcaattgcgccaggcgctttcggaggactggcggactttcgggcgatacgaaaacgcccttgacatcaccaggcaggcatttgtccgtgagcacttcgctactcagtcaaacccagaaaatggggttgtcgtcatgaacatgcataaggccaagggaaagcagttcgacgaggtgatcatctttgagggttggcctcgatgcgtgaagaagaagatcgtggcaaacccagatcggatcgtgagggcaaatctgagggaaaacattgacgatcaggccagacagaatcttcgagtcagcattacacgagggaagcagcggacgacgattctgaccccgcgtgaggatccttgtgtgattttcgtctaa

SEQ ID NO: 79940 - DNA, 1842 bp, Pseudomonas aeruginosa
atgcgactgagccgaatcacgatcgacaacttcagaaacttcaagcacctcgacgtgcacctagggcagcacgctgttgttctgggcgaaaacaaggtaggcaaaacgaacctgctgttcgctttgcgaatcatcctggatccgactctccctgactctgcgcgaaggctgcgtctcgatgacttctgggatggccaacccagaccgctgaaggccgatgatgcaatcgagatctcggtggagttcagcgacttcgaggacagcgaagagctgctggcagtgctcgccgaccacctgattcagcccgtgcccatggtggcgaaggtcacgtaccgtttccaaccaatctcaggcctcgatcgagcgccacgcagcgaagcggattatgagtttgtgatcttcggtggcgatcgcccagacaactcggtcggctacgagatgcgacgctggatgccgatggacctgttccccgcgcttcgcgatgcggaatccgaccttgctcggtggacccgctccccacttcggccgttactggatcgagcagctcagaccattgacgaggaagaactgaaagagatcgccgaagaggtacatgtaacgacatcaaggatcgctggtttgccccagcttgatgatgtggtgaagcaggtcaatggtcagctcacgacaatgatcggcgagaatcatgcaatcgagacggccctgggctttgcgccaacggagcctgaacggttgctccgagcgctgcagatgatgatcgatggcggcaaacggggggtcgcggaggcaagcctgggctccgcgaacgtgctgtaccttgcattgaagcaccttgagcatcagtacttggtagaagaaggggaacgtcagcacacgttcctggctatcgaagaacccgaggcccacctgcacccacaccttcaacgcttgatctaccggaattacctcaaggcgcgcgatgaggagcagcaaggtcgtgagctgcgcagcatcctgctgacaacgcactcgcccaacgtagccagtgttgctccgctcgccaacgtcgtagtgctgaccaatgttccgaaggaagggcatacggttgctcgatccctcgcgggtatccaactcgaagctgctgaccgagaggacttggagcgctatatcgacgtcacgcgcggtgagctgttcttctcgaagggtgtcatcctggtggagggcgatgcggaaaagttcctcctgcctacgctggccaagctgtacgacaagaccttcgatttcgatgctatgggcataaccgtctgctcgatcgctggaacaaatttcgctccgtacgtgaagctactcgggccccaagggctcgacatcccattcgccgtgctgaccgactttgacccgaagggcttagcagttagccaggaagacgaggacccggacgacgatggtgtgaaggacaactacggggaaaaccgcgtagtaaaccacatcatgcagcacttgcttcccgaagaggtttgggagcagctcacattcaccgaagtgctgaagagtgcgccagatttcggcatcttccttaacgagttcacctttgaggtcgatgtcttcaaggccggtgccgagaagcacttccagaaggccgccaaggagctgtcgaccaataagaaaatgcacgcgcgcttcaaagccttggctaaggatcctacggccttggacgagcagcagttcctcagagacatcgactctatcggcaaggggcggtttgcccagcgcttggcctcagcactactcgcggcaaaagctgatgtatgccccgactacatcaagaatgcgttggaatacatgagggagaaactgggatga

SEQ ID NO: 79941 - DNA, 1767 bp, Pseudomonas aeruginosa
atgagtaccgccaagccagcctacctcactgctgcagaggacctgcgtggtaacgaggatcaatggagagcctacgagtcaacaggcaactgcgtcatcctcgccggccctggtagtgggaagaccaaaaccatcacggtcaaaatcgccaggctgctcgctgagatagtgcgtcgcccccaacgcatagcctgcatcacctatagcaacgcctgtatcggtgagctgagatcgagacttaccaagctcggtattgaagatgggaatcgcactctaatttctaccgttcactcgttctgcttgacggagctcgtactaccttacgcggctatgggcagtctcgccgtgccaatccccctagcagtcgcaacaccggcagaatctcgcaagcttttcatcgctgcctaccgctccgtgtacggcgaggcacccaggagcagctcctctcgcacatcgttcgacaagttacgacgcaccattccagaccgaaactccgccgagtggctggcgtggaataagcgcgaaacaagagttgtcgaagcctatgaggacctactcctgacgagagggctgatcgattttgacggtatcgtgcttgcaggcctggagctaatcgagaaacacggatgggtgcgtcaggctatacgggcgaagtaccccgcagtagtgatagacgagtaccaagacctcggtctaccactgcaccgtatagtgcgggcattgctggatgctggggtcagaatcatcgccgtaggtgacccggatcagtcgatctatggatttaccggtgccaatccggccctactaaagaccctggcgcaggaccagcgcatagaagccatcacactcaggatgaattatcgctgtgccgatcgcatcattgcggcgtcgaggtcgctttttcctgaccgcgcggaattccaatcccatgatgatcggcaaggcgatattcgcattcacaagttagagcgcgacctcctagggcaggcaaagtatgcgttcgaaacgctgatcccagctctgctcgacgccaatccgacctggaagccaggtgacatagccctgctgtatcggtctatggctgagggtaagcagattgccctggcggctgatcgcttacaaatccgctacttccgcctcgacaacggttcgcctatcaagcgcacacgcctcacagagtggctgacagaggccgcgcagtggtgtgccggtgggtggaaaactgggcaggtgcagctttcgcagctgctcaagtcctggcagcgcatgcaacgctctggaaaaagcgaggcccaattgctcgcgtctcgcaaacgactgattgctgcccttttctcattgcgggatggcagcctgacgcttcgtagttggctgaaatctctagatagcgccattctcggcgacatgctccgcagcgagcccggcctgagcgacgagatcgacatccttgctgaccttatcaacgaggcagatacgggtggagcgcttgaacagttcacagtcgagatctttggcaaccagggtaagagcccagatcaaattaacctgatgacgcttcacagttcaaaaggattggagttccaggctgtcatcatgctcggccttgagaaaggcgcgttaccaagtagctacgacaggactcccgagcaagtgcaggagtccacacgcttgttctacgtgggcgtgacccgcgccaaatcccaggtccaccttacgttcaacaccgacgagtcaccactactcaccacgattcgaactgcgacctaa

SEQ ID NO: 79942 - DNA, 2424 bp, Pseudomonas aeruginosa; identical to SEQ ID NO: 71738

SEQ ID NO: 79943 - DNA, 1932 bp, Pseudomonas aeruginosa; identical to SEQ ID NO: 71739

SEQ ID NO: 79944 - DNA, 2424 bp, Pseudomonas aeruginosa; identical to SEQ ID NO: 71738

SEQ ID NO: 79945 - DNA, 1932 bp, Pseudomonas aeruginosa; identical to SEQ ID NO: 71739

SEQ ID NO: 79946 - DNA, 1848 bp, Bacillus coahuilensis p1.1.43
atgtatatatcgcatatctctattaagaattatcgtaactatggaaatgagccttttataactaaattaaaaaaattcacaacaataattggtgagaataacataggtaaaacgaatttacttgaatctattggtctcatattaagtcaagacattacaatgtttagaaaacgaatgttgcagttagatgatattaactataaaactagaatgaggttcaaggaggaagttctagatacttcaatacctccagaaaatgttaaattcccagaagtagaaattcaaattacatttgaagaaatggacgctaaacaattatcagttgttggtgattggttttctgataactcaatggaaacagcaaaactaacgtatttatttaggcctgttaatgggtttaatcgtaaagagtgggttgaaaaacaaagggactacatacaaaaattaaaatcagaaatgaaagagatacaagaagaaaatcttttgaattttattgaattcccaataaaaaaatatcagtacctcatttatgggggaaatgacaatagtaaccgtgccgaaccttattttcttggaatgttgaaattagaattgctggatgctcttcgtgacgctaaacgggagttaattgctaatggtgactataaattgttatatagagtactaaaccaaaatgaagaagcagcctatgaagacattaaagaagtactaaacaatcttgatgaaaaaattaaaaacaatttacaactgaaaagtataagaaaaactcttatagagcaattagaaaaaatctctttgcaagaaacagcaggtattaataatgtcgactttcacttttcatcattagaaactggtgaaattttgaaaaagttaagcctcatttatggccaagagccaataagtattgaaagaaatggattaggaagaaataaccttttatatatttctttgattctttcacggttggcaccagatgaaagtattgatacctgttttagaattgtagggatcgaggagcctgaagcccatttgcacccgcatttacaaaggcaccttgctagcaatatacaaacaatcaataaaaagagagaagatttacagattataataacaacgcactcaactcatattacaagttcattaaacatgaacaatatggttgtgttatttaatgaaggtggtaaagtaaaagaacattttttacttgatgggtttaaagagaataagcaggggaaagttcacaggcattatcttgagaaatatttagatgcaacaaagtccagcatgttctatgcacgcaggattattttggtagaaggaattgcagaagaaataataatacctgtactttttcaacggttctctaagaaaacaatagaaagtataggttgcaatatagtaaatgtgaatggagttgcttttaagcatttcctagaaattattaaaaatggatactttataaaatgtgcagtgcttacagatggtgacgtaggaaagaagaccgaaaaccgggcagataatttaaaaaaggaatatgaaaccactaacagttcaataaaagttgaggtcaataaagaaacttttgaaaaggaactaattagtgcaaacaaaagtggtaaagggaaagcagtattattaaatgcacttaaagcaactagacctattaatggcccgaaatacactgcagaaattggagacaaggatatcgatataaattctttctttgagttaatagaagattataaatcagaattcgcttttaatctatgtgatgaactcagaaaagaagacgtagaatttgaggtgccaacttatattaagaacgcatttgaatttataaaggggtaa

SEQ ID NO: 79947 - DNA, 1392 bp, Bacillus coahuilensis p1.1.43
atgtcaaagaaattaaaacctacactagttattgctggaccgggtgcagggaagactcattacgtaataaaaaaaataatcgataaacttcctctacttgaaccccagcgatttcttgcagtaattacatacacaaattcagcaaccaatgagattaaggagcgtctttctgagaaaatcgttgtacctccaaatgtctttatcggaaccatccatagttttttagttcgttttatacttaaaccttatggtgtggttcaaggtgttatacccaatcaggtagtttataaagatgtaagcataaaggcaagtgacagaaaagaggaaaacattgttaagagtaaaattgttaaaaaaggaattattccatacgaaaaaattgtgtcattatcttccaatctgttaaaagaaaataaaaggattagagaactaatatcacaaaggctgcaatatctatttgttgatgaatttcaagatgccaattctggacagtttaatatttttgaagaaataagaaaagcatcgtcaactgaaatgtattttgttggtgatccagagcagagtattatgacctttcaaaatcaagggagtcagattcaaaccttagataagcggccaatatataaggctatgaatagtggaactattcataaagagtatttagacagtaataataggtcaagtactacaataattgattttattaacaatttccacacctccattattcagtcaaaaacaaatgaagaaaataagtcccaaaataaagtaacgtttatagttggtacttatgatttgcgggaaattattaattcttttaattctctgtgtaatgacaggagtatatgtgaaaaaaatccttccaatagattctttctaggttatagaagtaatacttttcaggcagttgataatgaatatggattggttcagagagaggatagtcatactagttcattacagtatttaaaaaaatgttcaacatttgtatgtgaagttttaaatataagtaggacaagtgttatcgacaacttgaaaattgatgatcttacatacagacaactttgcttaaagataatagatagtattaaatcaaatccttttataaacagcaaagagttaatatcattaataacaacaaactttaaatgtgatccgtataagtctgttcataaaaaagttcagcataatcctaatcgtattgcagaagattttatcaagaaaattaatcttgaatttcaatacttaagtcttaatattaaagaaataaaggattaccatcttacaatccataaatcgaagggattgcaggctgatgctgttctagtagttgcgaagagtaataatgaagttaaaaaagtggctagaagtggacaagcaatcgaggtttaa

SEQ ID NO: 79948 - DNA, 1785 bp, Comamonas thiooxydans
atgcgcatctgccgcatcaccgttgagaacttcgcaaacttcaagcatgtcgacttcgagactgacggcagcttagtcatcgtcggagagaacaaggtaggtaagagtaacctgctgcgtgctctgaggctcgtgcttgacccgctgcttccagaccgtgagaggcagctaggtctcgagcacttctgggatggccttggggagaacaagctgggtgccacggtcagggtgaccgtggaactcactgactttgaggaagacgacaacctgctagccgttctcgccggcagcttggtcgataccaactccccggtggtcgcgcgcctcacatacctgtaccgaccaaaagccgaacttgagggtacctcacctgagagtatggctgactacgagtttctagtcttcggaggaactgacgaagacaatgcgttcactgcggctcagcggcgtgaactgcccatggactatctcttcgctctgcgtgatgcggaaggcgacctgctgaactggaggcgttcgccgcttcgccccatcatcgaggagttagcttccagcttggacgaggaaacacgggaggaactacaaacacaggtcagcgatgctcagaagtccctggcccagcgtcccgaagtcgccgaggcggccgccaaggtctcggggcgtctcaaggaaatggtaggtccagaacatgccgttgcgctgacgctcggagtaacgccgaccaatgtcgatgtgttgctgaggagtttgaggcttctgattgacggaggcgcccgcggcatcggggacgcaagcctaggaaccgcaaacctgctatttctagcgctcaaaggcttggaactagagcggacggtagaggccggtgagcgcagccacacgttcctggccatcgacgagccagaagcccatctgcacccgcacgtccaacgacttgtgtatcggcattacctcggtgaagcggaaacaactctagaaaacgtcaccactatcttgacgacgcactcaccgcacatcgctagcgtcgcgccgttacgctccattgtgctgctgcgtgacgagcatcatgaaccggctaccgtcatcacgtcggcggctgaggttgagctcacggaggacgaagaagatgacctccagcgatacattgatgtgacccggggagagcttttcttcgcgcgcggaatcatcttcgtcgaaggcgacgcagagcgattcctcatcccagcgtacgcagataagttgggaattgaccttgatgcactaggcgtgacgatttgctctgtcgccagtgccaacttcctcccgtacgtgaaactggtcggacccgatgctctaaacatcccctttgtggtcataaccgacctagacccgcgggagggcgacacgccactcgccgacctccgtgtgcggaacatcctgaaagtgtggatggatgagcaggatatcgaggacgttgtcgaagaccttctcgaacaggccgaaggtgaaggaatcttcgttaacgacatgacactggaagtcgagcttttcaaagcgggaatgggtccagccatggccacggtgctgtctaaacacgcgaactcctggggagcgcagcgcaaggcgtggatgaacgcctggatagcggctcccacaatcctggatgagaaaaaacttcttggttgggtagaagaagtgggcaaaggtagattcgcccaagccctggccgggcatgtcaatgctgcgtattgccccgactacatcaagaggacgctggagtatgtcaagaatggcttcacatcgctctag
